United States Patent Application Publication US 2015/0376612 A1 - sequence listing, part 6

SEQ ID NO: 13173 - DNA, 1030 bp, Homo sapiens
ttggcattatcaaaagcagtaagatcttcctcaagaaacatgatgcatcttgagaatgcaaggtgaaagttttgaaaaagcctttccactttttaggtaaaagggcttcatacctacagaacaataaggaaattttctaacacctgaaaatattaagcactctaaaaataatgaagggataaagctgcttttcaaaataatcagttcatcatgttccattatgcactggctgaagggtagagagagggaaggaaataatccagagtattaaacatagaatactaattatattttgctccattatttagaacggatttccagtgaataagaaacagtctattcttgctgtttacactgattattttaggaattcatgtaaatatggacatcatgttttggggacatcatgctaatgtatctagatgagaattattcaggtaacctgttttgtgagcagtaatactaaacaggcacataataattgatggaaaaaatgagatggataaataataagtaatctggggatatggtatgtgactgagcagttgggtagctgtgtaggcttcttgtttaggtgatgtattcacacagttgcaaattaggtaaaaagagtttataagtgaagtctttttcttgtctgtcccctggcaactaagtttactttcctgaagacatccattgtgatcagctgatggtgtattcttctacaaatacattgtgcatgtgtgagccaaaatatgtgtgggagatttgtttaaggtcaccccccccactgtgctttttgcaaaagtgcagtaacatggattgatggattgctgcgcacctgggttttcttttcacttaacctcgtatttggagattagtcctggatcagcacttcaagagcttccccattctttttcatacctgcacaatctaatcaaatttgtcaatatgatctgaatagactgagaaagttgaccaaggaggagttcagagtggcttctgccatgaagataaaaggcttgtttcctcagcgggtgattgcaag

SEQ ID NO: 13174 - DNA, 1035 bp, Homo sapiens
gcccatggctcagtctaatgtctaacataaatttactttacttttattgttggtctcactcactgagatgttaagttctatttaaaaaaaaattttttttttttaaattttaatcactgctatatcctcaatacctagaacagtacctggcatgtagtaagtgcttgacacattattgtggaatgaatgaatgaatgaatgagtgttgaagtaaatgacaagttgatttgggaaaacatttgtaaacaccagcttagtgtttaaaaagatcttttggctatcacttgaatatagtgctggtagtctgctgcagagtgctttatgcatatctgcagggttttgagctgtagactgagtgtgctagtcagtgagagattaggaaagatatttgatattgtgctaaattcagaatggatagttgataacttttacttaaaactatgactttttgggtttataaattggataggagcataattgcttctgagggagctttatttttatttagaaaatcattttaagaattgtttgcgtgaaccaaagaataacaaagtacgcttttgtttctaggtgaaagatttagagaactaatggataagttcctgagggttaacttcagtaaaggctgcccacccttgtttactactttgaaatctttatattacaatacagaaaaggtaaaatttggtatttattcagatttgctatagtcttttttactaaactgtagaaagatgtccatgtaaataatgtgctattacttaatcattttctttgtttcagtaatgttaccttactttcagtcatgtactgaaattacatgcctgtagtataagtaatatcaaagtaaagggtttatgaaagcactaagattataaaggttgtttatttttaataggtatacttttttttagtaggattttaaatttgacattgttaccaaaggtatatatttattttgtgattattattttatggtacagttatggatttttaaattagttatgcatgcttttaaagttagagcttggataa

SEQ ID NO: 13175 - DNA, 1033 bp, Homo sapiens
atgttaaaaaaaacaaaaaaacccaaaaaacccttacaattccttaatgtctgttgtatggtctatttgactgcagtgtttctgttgtcagttttttgagagatagtgattgatttctgtgtaaacatgtacccggtgcctgccaataatttctctagattatttaacattgggtaaaattcttttgttctttttggtgagggtgacagagaagaaaggttagatgaaatgccagaaataaaaagaaatcttatgtatgtgaattagagtacttcttttataacagtattgcagcagctactgactacagtggacattaaaggatttgtttctcttaagctatcacggggctttcacagggtgttgttcataggcataggctttttactttttaaaaattcttctaatattgatccaaagttgccattacaaaaatgctaaactttttttttggtattttatataaagcatgaaaattatgtttttgaataaggcactgagaatacactaattcatacaggaaccatctctttagtgttaattttaaagcaagcaacaggaatgctatattattagaaatgccagaacaccaagtgtgtttgcaaaatgaattaaactgcagaaaattgagctccagttatctgaatttagtatagtgagaaaaaatttgcaagtctaagaactgtttctcaaataattttggccacatgtatctgtgatttactcatgagaccattttatttattttattttttaatatttatttttcaattaaattttgtaagttttgtgtttgactttttttgtagtttcaaaaaaattatttcaatagattttggggagtaggtggtgtttggttacacagataagttctttagtggtgatttctgagatttttggtacacccatcgcctgagcagtgtgcactgcaccccaggaagccattttaaaaactgcacatttctaagcagcagtaagacctgtttttagtagttagctggatttttaactttcgaggaaggatttcaaggag

SEQ ID NO: 13176 - DNA, 2017 bp, Homo sapiens
gagatataattaatatatcataaaatttacctattaaaagtatacagttcaatgtatattcacagagttgtgcaatcatcactgcaatgtaatgttttgtcatcccccaaagagactccatatcctttagctgtaattctctcacaaccttcacgtccctctcagctataggcaaccattagcctactttctgtctatggatttcccagtctggaccttttatataaatggacttatctaatatatagtctttttgggtctggcttcttttacttaatatttttatccgcaattgtagcatgaatcagtacttcattcccttttatgaccatgtaacattccattttatggatataccacattgattgtttctaccttttggttattttgaataatgctgctgtgaactttggtgtacaagtttttgtgtagacatgcttccatttctcttaggtgtgtatctgggaatggaattgctgagtcaaatggtaactctatgtttaaacttttaaggaactgtcagactctttttccaaagttcctccaccattttacattctcacaagcagtatatgagggttctgatttctgcacatcctcattaacacttgttattattgatgatagccatcatagtgggtgtgaaatggtaatttcttgaggttttgctttgcatttcctgattaccgttggtattatcttttatgtgcttattggcctttgtatatgttctttggggaaatgtcattaattttctttgcccatttttagattgggttatttctctttttattgttcagtttaaggaagttttgtttttgtggggtttttttaggttttttcgttgtttgtgtttttgaggcaaggtctcactcttgtcacccaggctggagtacagtggtgcgatctcacctcactgcaaccttgacctcctgggctcaggtgatcctcccacctccacttcctgagtatctgggactacaggcatgcgctaccgtgcctggctcattttttatagagacagggtttcaccatttgcccaggctggtcttaaattcctggactcaagcaatctgttcgcctcacccttccaaagtgttgggattacaggcgtgagccagcacgccgggccagaagttttaaaaatatattctagatacaagtctctcatcagatacattatgtgaaaatattttctgttctgctacgggttgtcttttcattttcttaatggtgtcatttgatgcactaaaaatttttaatttggatgaagtccagcttatcttttttttccttttgttactcatgctttctggtcttatctaaaaaccatttccaagtccaacgtcatgaagatttataaacatgtttacttgtaagagtttgcattgaggcattcactctgagttcattttgtatatggtgtggtaggagtccagattcattcttttgtgtgtgactatccagttttccagcaccattcgttgaagagactcttctttccctgttgaacgatcttggcagccttgtctaaaaaagattaaccataaatgcgagggttcacctctggactctcaagtctgttccactgatgtgtatgactgtctttattgttttctattattcttttatgagattgttattcaggtgcagccacaataggagacactggagaggctcaggaaaaaacacagtttatcacacaggtcctagagacgaggcatgctgtgccatgccatgctgggccacttggggaagacgctagggtggttaggagggaggggaaggattaggctactgccttcatcgaggtttccttagggtagggcagggcgaacagtttagtttgaataattttggcatactttagactggcggggtggtctcgttgcctggcacctggctctgggatgattaggtagaggagtagtgcctcttggggtataagggccagatagaggagatatggctctggattttgaatagcttgcatattaaagacatactcctagctggg

SEQ ID NO: 13177 - DNA, 1051 bp, Homo sapiens
tagtttgtgagtgtcaggctcttaagtgaagacgttcaatgagtcaacatccaggtttgcctaggctggtacactttgattccattgaagttggacatcagtgctcgtgtgctttgaatatgaatatttgtattttcataaagttggggaaaataatacgtaaagcattggtgtgtgttttaattaaataataaagtttgtaaagtacttggtttgaatatgttcaagaaatggtaattttcccttactctctaaattagatggtaagtcccacccttctcacacctcatctctgtagttacttttattttattgtcattgttcttggacagtttacctctgtaactagccccttcagcaccaaaattatcactagtaattgtgcttatatcagaacctaattcagcaattttggtccttgctggtaaagtagtgtacttaatttagtaactttcatattgcagtgacattttaaacctgtgatttgtctcttcattgcgaaaaaaatgtgtatcggttatgatgttgtgggactttgtctttaaggttaatgaagagttcttttaactcttacataagaaaagctggtcaccaaggacatactttaggaaattataacagttatggtattatcttaggttagattttattaacaaagataaaaagcttcttccatcttgatctaatgtagctgttagaagaaagtaaaccaggagaaggtggctgaacttggaaaatttttcacattgtaagaaaaatgtggggccataaaatttaaggtggccatttatgtttttgttgcgatctcagatacttaagtggattggctttcttgactttaaaataatggaggcaaaacaccattttaaagaagaatagctattacatattaatttgtcatattacacactacctaattaaatataaatggtaagtaaacttgagcgaaataagtcttatacttgagtaaaacttcttagattaactttcatagaaaatttagaaaattgttcacttaattactgaatgagaagtaaccataaggccaggg

SEQ ID NO: 13178 - DNA, 1100 bp, Homo sapiens
aagtcatcgcagtgccatgtcacacaaaacctcataacataatatctgatacccagtccgcattcacatttcccccattatccaaaagaagtctttgtgtttggtttatttgagtatagatccagttaaggttcacaccaaataattggttgttatatctccataagttgatggttatgtctcattattttaatctagaacaataactctcccctccctttcaaaaaaacagtcatttgttgaaaggtcatttgtcttacatatcccatattctagatttggttgattgcctttctcatggtatcatttgctgtatttcactgtcattcatacttgtaagttatagttaggtttacttgctggattagattcaggttctgtttaaatacgggtggtgctttgtgcttcctgttgtgtcatgtcaggaagcttgagacattctggttttctctcttttttgatgttaagattgataaagattcagatgttgtcagcctgttatactcattaaaaaggtccatgacggcgtgggggcacggtggctccacacctgtgatcccaacacttttggggatgctgaggcagaaagatctcttgaagccaggatttggaggccagcctgggcaacaaagtgagaccctgtccctacaaaaaattaaaatattagccacgttcggtggttctcacctgtagtcccagctacttgtgaagctgaggcatgaggatcactggagcctaggagttccaggctacagttagttatgatcatgccactgcactccagtgttggtgatagaacaagacaaaaattcctcattggcctctcagcaattgaagatcattgcctagatcccttgttgattctaataatttctgcattcgttagctggaatttttcttataaagaactttccttcatcaaatacttggttcccttgaaatatagtttatataagaggaacagagtagaagcttaactcattgcctttattttattatttgtgttttaatgtgtgctatagtatgtttgcatgtcatttgatcagctatgctaggaaacctgtttgttttgatgtagtgtgggtatattcactctttcc

SEQ ID NO: 13179 - DNA, 1030 bp, Homo sapiens
tagaaatgtgtttcgtataaatagggtgactaggttgatggaatgattaatgcttcttaatttttaatatctaaattttctaatctaaaattcttaatgatatcattggaaggatttaggagtaattacaagcttcagatttattataataggtatctacatgagttaccttatgcctgtgtcttaaatattttaataaggacacggacacctctcagaaataaaactttgcagtttaccttctaaatagaaggttagtgaattgcgaaataagttcaaataagggttaggtctttattctgctttgaagaagtcattcaagagttcttttgttgaaggcagtttcagtcaggatacatactgctttgagctcttagtaattggatttgaaaaattagaattctagaataagctagtgtagtatcttttctgttttcatcccccccccataagattttagggtttatattttaaggttttgtagtccaacccaatctgatgtttgaaacttgacttttattaaaacaaacagaacaaccttcttcaaaatattagatttaaacttgtgttcagaataacattttaatctattttatctttcaagaattgagttttctttctttccatttttttcttttactattagactgctggtgattggattatcattattttagaatactgacttagatatgaaacagggcaacgatacatatatttctaactctttgataagacctaggacttctgatagatacaaactataggaagatcataactttatcttctattgtatcttaatctttatcaaattgataacatgctttataacaacagattctctattaagtaaattgagttgctaattttcctagttgacctagttattattttttaaatccagaggtttttgttgcctttctctgtataagctcttactagtcacatccgggaactctgagaggtagtgggaaggagaatctggtctagaagagagggcctaataaggagttccttaaaaaaataaaaa

SEQ ID NO: 13180 - DNA, 1049 bp, Homo sapiens
cccaacatgaagataaggatgatgatccacttccacttaatgagtagcaaatatattttctcttccttatgactttcttagtattttattttctatagcttactttattataagaatacagtatacaatacatgtaacatacacaatatgtgttaatcagctgttcatgttattggtaaggcttccagtcaacagtaggctattagtagtgaagttgggagagtcagaagttacacatagattttcaactgcactgggggtgggtcagctcccctaatgctcatgttgttcatgggtcaactgtattataagcattttaaattttattaccatctccttactatttgatgccattttttttgtctccttactttaaatgtttatagcagataggggattgtcattacatgatgtaccatctctttaagtctgtggaataactttatgtatttttttgtttttaataaaatgatcttgattttgtaaccagaaaaaaagctatttctgttttgaaaagtattgattgtgtactttgaatttatttacagatgatttttaaatgttttcttgttatttggttttataaagaaagctgtctaaattactttagacatatgttaatataaaattttaggggaaatttgacttgttctgatgttttttaaataattttcctttctgtttcaaaataggtagaaaatccattagaggaagccgttaagttccttatacctcttaagaaccttgttgctgataacattgacactcatctgttagcatttgaaatatattttagaaaaggtaataaatagtttgagttcagtttttaatctttaattatatttgtgaccatattcagtgtaatctttgtcagatctatttttgtttcttagattttcattttagccttctacaaaggctcttttccttggctactcgaaacttaggtgggtaataaattagaatagtactatcaaatccagtgtaagaatagtttgaacaaccatacaaattgtctacctgaagcaatttttatgatttttcaagct

SEQ ID NO: 13181 - DNA, 1031 bp, Homo sapiens
tcgaaagaaaactgagagatggctctaaattgaattgaatcatgtcaaacaacaaatttgttgggagtaccactgtattttataggtttcatgcgctcgttgtaatagctaagattatatgcttatggagactacaagtaaatttaaaaagcacattatttgtgattttctatctgactttctaataaaaacatttagcacatacattttgccatgagagatcatttttgactatgaaatcaaatattgcttgaatttcaaaagtgtattgaatgtcagaaattcagcattttacaatttctcctatgttagagtgcatgtaagttcatcaacattttcatatatgaacacttgagatcagggtataagattctgagaccagtgagcttcaacctcataccccgcctcctgcaactggactgttcatgtatgtcacagacttcattatttacgtcttttatcacatatactgattcttggggaagaaagtgagagcaatagggggaatttatagaatgagaactactaaatttaacgttggttcccagtcttcaattatgattcagatgagaattaaggaaggatctttagaaaaagacaaatactttctgtgtctccgcacaggtgtgtaagatgggagcacctggaggagaggtaggccctaagattagctcaaagccatcttttttttttttttttttttttttttttttgagatggagtttcactcttgttgcccaggctggagtgcaatggtgtgatctcggctcactgcagcctccacctcccaggttcaagcgattctcctgcccctgcctcagcctcccgagtagctgggattacaggcatgcgccaccacacccagctaattttttatttttagtaaagatggggtttctccatgttggtcaggctggtctcgaactcccgacctcaggtgatctgcccaccttggcttcccaaagtgctaggattacaggggtgagccacggcctcagccccagtcatttttaagacagcacaagcagttc

SEQ ID NO: 13182 - DNA, 1041 bp, Homo sapiens
cttaaacgatatttgttgaatgaaaaagggaatggttctagttttgagaaattcttttatatattttagctgttatgataatgttcatccttctctttgctatctatttggtaagaggaatgaaattttagagcagtgtcctgctcgatataccctcaagattttagagcagggtatgcagtgtattaattctttgttttctttgccatttattaaaatagtgtgtattttgtgcaggagatcaacaattagtagaatgcagtcctttcttatagtgggggagacagctatatgtacagatatacagatggtctttgacttttgatggtttgacttaagatttttcaaatttacggtggcaaaagcaatacatatttagtggaaaacatactttgaatgcccatacaactattctgtttttcactttcagtacagtactcgataaattatatgagatatccaacactgtattataaaataggcttcatgttagatgattttgtccaactgtagacaaaatgtgagtgttctgagcacatgtaaagtaggcaaagctaagccgtgatatttggcaggttaggcgtattaaatgcattttcagcttatgatatttttagctttctatgggtttaagaggatgtaatgccattgtaagttgaggagcatctgtatatggtatacaaccatgcatgcaaatatatatggtaatggatacatgctgtcacagaaacaaacatagcgggcactcttgagcagatatggaaggcttccagagagggtcacattgagctgagtattgaaatgtggttaatgacagtcgtgcaccaggaaaaggatagcattctagcatgactgaactgcacaatggctttggcatttcctcctagtactctgctatgaagcgtccactgaattcatggaacttagttctcatagaaattatcttgatgtttttgttagactgtctacaacaggaaagatgaactagaaaatttactgagttgtttatactcttattatgatcaaataagtgtttttgaa

SEQ ID NO: 13183 - DNA, 1064 bp, Homo sapiens
taggagaagagagagagacagaaaaagcatttgaggaagtaatggccacaatttccctaaatttgatgaaaattataaattcacaaaatccaagaagctccatcagcttcaatcagaagaatcatgaacaaaacaacctgatagcacatcagaatcaacttgcaggaaaccaggagtaaggagaaaatcctaaaagcagccagaggaacaaagacagattttatgtagaacaaagattaaaaattaatagcagatttctcaacagaaactatgacagatagaagacaatagagcgacagttttaaatggctaaaagaaaaaaccatcaacctagaattatatgctcagtgaaaaatatctttcaaaagtgaaggcaaaataaataattttggacaaacaaaaactgtgagaatttatcaccaggagaccttcactggaagaaattttaaaggaagctatctaggccaaataaaaatagtaccagatgaaaatttgcaagttcagagaggaatgaagagcactagaaataattagaatatgggtaaatacaaaagacattttctgattattttccaaattagaggataatcaactttttaaagtaaaactaataatgttttctggggcttataaacttgtgaaatagcagtagaacaaaggaggggagtttgaggaaatggatgtttaccattgtaagagtctcatactgtaaccgaagagaaaatattatttgagtgcacattgtgataaattaaagatggatatagtaaaccttagagaaaccactttaaaaaatagaaacactaaaaaaaagagcatgagtaataagccaaaaatgttgataaattgaatcctagaaaatactgagttaatccaaaagaaggcaagaaaaaagaaagaagagatgagaccaatattaaacagcaaaattgtagatttaaacctaattatattgataatcacattaattgtaagttttctaaacacttccttttgaatgccttgttgggctggataaatcaatacaatccaattatttgctctacaagaatctcactttaaat

SEQ ID NO: 13184 - DNA, 1050 bp, Homo sapiens
cgcctgtgtccgtcactgtttaatcaaactagtcattttgttggtaacccctgttatcagcattttttaactcttttctctcaactttgttagatccccaaataagactcatccagtggaaagttgtagccccagatgccggcaactgggagcccaataaacaggaaatccagggaactctgaatatttaatatgtaaaatttgtgtaaccctcctgttttcaataatatattcttgccctcagttatttttgggtcttctattccagacattctctgctggaccctctccagaataaacctccagccttattcctgggtgggggaggcagttgcagctttccagaggtgaagaaatagggagtgaggtgcagggggtgtgtaaggggaggaaggagcacttagtgattctaaaatacattttcacccaatccttgttagcttcatcttatcctggcatccagaggtacatggtactgccagtttttgagacatttgaggattgtttgttcaagtgagttgattttcaaccctatatctgtcttctggttgtgctaagtcaattctcagccatccatctgctttatatcttacaaaatcttccagttcttgtcttctctcccattttgttttccttatagttttacacatttttagaagtctcttttttattgggaatgagtagagctaaaagcctacactcattaaggtgtttttaattaggaatttgagaaattaaaactttacacaggtgaaaaaataattaatattataaattgaaaattaggccagggcacggtgcctcatgcctgtaatcccagtactttgggaggccaaggtgggcagatcactggaggccagaagttcaagaccagcctggccaacatggcgaaaccctgtctctactaaaaatacaaaaattagctgggcatggtggcacatgcctgtggtcccagctactcgggaggctgaggcatgagaatgacttgaactcgggatgcagaggttccagcgagccaagatcatgccactgcacttcagcctgagcaac

SEQ ID NO: 13185 - DNA, 1025 bp, Homo sapiens
gtaaagttcctccgtcgctttaaacagttgctaaatccggctcaggtgtttgatttaatgaatggaggtcctcatttagggtaactgattattgataaatcttatttgaatacaatgtaggactaggtgttaaatgtgtttggtttttcagctcatgaaaattacagattcctctagatccctccctcgtttttaaagctctaattataagttttaacacaaccttttggatagttatacaactgtcttgtataaattcctaatttctcaattccaaaatttgtttagaaaatgttttagaatatattctacatcaaacaatactaacaatttctttagctccaagaaagatcaacttgcgtaaatatagaaatataaagtaatattagaaaatgatttgcatggaaggctgatattgatttacatacaatataaataatcgattattaaaccaaagtacagggactctcatggctgtcaagggcagttcttcaaggatctcagactcagttcacataaatgacaaagaaatactttattgatgattcttttcagctttctggatgtcatataacttaaaatctgtaagataaaatgaactaagtggtattttcactgagggaaaatataccttttggcactttcaatacatttttagggtatgcatatgatttttcttaagaggcgatattatgtcttctgaaccaggggccttcaaacctctatgtaacatacttacagcaactcagcttttctcttgggttccaccattaccttaaagcatgaacacggaagtagaagtggggatttttgataccagtgcctgaaaaggcattttgtgtttcgtaatgtgatactttcctctgtcttctctatttctctcctttcttctctcttggtgcctctgttcacttttgccccctgagtcttccttcctgcttccattgcctttatcttgctaagtctcaggcccttctggtcacatggatgttggtcttcttcatttatacccagcttcctcctta

SEQ ID NO: 13186 - DNA, 1106 bp, Homo sapiens
gttgagatttgattcaatttaaaccttttaactttttttctgattacctaaggaaattccttatgatttttaagttcattgtaatctggttttcagttttgcttatttcaggttttcatatttagttggtgctgttcacgcactggttacatcattaagtgtctggaacattcctaggttccaattttggaagagttagctggcagagtctccacggtaatttttctaacatgcgtgacagcatgcaaaacatcccatagaccaggtatccctagacatagagtaaactgaaattattttataaacagtatatttactttcaaatgttacttgggtgaatctttctgttaaacatagtttagaagatacacataaatattatatgtttaaagtcagtttattccatggatttaagttaatttccaaaaagttttgttcaaaaataatttcaccatttcattcttttcctataggaatgaacattactgtgctaaggagccagtgtgatgctgcttcccagacggttactggtcatcatttagaaacccatgatttaaagattctcattagctctggacagcagaagtcattggctaaaccctcaacttcctcagtgaatgtcctgggacataaagaactaccttctgtgaaaacttcagtcacaacatcaatttcagagccttggacccaaaggagtttctataggtcatctaatgcttcagataaagatagtgatttacagaaaacatttttttcgtcttctcctgcctactcatctgaatcagaatgttcaagtccaagtcctgttattttcttggatgaagagggatatcaaaaaagcttaaaagcaaaacttgagctgcctaaaattcctgtgatgaaagatgatatagaggattcagactcagaagtaagtgaattttttgatagttttgatcagtttgatgaactagaacaaactttagagacttgcctgtttaacaaagatcccgtcatagggaagtcatcgcagaggaaagggcacaaacatggaaagtcatgtatgaatcctcaaaaattcaagtttgatcgtccagctctcccagctaatgttagaaagccaactc

SEQ ID NO: 13187 - DNA, 1032 bp, Homo sapiens
ggaaagggttcttagcatattgctggtttcaggcatgtgtggaaaggacctgtggaccatcagttgaacttagcccctggaaatggcaaactaggtgtgggagggaaggcaactcttggaaaagggaatgaggtagcataaggaaaggaaatggcttttcacctgatagaacacttcatctcgaagagttttgttcgatgcttggattaacctggaaatattaatatttttgtaaagtatattttgtcatagtttattatggtgctatataaaccaccaatatttcttaaaatctaggtccaaaaagacagtgtttaaaactggtagaagcaagtgggggcaatgtcacaaatcatgatttggcccttttctataactttatctagaaaaggatactaacatttagtttcttctctcattttgagaaacacaggcttctatgatttcagtggggttgacagtgttgcctaggaaatcctggcgttaaaatgggagattgaggtgtgggtagaggctttaagcattaagaggacttgtagtcagttgaacaactctgtgctgaatattatctaatttgatgagaaaaaggagtcgtcttaccggtttctgtccttggttctgtcctccttagcattatttattaatgatgtggaatactcatttgtggatgattcaacacaggctgaaaaaagaatctcattaacagaacaaaggttaaaaagaccaaatcaagctgaggttaaaataattatgtttaacatggataaatgcatttaggctcagaaaattaatgattaatatttgaacttaagtggggagcaaacctggcttgatggcattttgtcagaaaaagacctgtgtttccattgaccaaagttgtaatgtgacttaatgtaatgctgcgtggcattaaggttctggcacagagaaaaagcggggctcatccaggattggtggtgtgctcgttgcatatacagtgtccagggtctcacctccagagatgaagatttatgaagtcagtgaagggtcctg

SEQ ID NO: 13188 - DNA, 1042 bp, Homo sapiens
caaaggtagatgctattaataagcattgtgtgtgttcctatgaaaaaattgaattattctctgtatttaattgatttgtaattgtacctaatgattaatatatctgtttctctgataatccagtttcatttgtatgagcagctgtcataattaaaagccgataaaagtttaaacaagatgcttactatgtgccaagtaccttattagtcaagattttcagtttacagtcttaaggtttttgttccataattttctttatcagaactttccttttggggtggtagaaatattcgaattgtggtgttggttgcattcaacttggagaacatactaaaaaccattgactaggacactttgggtgaattgtatgttatgtgagttttatctcaataaagctgtttttaaaaaggttaagcatatatatgttacacaaaattaaagtagtttttcagaatttaacttacagatctttcaaaacttaagagcttttacagaacttagtagaaaaagaaatgaacaaaagcatgtcgtgagtggtgacaacaggatttatttaaacctgtatttatttatttatttatttgttgttttgttgttgaaacattaacattctttaacttagaaagccatgtttccattgaggctagagtgtgtattccagaaaaatgccacactatatgttgtggaaggaaaatccacatccttttattgagtttgacgttgtctttattattttatgtcctaattgagggtgtggcagttgtatttagttaggtgaagaatttcctgtagaaactcagcctctgcatgtccatgcagactatttgcttggtgaggtttgtggagctctgtctccagcgatcccaaagtgtcattctctggaggagatgtgtttataaaggggaagaagggaaaatgtttaatttgggtaaaggggtagcggtttagaggggaagaccttgttataactaggaaacggtatttaattgtaaacagcaggattcttaagtttcagctaatattgaaaataaaaataaaagct

SEQ ID NO: 13189 - DNA, 1067 bp, Homo sapiens
attattatacaatccaatacattcccttctgtcaggcctgctcctcctctggttatgatcaatgacatcgctcctgtcctagctgccttgggttggttagtgttgaccagagcgcaaatctatcaagtgagaagagggaaacagagccgtttagtagaatgtgtaagtcagtgaagcaggaaaacatacatagattagcacatgagtgtgggaatgcaagcacaaaaccatggaaggctggtactctcttcagagtgagataagccaagaggacttttttttttttctctagcctgataagtaggcttaaattcttcacaaacagtagacttcagaaatagtatttccaggtgccctcagttgtggtaatttagttcatcataatatgttgatgtatattttaatgaactgtgttcagttttattctttccaagattataaagcacattgcctcatacatagaagcaggcaataagtgatatgttgaattgaattcaactgcactgcagagctgtggtccagcgccatcaaaaatcaaagaactagatagtttctctcaatggccctttcactcaaatttatctgtacaagtcagttgatttcattagtattaaatttcatgaaatgactggggataggtgtgcattttgattttctccagtttttgggaaacttctaggccatccctagctgcgtgaccttagcctgtgtttttttgtttgtttaactctggaagcctcatatttctcctctttgaaacaagggtaacaaaattggtagcacaagagggttgtatatgtattttttttctttttttttttttttttgagatggagtcttgctctgtcacccagggtggagtgcagtggcatgatctcagctcactgcaacctctgcttcccgggttcaagcgattctcctacctcagcctcctgagtagctgagactacagatgcaagccaccatgccagctaatttttgtatttttagtagggacagggtttcaccatgttggccaggctggtctcgaactcctaaccttaagtgatccgtccatctcagcctcc

SEQ ID NO: 13190 - DNA, 1027 bp, Homo sapiens
gagaccggcgcgcacaagccagcagccactagctctcccacaaggccgagcgcggccaaagggcagccccgcccgctccgcctcccccagctctattggctagtgcacctgccactcagccgcgcgccggactccggcttcgggcctggaggagggatcccaagcctcctcggctcggctcggctcggctcggctcggctcggctcggctcggctcggctcggctcggctcggctcggctcggctcggctcggctcggctcggctcggctcggctcggctcggctcggctcggctcggctcggctcggctcggctcggctcggctcggctcggctcggctcggctcgcttgtccttgaggtttactgtgtttggcatcgcagttccgacggcagccgccgtttcgcgacccacggcggacttgcataaacactttctagttggaatctcaccctgtgaggtgggcaaggtagtgatattcctgtttgacgccgacagaaataagagagattgactctcagaaccatgtggcgggattttaaaggaggatcttaacagtggctcggacagacccgtgttttctgctcctagcattaactacgtcgttaaacccttctgaatttatttcgtctgtgaaatggggaaaagatagccaccttgcataactggtgaagaattcgtaaactgacagcagaatctagtaagaggactggcccgtggtcggctcttaatggtgtgtatggggctatgaacattcccaggtcttctgacctctagtctgggactctttctgctaaactagggattcttagaggtccagagacttcgggagatccaggggcatcttcaagggggtccctgagttctaaactgcagaggaacactcttaagagagataataaatatttccaccacatctgttatggataatatatattttgtcatctatttgccagagactgttgtaagtgcttgtatacattaagtcacttaatctttacagtgaacactaaggtacatcctattat

SEQ ID NO: 13191 - DNA, 1570 bp, Homo sapiens
ttaggtgttttgcatatattaactgatataatcttcacaacagtcctgtgaggttgaaactattattaacctcattttacaaagcaagagtgtaataggaaggttaagtaacttatccaaatcacacagctagtaagtggccaacctggaattcaaagcacagagtctgcctccaaagcaagagtctggcccctttataccatccaacttgatgtcgtcattttgcttttctttagccacactggcctttttattcctcaagcacatcaggcttgctccctgcataggagttgtgcactggctgttcctctgtcatctcatcatttaagtctccattcaaatgtctttttctcagagagatttttgccttaccactgtctttaaaattaccctcccacatatacagtgtcacctttttcctattttcatagtagcatttacactatctgaattgatcttaattcttttaatgtttgtttctctagaagtatttacttaataactgttgttggatggatggttgctgactattgagtattggctagtatagtggttaaggatataggctttgaaatcagactcctgggttcatgtcacagccccactacttagttgtatgaagttaggcaagtcacttaacaattcttggcctcagtttctccatatgtaaaatagaaataatatctcccttataggattgttatcagaattaaatagaataatgtgtatgtctcttaaaacaattcataacacctaagaactcaaaccatgttatttgttatttatttattacacttaagtttttgtagtaacaaatattactattactataatattgaatgaatggcatacccagaatactctttggaaaatcatgtttccaggccctcctccaggccaactgggttagaatatctgagaaaagggcccatgaatcttttaaaaatacatagattttagggagtctgataaatatccaaccttgggaactatgatagtaggcttttagcatcactatttaggatcaacctggacagttgtgtctgtgtgacatcatcagtgacatcatgacactgcagtgacaccatatagtaatttgtaattttgctgagatgtaaagtgagagcaagtcattctgataagtggacctagaagacccttaccactctccctaacatccccattacagtgcagcctcattctcttccctgtatctctgttggcaagcagtaaaacttagagtgactctaattttatttctgcttggaaaatcatctcaaaaagaaaactaaccaagaaatatggggatgccaggaaagattttttttttttaagtagtggttctaccgtaaactgtaagaaaaaaaaaaatcatgaagccattggggtttttttttgtttgtttgtttgtttttttgttttttttggcaggtgcaccaaccaatgcaaaaactgcacattatcaaggaaattacatgctattgctatatctataagttcgggtttataagttcagatattaacaaagcttttgtgaatctcatgaaagagattgtgtaagacatgattt

SEQ ID NO: 13192 - DNA, 1047 bp, Homo sapiens
cccagtgcccatttgtgctaatgacgttggccagggacgccaatttactaccctgaccctgtccttcaaatattgtctctctctccttggctagggttggacatgttctgacacctttcgtctctttgaaccccatttttccgttctgataatctttttcttcagttatgctgaccatgtctttaaatacattgctaacgttttagctcatcccaccctacgttttaatccctcagatgcagacatcgcggacagccacgcccactcaagaaatttccgaaacagaaagtttgtctgcaacagcgcgccgtactgacgtagcagtgcgcaggcgcagtcccggctcctggcggcgtgttcctcttttcctcggttcccagtgttctggcaggtaaggaacgccggctcttcgcctctcagcgcggcttgtcctttgttccggacgcccgctcctcagccctgcggctcctggggtcgctgctgcatcccgcacgcctccaccggctgcagacccatggccgagcgcggggaactcgacttgaccggcgccaaacagaacacaggagtgtggctagtcaaggtaatgttcgcgagtctcccacttgcgctcctcctaacacaagtatagtttaagtaacttgagcctatcccgctccgtgcgcctcttaaagttcttttacggctatctcgttagagcttcacacattttgagaggcaggagtcattgttgtatctgtttgcagacgaggaattagtttagggacgcaaagtgtctttcagccagttactactctgaatctgcctggactagatctctttctcacggctttcctggaatcttgtcttggtgtccccagatttggacggtgcattttatcccagactgaagaattccttgtatcttcccttggtgaaactggttttagccatgagcctgcgtgaggtagttgaatgtctactttctgtacagttttctcggccagaaagtaggactggtccctgcctactcttaaaagtgttctcttaggttgatggtccttaatgaag

SEQ ID NO: 13193 - DNA, 1041 bp, Homo sapiens
aattttaagctgggtggaatctaaagggatttgtattttagatagatcattctggccatagtataaagattagaagctgggagataagcttgaagcagatataataatccaggttcaaaatgtctgaatgactaaacaaggtggttctagtcagaagggagatgagagtctcttttgaggatagctggaggtagagccaataggacttaatgaacttacttcagacttctttggttgtggaatgggagattcttctggttggtggtggctcttgtggcccagctgtgaatatcccagattggctccctgctgtcctgtgcattgcaaggaaagtttacactgatgagaggagagggacagggaagtttttgtagtccccgtgtccattataatttaatcccatttggcagtttacataagagactcgaagcagaaaatacataaaattgtaagaacggtaccaaggtataaattatcaaaatagcaaactaatttaagtcatgaattattttatttacaattacccaacattatcactaaggtgaggctcaaaattttttttgtttttttttttttaaactgtgaacaacatgggtttgaaattatttttaaatatttacttatttatttatttatttttagagacaggatctcactatgttgcccaggctgatctcaaactcctaggctcaagtgatcctcctacctcagcctcccaaagtgctgggattataggcatgagccaccatacctggccaagctcaaaaaaaaaaaattttttttttttttttgagagacggagttttgctctcgttgcccaggctagagtgcaatggtgcaatctcagctcaccgcaacctccgcctcctgggttcaaatgatgctcctgcctcagcctcccaagtagctggtattccaggcatgtgccaccattcccggccaattttgtatttttaggagagacgggtttctccatgttggtcaggttggtcttgaactcctgacctcaggtgatccgcccacctcggcctcccaaagtgc

SEQ ID NO: 13194 - DNA, 1047 bp, Homo sapiens
ccaagtaatttaatatttactatctgtaatcccttcagtagccctgccagataaggatataatacatttacttgttaattccaagccctaaaatttcctcattgccacttagattcacttctaatagattgacgtatacttactattgcagtcctctgaaaagcatcttactcccaaaatattgaaacttcctataaaggtgctgttttaaagctaggcttcttcatatctttttcatattagtaaatcagctcaaccctcaccctattacttcacctggcctttctcctggccttctgtctgccttccaagctgcgtcttctgctggcacttcttttttttttttttttttttttttaacttgactttgggccaagtatgtgtgctctcactcacgggcagtctcagtaactctactgctcttcctgcttcttgctgtgaaaacttttttcctcctttcaccctgcaaatgtcagcctccgtctccccctttcaaaaatgaaatacacatgtttagaaaatacacattcttttgtagaacctatcctttaaaaaataacaaattgcaatcaaatgcacaaaagatagatgaatgctggagtgatatatttatgtttttaaatgacttctacattgacagttgctggtggaaacatttgttgtttagtgtttttgtagttgtttaattccattgataacaagattagcaaggcagtattagggcttttgcttagacatgaaaatagtccacatgtattaaattaggcagaattatagtatttgttaatataggactcagcctttttctttgtgatctaattgtctaacaaaggtgtcatttattcatttgcttaaagaatatttattgagttgctattatgtgagaaatgctgtacttagaaatgagataaatggaggatttattgactaaaacttacagatttctcttccaaatctgccagcagtttagattgagagtttggcattttttcgtttagttaggtcttaccagtgttcatcctgtaaaatacttggaggatgtatatg

SEQ ID NO: 13195 - DNA, 1060 bp, Homo sapiens
gatactatttaataaccttttctttatttttctcaaaatgtctttcagatccactgttagtcacttttggtttcttaatgttcactcttttgactcttacaaacattccaagctcatgactcttgtaatgaggaagagaaaagtattttatggttttagttgaagtgatcacttttgatgaaattctgtgtagaagagtaccattgacagtatgaagcatatagacaacttaagtttttctttttaaatgtttaaaatttctcaaaatacttggcgtatgaccaaagtactttgaattttgtttatctaaatctataagtattcaataattttaaacttgtctttcctcggggaaaaagttaccatttgattgatagtgaagtagaatataaaaggtaattaagtcctctgaaatactttttattgtttttgaaaggacatatagaaaattattgctgaaatagataaaagttgtaataggttgacttttgtttgggggcagctactttgaattgactgctgtggattgcttgattctgagcttttaaagcaaaaactgtttatagaattactttcagcttttcccttatcattctataatgtcctcagatactattttccagtagatacttattgttcttattgactggaagaaatcaatgaggatttctaaattattacaaaatcctgaaaaaactactactaatagacatttttattctttcattttagtgagcttttggagaaactgtgtgtgtcattgtatgatgtcttcaggccattgatcattcatgttattcacttagagactctgtcggaactttgtgggattcttaaaaatgaggtgcttgaagatcatgtgcagaacaatggtaaatgagtagaaatgatcattttaagttatatcactggctcaatgaatttgaaaaaaaaataagtgcttcttccctcaccccactaaatagataaatttaatatttttgaagcttggcttgatgccttaccccttcttgaatgaagttgcaccttattctgtcactaaagacacaatcagataggg

SEQ ID NO: 13196 - DNA, 1090 bp, Homo sapiens
ctaagtatttggcctgagggaatgtaatgctattctaaggcttaggagtagaggctcatatgaaaacatttggcttagattattttctaccaaacttcaaaaagtgttgatacttttttatcgttctagaattccattgtactaaatgttgcttgaaacaaactcttaagtaggacttgggatggtagtggttatagtagaaagcaagaactttgtgtcaaggcagctgagccctagatcctgcaactgcgtctgccaccttctgactgaagttaaggttatcaggagagaaaacaagatcatatgtgtatctgtaaagtgcttgctgcagaaatgttattttgtagtacagtttgacaaatttgaggtgaagattttgctttagcacaaagtctaaattaaggcattttaaaggaagtataattccaggtttgtagctaagcttaaaagtgttttttttttttttctgatgggaccaatttatgctaaaaactcagacttatatatagaaaatattcattttctttcaagtaatttgattattacgagtttattcttaatattccctctgaagtgttgttaatttcttcagtaacactataaacttaaattttttttcttgatctagtgcatgtaatggagtttgatctgtaagtttaattcctgctctcaaggaggtataacctaaagggaaattaagatagaaaaataggtaaacatgaaactgtatacagcaatgttattgtgagacgatgggtctttgttcattgtgtaggaatttttaaaaagatggggcttcacttgactagccttaaaaaaatgaggctgattggggaaaacttttgaagcaaatgctctttgaggtttgacttaaagataagtaaactatctggatagtaaatagagattaatatactagtttatatttgtttttaacataaaaatacttgtgcgaaacctaaatctatgttatgaaattggttaaattctggagcaatcagtgcaacagtaggcagccattactattaaaacaaaactgttggatatgggaaaatgaccagaatgtagatttagtggggaaaaaagttca

SEQ ID NO: 13197 - DNA, 1032 bp, Homo sapiens
ttgggatcttcctagatgtttgtttttcttccttctgctgtttgcttttttccctcagtccctctgctggagggggacctaacacaggtgtgggatgaaactgagcaggagccttctagctcagtgtgtcttgaatttcctttccactgttcttgccaaatgggcagaaagtggcccccatcttagtttttctaatcttctggcttctcatgtggacttgcttttgacagctgacccctgcagtgtggtatgtatagctttggcacacgatgtgttcctctgttattcttccctatttttgatgtttatgccatacagcgtgaggagtagcatcaatatttctgatctggttcagtcagcttagctctgatttaactactttatctctgcaggcaatggtggcaattcaaagacagcaccatcaacacactgcttggcttgcccttcctctggattgccttcattttgcttttccaagtcatttacctcatgtcccttctcctccctgttctgtaggattctactgaccccactctcatttcatctgggcccccagcctgtcaaaacaaacagcctccctatcagccctttcttgcagatgtcagcactgaatcatacatgaccttaagccatctttgcattatttccttatggcattttttgttttattgccttcctctgatactttccctatgtttaacctttttgctccttcactggcctgtgagatttggctagacgggacttttcctgatttttgtatggcttccatgcccaggacagaaaatgctagaaaaacattgatggattactctctttcctctttcctacacttggtctctgcatttttcatccatcatcttggatctaccctgaagttatcccctacttgtgcatagtttgctgatctgctcagattttcctgtgagagctgatttttctcacatagcctctttttacttctcagtgtcatccactgtattagtctgctaggggcaccatgacaatattcctcagactgggtggcttaga

SEQ ID NO: 13198 - DNA, 1035 bp, Homo sapiens
tctcttttctcatgtaactactatccttggttcctaggacagtgtctgcccatggtagcagcttagtaaatatttgagccgagtaagtgaataaatggctggatgaatgaatggaatgcatgaaggctggactctgtgctgggtgcttcctagacaggagtgaacaaaacttggtgcctgctgggtatatgcccaaaggaaagaaaatcagtacagcaaagagatatctgcacccccatgtttgttgcagcactgttgacaatagccaagatttgaaagcatcctaagtgtccatcaacagatgaatggataaagaaaatgtggtacatatgcacaatggagtactattcagccataaaaagaatgagatcctgtcatttgcaaccacatggatagaactggacatcattatattaagtgaaataagccgggcacagaaagacaaacttcgcatgttctcacttatttgtaggagctaaaaattaaaacagttgaactcatggacatagacatagagagtagaatgatggttaccagaggatgggaagtggagggatgggaaggaggtggggatggttaataggtatgaaaaatagaatgaatgaaggaacaagatctagtatatgatagcacaacagggtgactatagtcaaatatatatatatatatatatattttttttttttttgagatggagtcttactctattccccagactggagcgcagtggcatgatctcagctcactgcaacctccacctgcctcgttcaagcctcccaagtagctgggattacaggcacacaccaccatgcccggctaatttttgtatttttagtagagacggggtttcgccatgttggccaggctggtctcgaactcctgacctcacctcaggtgatccgcctgcctcggcctcccaaagtgctggaattacaggccactgtgcctgaccatatagtcaataataatttaattgtaatttaaatataattttacagtaacctaaagagtataattatcctttgtaacacaaag

SEQ ID NO: 13199 - DNA, 1046 bp, Homo sapiens
gcatttggtccttggaattctgctactcataagaatgcatttctagagccgggcgtggtggctcacgcctgtaatcccagcactttgggaggccgaggcaggcggatcacgaggtcaggagatcaagaccattctcgctaacacggtgaaaccacgtctctactaaaaatacaaaaaattagccaggcatagtggtgggcgcctgtagtcccagctactcgtgaatctgggaggcggagctttcagtgagcagagatcatgccactgcactccagcctgggcgacagagcgagactgcatctcaaaaaaaaaaaaaaaaaaacaaaaaaacgcatttctataacctgcaccgattttgtagaaattagtgtgatctgaagctagttgtcctgaatatgctttatgtaaatatgtgtggctcactcaagtaattttcattctttagattacatctctcgatctttttggatgtaactggatttgctggagttaagaaagaacgttgtcattccccctgcccacccccaccttcctcggctattgatgtaataaatgtaattacggtactaagaaatcctttccagctgaaggaacaaaccacaaagtctgtgctttaaatctttgtaattttttctttccgtttaaaatctaagccatatattcagatttgggcgtgctttttgcaggtgtctatttttagagctttccctgttttgtaatttcccagttctcagtcatgagtattggggaaaaatgcacattaaaattggtttttacttttgttttattttaaaatttgttttgagttttataactttaaaagcctcgtgcattcttttcacagcttccagccccaggaacatggcaatggaacatgtttattgccagtctagcatctagaaaaagctaactcctggatgacacaaagtaaatgattgcaaaaagaaagagagagaggaagaaaggatgacaggcaggggaaagatcagggggtctgaccacagaggtggcgcattttactgaattaagcatgatagttgttgccc

SEQ ID NO: 13200 - DNA, 1049 bp, Homo sapiens
gcctctcaagtagctggggttacaggcatcagccaccacgcccggctaatttttatatttttagtagagacagggtttcaccatgtcgaacaggctggacttgaactcctgacctcaggtgatccaccagccttggcctcccaaagtgctgggattacaggcgtgaaccaccgcgcctggccctgtccagtgtttttaagtgcaagaaggctgtgatgtgccttatagggaaaaatacatgtgttagctaagctttcttcaggcatgggctttagtgctgttggctgtgagtttagtgtcaatgaaccaacaacttagatcaaataagccattttttttttaaaaaacagaaacacacataaaatgacgttataagttggttgatgaaaattttgtgaccagaggcttgcaggaacctaaccctgtgtttcccccagaagctaaggattagtatttcctatggcggtgttcaaggcaacttcatagacagaactaccatcatgaataacaaggatcactgtgtgggctgagtgcggtggctcatgcctgtaatcccagcactttgggaggccgaggcaggcagatcacctgaggtaaggagttcaagactagcctggccaacatgatgaaaccctgtctctactaaaaatacaaaaattagccggtcaaggtggcgggcacccaataaaatgacaatagagtttaaactccatggtttctgaggcattttctgagtaaattggcatacagcgtatgtactctttcctctagaagttccagaaacaacactatttctttatgtgcaaaatggcctcttttgagcagccctggggcagttttgtctggccctcttgcagccagggtgccccagtttagtgtacaattggtataaaaataggcaacacaggaacttgcttgtctcgggggaaaagacgcttgcagatttatagaaattttacatttgtatgcatgatattctgtaggttcaagaaaaaacaattcaatttcaagataacattctacagggtaaataaaatttaatttcaata

SEQ ID NO: 13201 - DNA, 1034 bp, Homo sapiens
ttaaccttatgtgtgtgtgtgtgtgtgtgtgtgtgtgtgtataagtcgttctaaagtacttaaccttctgaaatcttattttgaccatgtagaacacagttcgaccttttttcaatctcatcattatcaacactgttttgtgaacatgggtcattgtggttttaattcatgggtgcccttgggctattctgagtctataggacttgcccttagttacattaacactcccacatgacaaaactcatgagtgcatggggaactttttgatatccttcctcattgtcagttgtcactttttgctactttcagaggtgatatttatagcatttccccccttctgtgttgttcctacccacaggattttaacttacagagatgactgaatgatgacacagaggggacaagtccattgaaataagtcttgttttgttttgttttgttttgttttttgggacagggtctcactctgtcgcccatgctggagtacagtggcacaatctcagctcactgtagcctttgtctcccaggttcaagctattctcccgcctcagcctcctgagtagttggacttacaggcgtgggccactacgctcggccaatttttgtatttttagtagagatggggtttcaccatgttggccaggctggtctcgaactcctgacctcaagtgatcctcctgcctcggctggtgtgctaggattacaggtgtgagccacagcacctggcagaaagaaatttttttttattactcacatttcctaagagaagagggcattccatgccacacagggccaggaggagaagcacctatttgggtgaagaggaagagatgggagtcaggggaaagccgaggccagagcctttactgggtttttatggaaaaggcaaggcagactggaggaatcagcttggggttggctaggcgctgggatggtctttagttgtcagttcctggccctgagagatttagggcaggggaaatgtgggctgggtaactgagagttagataaggaggtggctcagctagatcaca

SEQ ID NO: 13202 - DNA, 1049 bp, Homo sapiens
gtccaaactccttcccaggcctatccacagctacccagtggcctatccccaggcaaccagtgttaccagtttcttgcatatccttctgcatactaccaatacaaaagcatgttattctgtagccccagctacttgtgaggctgaggtggtaggatcactcgagccgaggagctggaggtagcagtcagctgagattgtgccactgaactccagcctaggtgacagtaagaacctgtctcaaaaaaaaaaaaaagcatataattttgttcttcttgtttttatgctgatgaggacatgctatgtccactgttccatggtatgtgcctttatattcagttattcactaaaaaaatgagaagtatagagtaaaatgaaagtctgtagtattctccactagaaacaggtgtggggttcaagggagagtgtgtattaattattgcaaaacttctggttaggtcattaatcagaacgggagccatgcagtggtgaagggccctggctatgatctgaaacatttttctgaagcagtgttgagttctgtaactgaagtccatggggacttgctattggcataactatatgtggaaaattttgctttttgagtaggacattcccatgcttcacatttaatttgaattttggtatgactgtactaagttaacatagcttttcgcattttacagagacattgagtaaatcattgactaaagataattaactcctttatatcacatgctgaaatgttatgggggacatatcattacctttcttggcttatggaagagatgtaatctaattcattgagtctgactgtgtttaagctattgttttgggtgtcatcgttggctcttagaacagggactgggccttagtccttttccttgctcatacctggcctcctcctagaagaccctgcttttcatgttttatgcctcagaaccaagatgtttggggtcccaaagtagggatgtgtatgagcacattttttgatactttcatctttctcttactctctaacatgcgttccgctagtgtcatgtaaatacagt

SEQ ID NO: 13203 - DNA, 1022 bp, Homo sapiens
agtattatggagtgtcactgtaagtggattttagaagtttgatccaacatttattgatcccttactttatacttggcactccacctggcagtgggaggatggaatgaataagacatggtccctcccacccaggagctcataggtttaaaggggaatgtaaacccatgagcaaatgacttacagtgacatgctatctaaaggaccacacaagaagaagtggtcagtctccctgggcattagatcagagtgggagaggtgggggaagcctcgtgaaagatttcacgaaagaggttgaggcttgaattaagtctttaaaaatgagtcagtgggacaagaggacaatattggggactggcatatcaggcagggaaggagcatgaacaagtttgggaattatgaaatactgaaaactgccagaagcagtaacatggctggagtgtaggttgtgaggagggacattcagagaaaaagtgctggagaaatggacagacctcatcatagatactggccttactgcccagtttggactttatagttgttgaggagcctctgcaagtgtttaagctggtgaacagcatgatggcatttgcactctggccgctctgtgaaggatgcatccaaggcggagactgatgtatggaaaccagtcaggagatcatgatagcacccagctaagagagagcactggtctacactgcaggagtagctgggggtgtgtgggggagtgaagagcccagcacggctcccagagccaagaggaagagtgggattcagggagatcctaaggatatagaagattataaatgtcaaggcctccatttctcatgtgtcaagaggggattccaatcaaggcttaattgagtatttgcttcctaaagcaaagaagacaagaattgcttgtgaagtgtatggcaaggtggtcagctgtaagatttctagcctgtggtgaagaactccattttaaataaatagtgcatccaaacattgcattaatattctagttcttcactgcaaaatgtgag

SEQ ID NO: 13204 - DNA, 1043 bp, Homo sapiens
atatctttggaattttgctaaatttttaagatgagaggtgggtagaaagagaagggaatacagaaaagattatattcaacagaatgaaatgcacacatcttgcctttggcctttccttgtcttatattacagcctcctttcctaagtacacctccaagaaatttattttttagagtgataagtgttccaaattatcttacatagcttcctattttcacttggtttggcaaagattttaccatctatgatcaggtgatcttacttcccatttagatgacattgtggggttcagggatcacacctcattctttttctttggctgctgccattgattgatttagcatttgtcactgagagattaaaaacatctttttatcaagataaacaggaaagtgtggagctctatgaatatttgttgaatgaatgaaatgcatgcctaatttctgccagtttctaaacaatctgtgcatatgtccaaaagtaaacaaggacagactctgaaaaccatacctcaagaacttaggagcaagccacaatctcctgaaatgtgttttgtggaggttcctgatttttgagatttggaaagctatttcctaagtagcaacagtaaaatggagacataggaaaataaaccaggctccatatttcagaatcataggttttctgaataaacgtcatcagctactgtgggaaaggaagccctcagagagaactaatccaattattaaagccgaagctttcttccaaaaatcacacagagcagttctttttaactactacagttgtttagcatttttatatatgtgatgcagcttcctcagcctaaaacagagaaataaaacaggcacccgtattagttcattcttgtgttgctataaagaaatgcccgagggtcgataatttataaagaaaagaggtttagttggcttacagttctgcaggctgtacacaaagcatgtgaccagcaactgctactggcaagggcctcagggttgaaggtgaagggagtgcctcctgtcacatggtgacagccagagcaagaa

SEQ ID NO: 13205 - DNA, 1021 bp, Homo sapiens
cacatgaacgcatagcaagaactgcatagacccttcttgaggtatccacccccaaaacccaaacactttccaccaggccccacctccagcattggggattacatttcaacatgagatttggaggggacatacatccaaactgtgtatcagtacctgacaagatttcagcttaaaacagagagaagaaaacacagagaagcccataagtgttagctccatgaattttcacaatgtgaacacacccgtataaccagcttccagttcaagaaacagaactttaccagcaccccagaaagccccaccccgaccccaagaataacctcttcctaattttaaataccatggattagttttgcattttttgaacttacataagtggaattgacctttgtatctggcaacttatattcaatatgatatttgtgagaatcacaggatgttgttttattacatagcattctccttatctacattgataacacttctcttgagttaaacagtgcactgtatctttttagccttctgacgaagacactgttagcctcaatgtgccaatgtcaaacatcatggaagaagaacagatcatcaaggaggactcgtgccatcgccttagccccgttaaaggtctgagaataaaaatgtggagaaagtgcttgtttttcagtttcaaatgttatgtttaaaataacctgtgcacagatagggcagtgataatctttctagagtatgtcctatgtaccaggtactgtgttcttctgggaagttgagctgatttaaaatttaaaagtcaaagatggatactctaatcatctccattttataggtgagaaaaccaagactcagagagtttaagtaacttgccattggtcacatagctgatgtgtgtgtagtactacttcctacggtacatagtagaactaatctcattctgaagacttagataaaattctttttttttttttttttttgacatggagtctcgctctgtctcccaggctggatggagtgcagtggcgtgatc

SEQ ID NO: 13206 - DNA, 1063 bp, Homo sapiens
tgtcaattttctcaacttccatagagcatcagaatgtgaattcaagaatcttagaactaatttagaaagaaaatactgagatgtgagaaggagaatgcatgttcaaaggcacaaattgaaattaaaatattgtagttaggcgagcacaggacttttgattacaccgagcggactcaagtctttgtatccaaagtattctatttgtaaatcatatttaatttctagaaatctgaaatattgaaatagcttctaaagaggtccataggaaatgtatgtcagggtagaataaaaattacacattctttcttattcagcattgtttaaatcatcatgattgaaacttctgtaacttcagtacaccatgcagccttctatgtggtatggatttctaacattggagttctctgcccaaaattttctgagggactttccctccctacctcaatctgaaagtctgtgggatgggggagccaaggctctgaacagctctttcatccatcttatgtgcaaggataaaaatctctaggaagaaaaaaaaaatcaagtttaagtctgccctgggctttgtatcattaaaaagttaattaaaactcttgctgtagtcattctccgatgcatagaacattatttaccttcttgattggtgtctaaaaggtgttttccttcatagggaagggcatgtgttttctcagctcatttcagaggatgccccgctgttagttactattcttggaagtcgtaacttcaagaacctgaagccagccatgagcccttcagctacttccaatcttgccagccttcctaaaaggtgtccttgctcatctccaaagggctaactttttagatagtctgccagtgacagtctagaaggcagaatgtttccaccacaccctcaaatatgtaatcatcacttagttcttaactcaggcttacaaaaaactttatgccaacaaaaacattaacttgtgcttatttttaatacatacaacaattctagagccttatttgaaataaattatctgaatttaatgaaagggttgagtgtaaataaaaacttagaatg

SEQ ID NO: 13207 - DNA, 1704 bp, Homo sapiens
gttcatttagcctttgattttcactgatattaactagcaaactgctttaagtcagctcaaaggattatatagtaactatatctgcatttggagcaatgtgatcagtttgcatttaaaaggaaaaaaaagaattttatcttagccagaatgtccctggattcaggggtgtctttgtataatatgagagggccttgttccaaggtcaaggcagcctccttattttacatgctgtttgccaaatcttgtttcttagcttggggagatgatggacttagcttcctcaagataaatttctagtttattaagatgcaaacagctctcatagatggctactacgaagaaaatcttatttttctgaacattttcatgaatccaggggacttgaaaatatggaagacccacatagttagaagaatatatttataaagattccttgctgctaagtcagatcagatttgctaacaggaagcattctttacatgacagtatcttgagttatgtgagttttttttcctcctgactttgtgttgattggtgaaatgcagggtatgtggaagttatctaattaacctcagttgtatatgaataacccacagatgtactgaattacttttggtgctatcttgtactcttcaatctgtaacacaataaaatccctttgtacgatgtctaatgagcaccctgagccataaattgcttaataaacacattttgggtgattattccaagtttttatcagcccattgatacatgtattcatgagctctcagcattcccatccagctctgcagtgcattgaggcttctctttaatggtcaccactgtggtggtttttcccttctttctggggagaaaatgggaaaaaaaaaaagaaaacttactgggttgccaccttaaaataatatcaataaaaactgagtaggacactcatgtaagagtagatttaattttcagtgttgatatagttcaattaaaacatgttaaagacaaattaaaagacatttatattttaattctggcatccaaagtattctttggacgcactttgattttttttgtgtcattaatttgtctgtactctgctgcgctgcacttcttgggatttattggatgatgttttttcattagtagtatggtaactagcagaacacaattaatttagtcctttaggcaaaaatttgaatgaactgttctgtccattgccaacccattaatttctaatcagaatattaagcttctctgtggtttttctccaaggtacccgtgcaccagcccatatgctaactggatgcctgcggatgcctgcccttgcagcttgactggggatacctggctgacctccttagagtctgagaagtagtcagggatgtcactgagtggtttattgtgctgaccaaatctcctcctcacaagaaagaccgttttttcagtactcccttccaatgttagataaaaggagccaagtatctatttacattttattttgaaatagccatttgtattctctttctccagtttctccaactggtggcaactctccactcagtgtcaggaattccaaaatttgtgacacctaatttctaatcatctttcctatttatggatttctggtttgttatttttagggagagacacttatgaaatggggctggtggaaaggggccccgcagaactacaatgtatgataatcgagtataaatttca

SEQ ID NO: 13208 - DNA, 1110 bp, Homo sapiens
taatttatctgggtgtaaaattctaggttagcattcatttttctctcagcattttgatggcattgctccattatcttctaatgtgatgccattctgattccttgtttgtacatgactttttttccccctttggttgtctacaggctggtgattttctccttatatcttttttttcttttttcttttatgctttcagctttcaacatttttattgacatgacttgtctgctgtcattcattttcattctttgtggcttaaggtttatttgttttatccctttactgtcgctttattgagctttcaggaggaagtaaacaaacatttcactggaaatcaatattagaacttcaacttagctatcttgatagctttttaaagatttgttagaatatttccttttacattaaaaattgacttaatgataattaataatggataataatggaaaccatctgaattaccattagcattaatttaagatcagacaggatggtctagaaagattgatgaggcatcctctgatcgtcctcttcaaagttccaagattgtctccttcatgaggaattttagaggcaactcattaccaactttgtagttttgctttgtggcattattactccaactaacttaaaaaagtttcatttttgtaattaatatgttgcctttttcatttatgttgaaatgcttatgtgctggtgtgccttagttattttcctttattgttttaagttcacatgtatgtgattttaatactttttgctaccatcctttgtaatttgttgaacaacagagaaaagccctattaattttgacaacatattaaaagtaatattactgcctttgtaatagttcacacatgtagggcttattagtgtgggtcaatttaagtaaaccttttacaacagtagaaattcatgctgtgggccgggcatggtggctcacgtctataattccagcactttgggaggctgaggcaggagaattgcttaagaacagcctgggcaacatagtgagacctccacctccacaaaaaaatttaaaaattagccatgtgtggtggtgcacatctgtagtcccagctacttgggaggctgaggtaggaggatcac

SEQ ID NO: 13209 - DNA, 1796 bp, Homo sapiens
tattcttaaaaaccgttctatgagacagtctttctcaaccagcgtttctcatttgaaccacagaacacaaaatcatttaaatgactgtttttctaatgttctaaggatggtagtattcaagatacatatgagaaaatttaatctttacaaacaatggacagataaccttagagggcatttgagcttataagtggggaagttaaattgcttaattatataataagtatttgcagttaatttgaataggtattattacttattatagaaatataccctcgatgagcattttatttactggtagcaatattttttcctctcccattcccacttccaactttatccagccaaattctgaatttgttgaaatgcaagtgatttatacattctaaagccaattcattttaatgatacaaattattcttaaaaatccagttgctgcctgtttttgcaagtattactgtaactacactgtatctttttcttcccagaaacttacagcctatttagatcttaacctggataagtgctatgtgatccctctgaacacttccattgttatgccacccagaaacctactggagttacttattaacatcaaggtataagaatgttgactgtttttgatgaatgatgccttcatagtgttctggaattccctgttgagaaattagccctataggagcccattttatcagactgtagttaagaattttacaaagaggaactaatactcatggtttttgtttttaatgttttatatcttgaaattgaaataaatttctcaaataatgttttaagttttcctaaagagccagggagtaaatattagccaactacttaattctggtgccatagacaatacgtaaaacagatgaacatgactatattccaaaaaaaattctacttataaaaacaagccgggggcggtggctcatgcctgtaatcccaggactttgggagacctaggtgggaggattgcttgaggccaggaatttgagaccagcctggacaacatagtgagaacataaacaaacagatggtgggtagtagtttggcaacctgttccataccataatgtgtaagaattttgtcttgtttctctagtctactcagtgtatgttctgagatagtcatgtcatgtattcttttctgaatgtaggctggaacctatttgcctcagtcctatctgattcatgagcacatggttattactgatcgcattgaaaacattgatcacctgggtttctttatttatcgactgtgtcatgacaaggaaacttacaaactgcaacgcagagaaactattaaaggtaatactttttaaatattaaagtgttgggcagaaaagttcattgcattaaactagatttaggtgaagcctagtcattgttaccaatatacctgccatgagtgaggtaatattgtgtcgttatataatatttccaggtttctatagaattatcttaattccatttagtaagtccactcttttcaggtggagagaaaaggtcaatgtgaaatgtcattgccttgagatgatggtacctcattttccatctagttagtcaccctgtccaacttcccatcctaccactttggttgagccatactgaaagggtttttattatccagagggtgtcttgggaccagctcttcagctgtgttttcagggatctggattctaagcaggctgtttgccttttggatcatattgggaataatcactgtcagggtagttggaaaggaatttgggtgaagaactaagagcattgatacaactaatgttgtagctttgc

SEQ ID NO: 13210 - DNA, 1049 bp, Homo sapiens
tggttaatagatttccaccactagactgctcaatacgttagtagggcacctgacacatagttgcagctcttatttattgaatgaatgaatgattccttcccgtaccaccctagtcttgcccactgtcatttttattctgggtattatatttcccaaccagttgtctgactttctcctcagatctcatccccatgggtctgagtgagttgccttgaatataagattcagtgatggtgtcctgctgcacttaagagaaaatccttttttcaagccctaaaatcctgccctcactagacttctctcaccatttctctgtttgcatcctagccttttagttttggcctcatataagcttgcagccctgcctgaaacagttgtctctgtccccactctaccccctgccctccacaaagaaaagttaactcttactcatctttcagatctcagactaaaagtttcctcagagatgccaccatagctctctatttctcatacctttcatgatacttcatcacctgtcttcatgaagtcctcctctagactattagcaaaatgctcatactgtgtcctcagtatttggcacataataggttttcttgacactgaaggaaggaataaacatctggtaactatagctagaaaaaaaggaaatacggtatctacttcactaaaaccaaagggggtttttttgggcagacaatcttcattattcagatggaaattaatgtttgttgaatgaatgagctacatttcatggattaactccatgaaatggagttcagctagtaagggttatactttgaggctatttcatcttgatgggcttgttgttcaaagttagagcctcattttaagtaaaatgttctgtgggggccatattaagattttcatatgacagaagtgtatatatatccacaaatgtttcaagccaagattatgtcttcttccataatgccaccttcttctaggatagtatttttgggccagatggttttccacatttaaaacataccaacattcttttaaggcccagtgattatcaaaaggga

SEQ ID NO: 13211 - DNA, 1031 bp, Homo sapiens
agaatacttggaaaacacagaaaggcataaataaaatatgaatcgaccaaaatgtcaacagtggagagaatcacttttcatattttagaatgtttctttcctttgggtattgtttcacattgagtagaatattatatatatgtgtgtgtgtgtgtgtgtgtgtgtgtgtgtgtgtgtgtgtgtggcttttaaaatttacctaattgtgactttctaaatttttttctattctttaaacttgtttacaacctttttaattcatatctggtagcttattttaatatgatcctaaatacaatgttgctttagagtttttttggtacaatattatttaggcccctgaaaaactggaaacaactgatattcacagctgaagttaaacaatacatattaaacatatctaaacataaaatgttataaatataaaataaaatgtgataaagaataatggcaatattggcaagtgcttctaatgttaaacaaatgaagcaggatatactctgattatgactgtgtgtaaggaagaaacctagaccactaacgcatagaatgaaatgactggagagaagtttaccacaatgttaacccaagttttatatgagtaacttacatttgtaaggaggatgtattacctttctagtaaacaaagcaagcaaaaacttctttaagccaactttaatgagtattctatacatataagtactttaagatctataatcatcagggtttttttttttctagatatagaatttggggactcattggtaggagtgatttggggtacagttctgattttttttcctgctatagtaatttcgactggatgcttccaagttgtttgctctgctgtctgagataaggaatctgcttggatatttgtttctgttgtaagaagcaggaattacatagtggacaaagcattacattgtatatgtttaagggtgaagggtaactatagtggtgattttggtcagagaaaaaaccatagaaggcaatgtccgaatagggtttacaggaaaaatagaaattca

SEQ ID NO: 13212 - DNA, 1044 bp, Homo sapiens
atttcaaaaattttataccttttatgaattctcttggacttgtaacatctaatggacttccagaggtaatctgaaaggaaatttaataaaatattaatgttttgagactgtggagggaggataattgtctaactttcttagatcaatttactgtgtatcacattttttttttgcccaagaagaatctagccaagtagaattgtggtgaaactaacttttgtatagtaacaaaaagcttttgagtatataatcaaatgtattagcatcattttgtgatttatactagaaatcaatctttattgaattttttccaaaatcaaagtatagacttttaaacttctaaataccattaaatagctaaattttaatagctaaatataaaccattaaatttgctttggtaagcctcattaagcgtaggaaccatgattaatgccatcaacattattggcattactacattgtggaacatctcttttgaggatttttaagaactgcttaattgaaaatacaaatgtatttgttgaaatgactgtgactattgcagaagtgttttaccttagtgatattccatccatctacctgttttgtttcgcattttgctacaaatgtctttccaatgagaacagaataactgagagctttgcatggtaagacgaaatatgtggagaaaaggatgctgtgatagatgatgaagaacaaaaccagtgttttagaagacatagtattagtcactatgaccaaaaggcatgaaataaaatagctagactgctagttctgtaacctgaattgatagctagtttttgaattaatttattaattcaacaaatattttttgaatgcttaatatatgtcaggcacgtgctagatactatggatacagagatttcactctcagtcactatccttaaagtgctagtgggagaggctgacaaagaaatagagcattacaggagtctacaagagtgtgaaaaaagtattcacagggttctgtgatatctcaaaggagagctacctaatccaaactagggctgataggttttgt

SEQ ID NO: 13213 - DNA, 1110 bp, Homo sapiens
ttcaagaccagcttggccaacatggcgaaaccccgtctctactaaaaatacaaaaattagccgggcatggtagcaggtacctataatcccagctactcgggaggctgaggcaggaaagttgcttgaaccccgggggcagaggtggcagtgagccgagattgtgccactgcactccagcctgggcgaaagagcgaaactccatctcaaaaaaaaaaaaaaaaaaaagattaaaagtaaagcatatatgggatgtttggaaaatcttggcagttaaacagttattataatacctatttttatcttaggtactgttttgtagcattggctatctttgtctacataaaattctaataaatattttctatgcacgaaatagacctaaaatcaaagttgaacaaatgttgcaattttctgtacctcacttttagatagaccttatttatattgcatgcgaactcagtgtatattacaaaattaaatgtatattatacaaaaattctttaatgaaatctgtgcctctgtgtgctgagagatgtaatgacatgtaaaggataattgtcagtgacttttttctttcaaggttgaaaatctttctaaacgatacgaagaaatttatcttaaaaataaagatctagatgcaagattatttttggatcatgataaaactcttcagactgattctatagacaggtattgcacatggtatatttgattgatttgctttagatataggttgatactgatataggtagattatatagtctttagcttagtgacctttagatatcatttataacaaattactttcaaatgtctttatacaaagaaaagtttaacagtattttaagcatataacttatctacaaatatagatttaatgtgaattgtgtgtcctataacagttacctttttgcagttaactgaatataattttttaaaatgtgcaccaaaagataatggctaaagtaattagtttcttcaaatagtggtctctaccttatttctatcctttcatatactattgcctgcctggtttatttaaaaaagtttatacaaaagtgtagtctctgttattatcatgtagaaacctaaaattggaatggttgagag

SEQ ID NO: 13214 - DNA, 1073 bp, Homo sapiens
tggagaaaaagtgacaagccccaaatctggaaaagagtatgattgatttacaataggagacgtggaagtcataagcctctgaatttaaatattaaatgtagtatctctggcagatgaaactatagaggacttttatttagtcatatatttttagtgtttgagtcttatattacatttttaatcataaaaaccttgagtggtagtggataactttgtgaagataagttatgccacacaaacaggatactgtgtatttttcctgtgagaataattgacattatagagaagggatatggcatagatacatttgcgttttcacagacttttttttaaaatttgaaatataacacatattaagaaaagtatatatctcaagtgacagtttggtgaatttgtcacaaattgaacacatccgtgtaaacaacacccagataaaggcccagagcaagctttcatagtcttttgattctgtgtcataataaaaaattctcgttaaaactgtagattgataggaacatattcacacagagttgttgactgagggaaatttcaaatgaggtgctgcttacttctctcctgccaataatttaatgaaagaaagaacatcatcttatttttaatggttgtgtggggaactgggttcagcatttttgcttgacagccttgagataaaataaatccataaggaaaaagcccacttctgtttcttttcatcccagagagattaatgggcaatatatgagtgtaagatactggaaaagtctgttgagaaacctagtgaaatctcattctctgaaaagttgggggattacaggtgctatcgaatgcatcatacctaagggttagatgaaatgacttccaagagtttggccctattaaatctgttaagaggtttataatgccagcaggtgatgaaatgaaatttggatgccttagtttcagtattttcagaatttatcatattttttcaataaatgtttataaatcaaagtatgtcagatgctttattccctatatgatctgtctttcctggactattctggactcttcctattgatctctcatttgctacc

SEQ ID NO: 13215 - DNA, 1075 bp, Homo sapiens
aattccatactggtttctagtaaaggtctctgtcactgtactacattatttctgtgaaatcattcatgctgtttttactacctctataatatatagtcaggcatatgggacagtataaagggagcaatacaaatagtaagttaattttattctaagtgaaagcataatatgtatgtgtattttttatcctgagtaacaagggaagtgttttgcctaggagctaataagtaacaagaaagggaaaagtaacatttgttgactagctcctttgtgcagtgcactgtgactattggtctggcttattcctcaggaagaaggattaaaagaagactttacaaaaatgagcaaactatattataaaagtaaatgctagtatgcatatatgtttcattcatgcaactcctagaaatgagaatttactataagtgttttcagaatccacaataatttaggttgaaattaggtatttggatcaactttcaagggaaggggtgacaatgaggtgaaatagacatctagattgttttcgtagactgaaacattggacctgaggtttttgttgttgttttactctttctctgtttttagtaaaagattccaggtatgcctaaagtcatcttctatacgaatgcaaaaatgtaacgacaaagaagggaaaataaaagaaggcaatatcttaggaataaatattttatagtgacattatttttctgctagtgaactaataatctacaaaaattttaagatagataagcagaaagaatacaaacaaaaaaagatagtaatttaactcatatgaataatcatccactgaaatgtagcaaggatatgctacatatgaaatgtaattagatgattgcttaaagatctaggaatataagctcaatgtaataaaataactttcttcatcattgttaaggattaataaggcattaaatgggttttcatgtgggtcctcatatgttaaaaaggacaacaataagaaaatctaaagaaactgagataacttataaatcaatgcaggtattctgtgttaaatgcttatgtaagcctgagttcttcatccagatctgtt

SEQ ID NO: 13216 - DNA, 1052 bp, Homo sapiens
gaaaatttcggccaatatccttgatgaatatcgacgtgaaaaccctcaataaaatactggcaaactgaatccatagcacatcaaaaagcttatccaccacaaacaagtcggcttcatccctgggatgcaaggctggttcaacatatgcaaatcaataaacgtaatccatcacataaacagaaccaaagataaaaaccacatgattatgtcaatagatgcagaaaaggccattgatgaaattcaacactgcttcatgctaaaaactctcaataaacttcatattgatggaatgtatctcaaaataataagagctatttatggcagacccacagccaatatcatactgaatcagcaaaagctggaagcattccctttgaaaactggcacaagacaaggatgccctctctcaccactcctattcaacatagtattggaagttctgttcagggcagttagaaaagaggaagaaataaagcgtattcaagtaggaagagaggaaattaaattgtctctgtttgcagagacaatgattgtctatttagaaaaccccattatctcagcccaaaatctccttaagctgataagcaacttcagcaaagtctcaggatacaaaattaatgtgcagaaatcacaagtattcctatacaacaataatagacaaacagagagccaaatcatgagtgaactcccattcacaaatgctacaaagagaataaaatacctaggcatacaacacacaagggatgtgaaggacatcttcaagaactacaaacttcactgctcaaggaaataaagaggacacaaacaaatggaagaacattccatgttcatggataggaagaatcaatcttgtgaaaatggccataccactcaaagtaatttatagattcaatgctatccctatcgagctaccattgacttcctttataaaattagaaaaaactactttaaatttcatatggaaccaaaaaagcccatatagccaagacaatcctaagcaaaaagaagaaagctggaggcatcatgctacctgacttcaaactatactacaa

SEQ ID NO: 13217 - DNA, 1073 bp, Homo sapiens
ctcttaaaggaaaaaaaaaatgacatgaccttgagcaaataatttagcttctctattgtatatttgtaaaaggagagtattaaattagacctatagaattcttttcagctcttagctttctatctaattcagtctccccactaattttcaatgacaagaaagaacatatattattgtttcaattttacagaccaagaaactaaaattcagagaagttgtgacttgcttaggattacaaagtgattattggtggagaatgacgaagtcaaaactaaaaactgggtcctcacaagaagtacccaacccagttccttatacatgtttgtataatgaaagaatacaacttagtgagtgcatgcataaaggataatagaaagcactgtgacctagagatccagaatccttgatttctaaattttgaccttaccttgggcaaactctgccctgaactttaagatggatatgacatgcccttttgaccttatgaagagttttcagaataaaatgaaatgaaaacatattctgaatgtaaacctctaaaaagatactattatagatgacatcacctataatatcttaactttatagaaataaaggttatgttgtgggaaatcatggaacaataagatttgttttgttttcttgaccagataggatgcctgtgctctgtcagataaagaagtgatcatgtgatgcatttggtatgccttttttagcactgctaatgtacagccaatttaaatcaaatagacataggctttgcttataaaaaccacatatatttctaagttagtttgcttggtggttaacacattgcatattgcattagtcttaatatcctctaatgttggagctagcactggatcctagaaattcagaataaaagtccaccttacccctgttacaactagccattcatcttctttggtatatagtttagctctccttccagtcactcaagtacaacttaggaaactaaaaccatagctgattattgctggagcaggaactcgaatcctagtttcttgacttctagtcaaatgttctcgtagtaacaggtagctttcaccctt

SEQ ID NO: 13218 - DNA, 1047 bp, Homo sapiens
ctcctaatctgagttagttgtctcttctgattttcatggcaccctgtgtattcttttattctggtacttagcactttgtattgctattttttatttacttatctgttttttttttcattagactgtaaactatagcataaaagttcaaaacaaaggctctgaaatcaaacagtttggaactgtgtcctggatccaccacttattcatgtgactggacaatttactccttgtctacctttcttcacttataaaatggcatttaaaaaataattaccttctttctagagtttgttgtgagaattaaataatataagtaatgtggttggtgctatgtctggcattcaataaatgttatctgttaagctctttgagggtagaattattgattgcttatcatgtgccatgtatcataccaaactttttatataggttattttattttcacaacaactctatgtagtgggtactactatgaatgtgctatttctcttagcatctctagatgaatggatcagtgaatgaatgatagatggaattgtggccagtggaactaattgtaggggtaaacagcaacctagaaacatggttaaaagcatgacaatgggcaaagaaagagtgaaagaggcagtaagcaaaggaacgtgactcccatactagtatagcagctaacggcacaagttttagaaacaggtagacttgggtttgaatcactgctccatcacttatcagccatataatatggggcaaaatttataatttctataaaatacacatatctactttatggacgtattttgaagattaaatgagataatatatgtaaaatatttagcatagaacctagcatatagtagatattcaataaatattaactagtactattattaaattaagataatcatgaagacagaattttggtagtgaggtagtgagagaaataaaatagaatcatgaagtataaggtaatgactttgaatcattaatcatagttatcgaaatcaggcatgatagaaagattacggttgttaatcttccttatagtgcaat

SEQ ID NO: 13219 - DNA, 1027 bp, Homo sapiens
accctgtcagaaataagcaagaaaaaggaagacactgtgaagctataaaagcttggtcagctatagctagcacaggaaggtgggggagagagaccaaagaaacaaagactgtggttgtctaatggccagaacagatgctataggtgcttgccatgtttgaatgtttttttgttggataaaatagcaaacttatcaaaaaatgaaaacaaatggtataatgctacttttaaaataacaacagaataaaactatatagttttaaaaacaggattcagatttagatctagagacactcagactctgcctctaccagataaagtctgaagaaaaatggttaagcaatttgttaaagagaaactctgtccatttagtgttgctgtaacagaataactgaggctgagttaattcataaattagaggggtgtatttggctcatggttctggtggctggaagcttcaagattgggcagatgcatctgctggggacctggggctgcttcaagtcatggtggaaagccaaagtggggcagacgtgcacaaagagatcatgtggtgagaaaccaaggtcgctgaaatccctttgattttttagacagagtctcactctgtcaccaggctagagtgcagtggtgccaatctcagctcactgcaacctccgcctgccaggttcaagtgattctcttgcctcagcctcccgagtagctgggattacaggtgcccgccacttcacctggctaattttttgtatttttaatagagatggggtttcaccatgttggccaggctagtcttgaactcctgaccttatgattcgcccgccttggcttcccaaagtgctgcgattgcaggtgtgagccaccacacccggcctgaaaccccttttataacaactcagtcttgggaactaattcagtcccaagagaaccagaacccactcttgctggagggcattaatctattcacaatggatctgcccccaggacccatacacttcccaccagtccctaaggcctcccaacaccaccac

SEQ ID NO: 13220 - DNA, 1781 bp, Homo sapiens
cttaccaaaaagccaaccatgctagcaccctgatcttggacatcttggcctccgtaactgttaaaaattatgtctgttgtttaaagcaaccagactatgttattttgctgtagtagcctaagttcagtaagacggtaattggtgctaagaaatgggtgactgctataacaagtacctaaaaatgtgggagtagctttggaactgtgtaatgagtagaggctggaaaagttttgaggtgtgtgcattaaaaaaaaaaaaaatgctgagattgctgcaaccagactgctaggggcaattccagtgagggctcacagagaaaaaaggagagctggagagaaagcctccatcttcaaggaggacacataaataatcatgaacagaatgtcatttgaaaacatgggtgataggccattctgatgaggtctcagatggaaatgaggagcatgatttggacaatggagaaaaggcaatccttgtaataaagtggcaaagaatttgactgaattatgctcatgttccagtgttttctagaaggcagaacttgtgaactgttaaattgggtgtttaggtaaagagatttctaagccaagtgttgaaggagcagtttgttttctcttcactgcttattcaggttgagcatccctaaattaaaaatccgaaatataaaaagctcaaaaatctgaaactttctgagctttggcatgatgctacaagtggaaaattccatcatgtgatgggttgcagttaaaacagtcaaaactttgtctcatgcacaaaattatttaaaatactatgtaaaattaccttctggctatgtaagatgtatgtaaaacataaatgaatttcgtgtttagacttgagtttcatccctaagatatttcattatgagtaagcaaatattccaaaatctgaaaaaaatgtgaaatcttaaacacttttggtcccaagcattttggataagggatactcaacctgtagtaaaatgtaagaagagagaaatgaattgaagaaagagaaatgaattgaagcaaaaaggcaccagaacttaaagatctggaaaattctcagcatgtccatattacagaaatgagaaagaacatttggaagagaacatcaaaggggtggctggctgaccgtttgctaagaagattagcatgggtgtaaaccatggacctaatagccatctcaaccgaagccaggaatagagactgaattatattagaaacactgccagctgagattaaaggaaatagagaacatgggatagaatgaaggaagactgtgaacatgcatgatcatttcagaaaagggagaaggactccaaaggcaattcagaggtcatcagggctgctacgcccactacagatccaaagtgcatgggcccaaagggcaaggctgcttccacctcagctttaaagggcaggactgccccgcagcagagcctcatgggaaggtccctgtgagagtgctgcatggtcagggctccaccaagcggaagggacaggtcacctcactgagccatgggagtgatgctgccatttcagtatctggaaggcaggaccatcaccccagtggatatggaaagcagagcattgaatcaaagatgatgattctcaagccttaagatctaacagtatttgccttggtaggttttggacttgcttgggacatgtcacccctttctttaatctgatttctaccttttggagtgggaatgtctgtcctgtgcctgtcccacgattgtcttttgcaaatacataacatatctggtttcacaaaag

SEQ ID NO: 13221 - DNA, 1051 bp, Homo sapiens
aaatacacaatccctgaaaagctgatagatttttttccccagcccaggtctttatttaaaatgttgtggttgcactgatttcactattcccacagtaatcctaaaaagggataggaataataagctttcacaagtacttattatgggccaggcaatgtgcttcattctcataactatcttatatggtaggtattttaacagtaggtgaggaaacaaacactaaaaacataataaatgttaatgaggaagggaaggaacagtttaggtgcccattatgtaataaacattgtgctaagagctttatgatctcatttaattctttcaacaattctatgaggtaggtacacctgcccttattttgcagatgaagcaaaatgagtttcagaaagtcttaaataacttgctcagcatcacacaaagcttgtgctcctaactgttactcatactgcctccttggaaaacttaaaaacaagaaagtcagattttcttactttataaacttagtatctatagtaggcaattatgatttgctgacaagataaagggctactattgaaaaattagtagcaattggcttgggttctaaatttttctgttctgtgtaaacatggcagaaagtgttgtgtcctggttttaattttttacgtgctcttatcccagcaatttcattccacaaacttgcttttcatggtcaaatttaagtctgttaagattttctactcacaaaaatagtagatgtggcaggtattcatttactttttgaggttgtccaagtgtcttcagttatcatttgttgcctcaggccagtcactagtttcaacttgttgataatctaatgtataaaagaatctattaagcagttaattacagtacattgatagagttgcatattctgttaaggggaagacagcaggctgaaataactccatgatgccatctcaagacttttctctccttcccccagaaggaaattgcagaattttcttgaaatcttgaaggcaccatggctatcatgtaacagtaatggtgtagatggctatagagaaaggat

SEQ ID NO: 13222 - DNA, 1047 bp, Homo sapiens
ttatatttttttctttaaaataattgtaagtggaaaacattttaagtctgactttttgatagaactggctttagaaagaaagatttaattattgccaacccacacatgtgtataagttcaatgagctacatggcacccatgtgcaggtaatgacactttttagtaggattggtaagagaattaagaacagatctacttataagccattctgaaataaatgagaacacaaatccttagttgcatatgtatacactgtatatacatatatgcagacattgtctataaatgtgtatatgtgggataatacctcattatattttaagaatctcctgtatgtcaggcagtatgctgacatacagaatatacagaatttacctttgtagaaaagtcactacagtttacagttaaattaaaagctgcatacctattaagtaatagagtagaatttgaatgtagaataatctgactcaaaattcatttatcttttctgtcaaaatgactttatttctgtagaaacaattatgaagacaaatgagcctaaacaggaaaaaaaattttctgattaccacatattataccatgtattctgttttgtattttaattggctgtaactgtctcccttactgattcatccttgtatccccagctcttcaaagagtgcctaacatatagtagttacccattaattgtttgccaaataaatgaattaaacgagcaattggttgactcttctcagttgtttgtctatatgctggtatcaagcatatattcttacttaggttgagttattatccatcatggaactaaaatccaaattcaaattcgttagtttgataatattcttatcttttatttgcaaatcttaatttctattttgacttcagctgaaatgttatatcagcctgtcagtctacagattgacaagatctagccaagtatagataaagcttaatgcaaagttcatatgatcaagttaatttaatagcactttaatgtataatttagacatttgtgaattgataggatattcaaatgaaatgaatttc

SEQ ID NO: 13223 - DNA, 1031 bp, Homo sapiens
gaaatcatgattgtatttaaaaatttgctctttatacttccccttttaatatgaaaacatcagtttaattagagtcgctcaaaatagtagctttgaaacattaatgagtcatgtttgtaaaaatgaattataacagatcatccattcataaattcagcccatttcaatttaagtgaatgactatgattcattccgagtacattgtgtaatagtctcaggatgtcccagagagctattaaatgttacttttcaagagaaagtgtgttatataagacttatttaagagaaaattgcaatatttttgttagaaaggaaaatatagggaaattcagttgtcatcaattcttcatgttcctaataagcaaaatatcactgttatagttagtctcttggaagtataaaatctaagccagtttagtgagtgctattaaaataagcaacaaaaatattgattaaaaaaattttttaatgactgatgacaaaaggaaattaggatccagaaagatgagtatgtgaaatatcttatattagcttttgaataaatgttcacaaaccttttgcattctggcacttttgatatcgtttagtgactaaaatggacataaaaggatctaagccttcttttgagctggcctcacaaaatgctattttattacgtaggtagaaatatgaatataaaatgtttgttttgtgtgccattctctcttcctgttttcccttttaggaaaaaagccacttactaatagtagataagagctaggaaatgaggctagagaagcaaattgacttggaatagggaaaaaatggaaagattagataattttaaagacaagaaaaatgaatttggatgttttacaagagtcaaaaatttacagtcaaaagagctagagaagattttcactttaggcagattttaagctaattcctaagaattatgtatctaaggcagtttccatttagtttgattttaaaagctgccttttgaatatctaataccaattataaaataaatatgtgtaagtaaaataaaa

SEQ ID NO: 13224 - DNA, 1045 bp, Homo sapiens
tagaagggaatgaggtaagaagtaagaagtctagatcatataagactcttacttatcttcatatcctcaatgccaagtatatagcctgtcatatagtaggagctcagtaaatatttgtaaattagataatcatccgagttgaggttctgtaatctttagaccaaaagccacagagataatcttcctatagcatttctttggtcataaagagcctgtagccggcttgtacactcaatgaagtctagatttcttgacatttaaggctttacacggttctgtcctggtttgcctttgcaccattttcttgatactttcaattatgtccatttttgtagccgaacatttctcacatgcttacttggtgtttccttaatgctgttatctaaggaatgttattcatttctccatttctgccttttaaaattctacccatccttgagggcctacctagatcatgttattgaaccacttcttggttataatacatatcacctaatataattatgtactgttagcccttcatatccttaggttccaaatctatggattcaaccaaccacagattgaaaatatttgaaaaaaaaaattgcatctatactgaacacgtacagactttcttgtcacatttcttaatacaatataactatttacacagcatttacattatattaggtatgataaataatctagagatgatttaaagtacacccgagggtgttgtaggttataagcaagtactacaccgttttatatcagaggcttgagcattagaaaattttggtatccacagaaagtcctggaaccaatcccccatgcataccaagggacaactgcatatgtatttttactcctacaggattttaggttccttaagataggaactgccttttaattatttttgtgttcttgtggtaactcaaatgtagtaagtgtcccataaatagttgtcacataaattaatgaattttaacaataatcttcctggaaggattatgtgaggttagtgggctactattattaatcttaatttaagatgaagattatc

SEQ ID NO: 13225 - DNA, 1017 bp, Homo sapiens
tgatcttcaccccataccaccagactctcccctcctgcattattgtgatcaggttagaaatagcccccacaaaatttcaaaacatcccctagaatggggtaccactcctgttagcattggtttgcagtgagatgtaactgttcctcttgattttaattatctgtccttgctttgagagcaagctcagggctagccttacttttgaaagcttttaaaaatgtggggcttactacttgttctgtagcttgttagtttctagttcttctgaggatattagatacttttgtagtcaaaaagtactgttaacacatgtaagtcaagcagctgtgtatatatacatatattcatgtgtgataaaaaagtatgactaattttatttcgtgtcacttacagtagtattttatttgtggatatgctcagaccctttcctttggtagagcagttgaggtagcagcccattgttgtttatataggttaagatttctgtaggtgactgttctttatttcgaagataattaaaatagaattttgaaatgtctgcctttaacaatatcctaacatccctatataagatgtaggtggtggtacctcagattacccacacaggtttcccaggcttgaacccttctagaaatgaccctatatacacacacagtaatcaacatggttggaaaaagatatcattgtcactgttattggaggatagtattatatacctcagagtcgggaggattaaacaggtaacatctaaatcgcccatagtataatgtctggaacataatgagcgtaataactattgttatttaatattaaaaatgaagaaaagtcactaaaagtagtttagtgacttgaatatctggtcttttgactctgctacctcacctaatctaaaagcattcctatggtggttaacatgggagatagcagttgagagaggtatcttattaactgacattgtttagaattgccagagcatggtgatgacaaaaagctcactaaagatggtctttttctgtc

SEQ ID NO: 13226 - DNA, 1041 bp, Homo sapiens
ctatcaaagatcgtcaccccatttctaccactggtagtcttctatggagattgtagggtccatacctgcagagtttcctttattaaagccagagatttaacattggctaaaagatggtacttaattcaagaagctgtacaaagatacctgctctctggtgttttaattctgcatttgatgatctatatcatataaaagatgtgctgtatctcagccttctcttgagatccatgacttttagtatacacttgctaatatgtaactgtcaagaaggaattgatgcgaatttatctttttacagtaatgtacatggtatataataatcagccatttcttgtagggaaaaggaaatggagaattttgtcagtgttacatgggctcacagaaacaatttaaaattactaaactttcaccagcaatgggctgtaaattcagactatcggccagaaatgactatggtacaaggtaaggtgtactttataaaagaatgtaaatatttttagattatcaagtcaacgtcaattgtataattatttactgtccaaattattcattaaaaattctgcttagtttatctctttgttgatatagttaagatgtgttaccagtctagcaaaagctataagagagttagttacataggaaccacaggaaacattaaacttacaactttccaagattttcagatataaattagatttttatatgtgacaaagagatttttcttttgctcctcagcatatgtgatgacagtattttgtttaaagtcaggtgaactgtaagaacatctaaaatacccaatttaaatagaaaggccaagtatctttcaagagtcattgaaattatttttgttctagagatagctctgctcaccttaggggcaggtgcgtttaattacacaactgagaacttacattttctattttatataaatggcattatatgaaagtgtgtttaaaagttacaacatttacaccaatacacgagtgttattgtttccataaggtaatgtgtatattttttcattgactcgataaatta

SEQ ID NO: 13227 - DNA, 1054 bp, Homo sapiens
actgcacccggccctgaaacaattttatagtaaatgattatgatcgttcctggcctctgagatccttgagggcagagattatgtttcagtcttttccagattcctgacacagggcctgcacgctaaatgaatacagttcagtttttcactgtgtgatctcagttagattctgtgattaattatctagtccctttgctaatcactgttgctaatctttgctaatctttgaattagaaagaacctaatttcattcaggttctttctgtgcctctttcacatcttcatgtacatgttgtactattcctatataatgtgccatatactgccacactaaatcatgtattttaattacagtgttaactctgaatatttgtaacagtcattctaatgccaactagggctatttattcacattatattccatataagcaatgccacatacctcccacagctgttaatcctttaatattttaagaattttgaattttgcttttctacttttcactgaatatattagaaacaatttccaaatctgatggactcagaatactagtaacagtttttcccaagatttacttttctgtgttgtttgtatcttagccaggtattcaacaatgaaatattcatggtgcttgtacataaccactctctatcagaaatacttatacatttaaaataacatatggaataattttgtatactagtatatcaccagtaagaacattacacagaacaaacgtgatcatttcctaaaatctgtatcgatgaatgttagcctttgttcttggcagaattttatgtaatctttgtagccttatctctacaaagagattatttgccttgtacaggtttttggtatagccatttatctttaatatatgttattattactggacaaattaattgtttaaatttttttcctcccctttctagcatacatttggggtagtgcaagaaggcttactggaaacaggtctaattagtgtttggttgaaagataatagaataaagattctattagatataaattctattatagaacttccaacttaat

SEQ ID NO: 13228 - DNA, 1041 bp, Homo sapiens
tctgtgacttgtcagggtggaaaaaaatgtatgtaaataagtatagatgtgataagctttaataaagagcaggggaatttagagaaactgtaccaagcattaaatgtattatttttagtaaccagaaattccttctattgatgtaattaagattttatagtgtttgagaggccaaggcaggaggaccacttgaagccaggagttcaagaccagcctgggaaacatagcaagaccctgtctctccaaaaagaaactaaaaaattagccagttgtggtggtgcacacctgtagtcccaagctgctagagaggctgaagcgggagaatcacttgagcctaggagttcaaggctgcagtgagctatgcttgcaccactgcactccagcctgggtgacagagtgagacactgtttcaaatagaaaaaaaactgcatatagtactttactctcagatatgagtgtttctgttgaccaggaattttaccattcctggttctctgatgcggaggtggccttgtgaaaggacacagtttctgctgagctgaacacgctttagtgtaatctgatgaagaacttctatgctggttgcggtattggtggaaagtgttttattttgcagaaaaagcacaaattccacagagggcaacagttatccattcactccatagctatctattgctgcatgacagactaccccctaaaacttagtggcccatgccactattttattttgcatgattctgtgagccaggaatttgggcaagattcagcagaacagctctactccctgtggcactggctggggtcatggacggttgtgtgccactggtgggtcagttgagaggggggcccagccggcacagggacagtgaggctggaccatccaaggggcttctttcaggtttctggtgcctcagcttggatggctgaaacagctggcagctggccagggctctccagcagggtggccagacctctatgaggtggcaagggctctgaaagtgaatgctccacaaggatgggcccagtgtgtcccccttgcat

SEQ ID NO: 13229 - DNA, 1032 bp, Homo sapiens
aaatacaaaagttagcgtggcgtggtgggacgcccttgtagtcccagctagtcgggagtctgaggtgggaggatcacctgagtgcagggaggtcgaggctgcagtgagccaagattgcgccactgcactccagcctgggcaacagagtgagaccccttctcaaaaaagaaaaactatgaattgtatatgaagtgagcaatacctaatccagtagaaaagttaaaaggaattaactagatttgtatatagcatggatgggtctcaaaaacattatattgaacaacaaaaaaagcaagttatagaataatacctatagtaaattttttataatgaaaaatacacaatatattgtttgtagatacatgtgtatataaaagcataaaggatgccacactaaatctcttgagagtttagttatatctatgttttactttttaactttttttaagaagaccatatatatgtggtgtatatgtggtgtgtatattttgaattatatatacagggaagagaactagacaaaatgctgacaactaattctggatggtggaaatatgggtgtttattattatctgtatttttctgtactttttaaactttgcacacaaaatcacatgggaaagaacaattatagattttcatatctgtaaacagaatccaaattaatgaatttgttgattgttgtcgttgttcttttctcttgcaaacagcagccaccattctgatgtgtattaattaatacagaaaatacagaagagaatcatagaggaaaagaccttaaagtcacttgttcagcaaaggagactaagatccagagattttaaccagctcaccagcagtcatttacctagttacacagctagagtccccaagttccttactttgtatcaaattatggttccctatcaagttagttagtcatctgaatagaggggaaagtacatgaagttttatggttgcaagcttcctgcctcgcaacagtatgaaaaaaggattcaataatagtaggcagatacccggcatcaatctccc

SEQ ID NO: 13230 - DNA, 1839 bp, Homo sapiens
tagaataacagcacctggccgggtgcagtggctcaggcctgtaatcgcagcactttgggaggctgaggtgggcggatcacctgaggtcaggagctcgagaccagcctggccaaaatggtaaaaccctgtctctactaaaaatacaaaaaattagctgggcatggtggcaagtgcctgtaataccagctacttgggaggctaaggcaggagaatcacttgaacccaggaggcggaggttccagtgagccaagatcacaccattgcactccagcctgggtgacaagagcaaaactctgtcccaaaaaaaaaaaaaaaaaaggcaggaaagagtccaggctaaactatggtatggagaagagaatgaaggaaaaggaaaaagtttttcttagtgctctgaactagcgaggtaatgagtgacctggtttatatttctgagaatttcaccttagtctgacaaccctttgtgaactttctgagtaagtgaacttaccaagctagtgaacattctgtactagctctattttgccttgtcaggatctctgctagaaatatcttggaaattttaactactgtttattctaggataatgccagaaaaggttggttacttactgtcttatatggacacataggtaacttttatattgtttgcaagagccacataacaattattttagatactatatgtaatatattaattttcatttttagaggtattgaaatctgatatttcttactttgtcctgttttgatcatatatatgccagaggtgctatgtgtaatacattaattttcatttttagagattatatctgaaatctgatctctgtatcttactttgtcctgttttgatcatataagtcaccgggacagtctctaaaagaatgaagagtaataacacattgatacagagtatttaaaataaaaactttgtaaatacttttcatataccttttaaaatagctatacaaatgaggagagaaactagtatgtataagtggtttgtcagaggttacagactgagagccagacaagtatgtcagtctcctcacaggtctggattcagagacttccagtaatacattaaaaaaaaaaatttatgaaagatgaaaccataggctgggcatgatggcttatgcttgtaatcccagcactttgggaggccaaggcaggaagatacttgtggccaggagtttgagtccagcctggccaacatggcgaaaccccgtctctattaaaaacataaaaatgagcctgacgtggtggcaggcacctgtaatctcagctacttgggaggatgaggcaggagaattgcttgaacccaggaagaggaggctgcagtgagacgagatcgcaccattgcactccagcctgggtgacagagcaagactgtctcaaaaaaacaaaaacaaaaacaaaccatactacagcagattaaacttcttatgaggcttatatttagctaatgttttcaaagttttactttctaaactcaatatggttttttaataattggctctttagtttttccacccattttattgtgaaaatgttcaaacagagaaaactcaagaagaatattaaagtattcttacatcctctacctagattttaatagttgttaattagacccttacttagtttcaagaaaacatttattaatggatctctcttttttttttttctttttgagatggagtctcactctgtcatctaggctggagtgcagtggtgcgatcttgactcactgcaacctctgccgcctgggttcaagtgattttcctgcctcagcctcccgagtagctgggattacaggtgtctgccactgctcccggctaat

SEQ ID NO: 13231 - DNA, 1018 bp, Homo sapiens
ttacagtgtttacagaacaaccttcagcgccgacctggaatggtaactttttccctcctcagatgaccttacttccactgcctccacaaagaccttcttaccatgacctggttttccagtgtggttctgacagcactactgataaccaaactggagtcaggtattttgtactttgcagtatttctcttgtataccagtttgtgatgttttctctaaaaacttgaagttcctcaggcctgtaacttctggaaaagatgattattcaaaataatgttttggggtaaccagtggagttgggtagaatgaccaaataattattttccaaactgggatactttttagagtgaaaggggctattattaggtgggacaaaaggaataaatgaagactgcccagaaaaaactgagactatggacattcaaatcatgggagaaaataattttgtagattatgttccattgctaatgaatttgacttagaaaagaattgccttatttttaagagattgtttcagtggttcacataaaggctcgctcactggtttctcttgagttccttacacactatataagttgttctttcagttttatgattcaactactgtttttccttcagctgactttatttttaaacacccttaaagacagatatatctcatggcaaatttggtatcctgttacagccttggctcttaaacaactcaaaatattgggataggctgtcagtatgttaaggatagttgctcctgagtcaattcttcacttactccctctgttgttcttggctggatcctaacgctgatttccactctgctgtcacaaacatttttccccccgtaaaatgtcttaatgctgtcctaccattattttaccaactgtgaaagctggctttaatttttaggaggaaaagaaaagcctgcatgtgttctttattggtatcatttaaaatatacttttttttttttttttggtaaaggtaggcgtattttaagatattttcttaacttgagcagtagcca

SEQ ID NO: 13232 - DNA, 1367 bp, Homo sapiens
gggtactggagtccatcgtatccagtttgtgtgtgtgtgtgtgtgtgtgtgtgtgtgtgtgtgtatcccgctagtctagcccagcgtttattaatggtcaatataagccacagtgtttgcatagccctcacaaaatgggtcatgttttcggttcctttgatctgcagcgacggaaaagttttgctttgcatattctcttttttgcacatcgagtttagtgacggtgctctcctcacaagttacaagttccctcccctttcaaacagttatagggatctatttttacagggacccaaagagttaggagaaatccagcatgtgctaaggctcaccttcactttttttttttccacacaaggattaacattaacgatgtaatgagttaaaacagactttaataccactaagcatggatttccccattaaccttggcaattatgtcacttcaaagaaggaagtatcaataacgaaattcttttgaattaaataaaattatggaaattgtccatctgaggtctgggcgcagaagaaggaggtttcggtattttaaagaagaactcttattggtggataattattaatatgaaatgaaatttgtaaagctagccctatcagggtacctatatatataggtgcttgatgagtatttagtctccctcacaccattttctaattcccatccttgaaaattttggcaggaaatacagacttcccagtggctaaaaaattatgctgaaacttctcttgtggttcaggtaacctccacttacttaaaaacacacacacacacacacacacacacacacacacaaaatttatccagggaactttaatagcttattaaaccttaatggaactatctaggcaaaataaaaataatggtgattacgtattctaaatccaaaacacattaaattaactcgaattttttgatggttccaataggtaactattaccacctgatttcgtttacgagtttccacagtaaaaacgaaatttgtcagcactcgtttgcttctagcatttctgctacagcaggcttcgccggcagactgatctttctagaccttgtctctttcagagcgccaattttatattgaggctattcagttctccacttttaagagagacgggtgcacttttttttcctttaaaaatcaaatgagaaaatggagaaagagtttgtagcactcacgggtggagaaaacccatctgcctgatccttttgtcccggtgcggagtcgctggagaggagagtctcctggagccgcttcgcggatcccactgggtcacctggtcctggcttattttctttgaggcccattctcggggagtaaatagacagtagcgagtttcctggcaacttt

SEQ ID NO: 13233 - DNA, 1050 bp, Homo sapiens
ggttttgattttcatttctctgatgattagtgattttgagcattttttttcatgtagctgttggccatttgtaagtcttcttttgagaaatgtctattaagatattttgcccatttttaaatagaaaaatcctctacttttgacttttcccttaaccttcacctaaaacctctcaatttgagatttaggtccaaggcaaagaaaccatgttttcctgcttatgtctccatctttttaacgtcttcttacccatcaccatgagcttttcttttcccttctgtttggtagaaaatagttttaagttatttcattctccttcctgaggagttgctttttccctttctctgaggccatattggtgaaaaggctgcagagaacctgattcataggggagaatgaattaaaaatacattttaatgtatataaaaaactatcaccatcacgcttgtaactatgagtcaccttgtccacccttccactcctcactactccagggttccacagacctgagagtagggactgtggtgaagaatgactggcagatatacagcaactgaaaaggcaccacgcttttatctcagttgcattaccctttgtatatcagcacttaaaaagggatcttttaaataacatccttgaatccttttgggtggtagaagtaaaattggggctaagcaagaatgaaatggacttttagaagttaaaataggatgttgtatgggcaaatgtatgaggtaggaaaataatgttgtcactgctttgctatctccattttcaacagctctctcagtgcctctggcatctccttcttttgctatgtaccagccctgtcacctagtccctcccactattaatcattaatgacttaagatgttaccacctccttaattgtatttaaaagttaaaaaaaaacatgcttttattctttcccattacaaataacaattcatattccttttagaaaaatacagataaacataataaaagtcacttacaatccattgccttgaaacaactattactaccctagtatacatcttttattaaaca

SEQ ID NO: 13234 - DNA, 1068 bp, Homo sapiens
tgtcgggatcctgtggtgtgatgtctgggagagtaccctgaacttagtacttaaagtattaagactatgtcataatgtctcattcttagaccctgtcgagtatgtgtagggccggaaaatgtccttcaggcttctttgagttgggtctggatcctgaaccactaggttttaatccttgtcctcatcagagggacagacagtattgagtgacccaggggacaaagtcaaaatggctgtgggcactggcaagagaggaggctctcaaataaggaaacaatggcatgaaaaagttttaacattatatatatatatatatatatagttaatacacatgcttgtatgtttttgtgtatgttcatgtgtgtatgtgtatgtatataaaagcatcaaaattgatatatatcatagggaaaaccaaaacttggtaagatttcattttacccgttttacagtctaaaccttaaaactgcttgcaattttaattatcaatgaggaatggacataataatctgttcagtgctcaggggctctgaagcccttaaattcttgatgtaggaactctccctccaacccagagtgccagggttttgcttgccacctcttctgatctgtccttaccttctccgtgttttccattggtgaagatacatctatgtctcagctcaagccctgctcccattgcattggaacagtgtgtagctgtgcacactgtccacacttaagaaagggtgatgccagactcaaaaagccttggggaagagaaagctcatcccctttagatgaaagaaatcctggagtgaggccaggtggaatattctcaagtcattcctgatgtgtcatttgtctacagcagagcaaattatggctgccttttatgggcatttgaaaggccaaaggcagcgatccactctgagtatataccccaaagaattgaaagcagggtcttgaagagatatttacatagtcatgttcacagtagcattattcacaatagccaagaatgttgattgcaacccaacccaaatgttcattgacagatgagtggataaaatatggtatgtacatatt

SEQ ID NO: 13235 - DNA, 1042 bp, Homo sapiens
gtatttgtgaacaaacacagagtttctaccattcactgggcactattaggtactaggtgtccggggatatttctattgctgttcttagctctattgttggtttacttggccagtggttgctagctttgccagtgtgtgtgtgtttgtgtgtgtgtgttacttatcacaagtttcgttagcttgacaaagagctgtgtatattcatttacatgacaaatactttttttggattagcaactctaataagtacagggtatttagaaactgtgtgtgtgtttttctacctgcagtcgtagtcttaagtatgtttcttaatagctattgaacataagtttaatattagctggatgaataaagtattagttactgtattctcttaaaaatagacgtagctttgttacagcacagaaaactgagctgacctcttactagattggctaaaatgaattctgattaaacattttgtaatggtttataaagttcgcttctctacagtatattaaaagatttgtttaaatgttgactgtaagtttggtaaaaatgacaaagcggtaaaaatgacatttggtaaaaatgacaaggcttacactttttgatgatgttcattttccccaaaagtacagctaaagctttatccattataatgagagttcagaaaaggcaaatgaccacctctttttttaaaccaatatgtctttgtgcagtaattttcttgtggcaagtggcataatctgggcgaaggtagtgataaaactcagatatatttcaagaaagcgagtaaacacactaatgacaatattcgtatattacatgcatctgctgcttatgtacttaaaaaaactaaataggaaaatcttactcatctctgtagaaaaacagggtagagattacaacttggggacttcgtgatattttgtctgtgtgcagtttgtcagaaggcaatttatctaaagctggaaaaggatatggtttggctgactaaactgtgtagtgatacgagtgatacgtaatgataaaaatgcttaggggaattttcggggcg

SEQ ID NO: 13236 - DNA, 1046 bp, Homo sapiens
gatgagccccaagttgaggcaattcagctcagatggaagtggtaatcttgcaagaaacccaatttggagttgtcgggcttagaagtgattagggctctgagaaatagatttttcttttttcacttcctctgccattttattctctcaaatatgacattgattagaatgccagtgtttgaggtgatgacaagagagtgtttttggaatagggactggaatttccagcacacacattgagttgattctactgttatatttgaatagcactaataaattgggaaaacatggtgcagaccacacacaactgttggaatgtcctccactgatgtaaagattatatgattatattccccagacccttgcatttaaatacaccctactcttcttgcccagtctgtccattggcctttaaggaaataccaatcttgtaatcactctcagcttatgatgtttctcggcctcttcaatggcatgtgggaattagtgtttcctgggtgaaggttaatttgggggaagagtctagataactcagtggctttaggactcatttgttgggaccagaggtcccacatttgcccttgaccttatgggatctgtgggttgtcttttccctttgttgtgggactgccatccaagaacctgttctctgtatctatagcatggagctgtcctccagagtgctctttagaaagagctccaataattgggaattatgcaaatttagaaaagggtatttcaagtctattttcagtcatttcccaagatatttaaaagtatagtatagagaaaaatcgttttgcatttcatataggcttgggatagcccattgtcaaaattcagtgcatgtcacaatgtaattcactggaggaaaatatgctatcaacaggatttccaagcaaaaagcctggcactaattattgccctctctttagtgtctttaactgccagatctaacatgtgttaaccttatacagcatagttgtaacaccaaaggttagtctctcattcatacaaaatttgtgtgagcttaggaattcaccactaag

SEQ ID NO: 13237 - DNA, 1034 bp, Homo sapiens
attgtcacatataactacataaagggcattgaattatcttacttatatttttaataagatgatttttagtattgctcatcaactcttccccttcccctcaaacaggcttgagactgttcactagtatatagggtaatctgtgccttgaaagaaagaagatgtgatatctgttttctactacactgatttgaatctgttttctccaaactgcgacccaatctagcagaatgtaaggagcctatattggcatactaagaccactgccctcccatttttattgaaaaaggccaagaatgaaaaagcaagctgtcttagtctgagagacagacatcagggtgggattaaatgtgcaaggattttgttaggggaaatacctgtctgggagaaaatgggtagggagcagaaagagctgttagactatggaacaagtctatctcacaaatggagagagggaaggaaggttaggtggaagtgtcctagaccattgtgcagcctaaggaagcttcagcaaggttgttatggagtctgtgaaccaaagttggctgtcagaggagtcccttgtgtcccaggaacaggcttgcccaccacatccagtcattggctaggagcagcctgtggctgggagcagccagtatggacgtggtacaaatgtgatggtggatctcagagtgcagcagctgaagaccttggtcaattaccttccctgtagctggatatttgcaaggcacattctaatggcagcttagtttgcttttgctagaaattaaagaggccgggcacggtgcctcacgcctgtaatcccagcactttgggaggctgaggtaggcagattacctgaggtcaggagtttgagaccagcctggccaacatggtgaaaccccatctctactaaaaatacaaaaattagccgggcatggtggcacacacctgtaatcccagctactcgggaggctgaggcaggaaaatcgtttgagcttgggagacagaggttgcagtgagctgagatcatgccactgtaccccagcctggccgac

SEQ ID NO: 13238 - DNA, 1022 bp, Homo sapiens
aagttcaatgaattctcaatggttgaacattttggctgtttatttattttttgctactgtaatcagttctgtggtaaatcaccttgaaggtaaatatttgcacacatttgtaattatctctcaggataaagtcctagaaggggaattgtcaggtcacagcatatgcacggttttaaggattagaatacttatggaaattactcttcaaaaggtctaggctaatttacatatcaatccagcagcctctcgtagacaagctttgttttctatagcttctttttgggcttttcccctgtcctgtagaaccttctggattttagtgttgattgtcccacccttttgatttcagagcattagccttctctctaagctttttaatgctttgcaatgagattactagttctataattttcagtgctggctctggctgctttgtctcagaataccactgcaattttctgttttttcttttcttttttttttttttttttgccaatggatctattgaactgcctagtgagcagtgcagggggagaaaggtgaacccagtttcatttgcatcccatgtggctttggcagcagtagcatcgaattaaactcaagccccggaagatgtgcttcctttggaaaatgaaagacctacaaagttcaaggagcccattcgtggcaagtaaattaagagcgtaaacccaaagaatgtctgcagtttacagcttggtattacacggttgcttctgattggtataatctgtcattgctgtgatgtgtttagagacaactcagattacactcctgatacactagctagggccaaccacctgtggccctagtcaacgatcaaagatagttaccacaaatgctatttgaggaaataatggcttagagtggaataaaaactgcagtgctgcttttattgtgtaacttttcatcttatgtgcttagcggaacagggcatgagaatcctatttattggcagtaagactctttcttttacccttggtgtcacaagggcatttggggaa

SEQ ID NO: 13239 - DNA, 1041 bp, Homo sapiens
ttaaaaatgttcaatatcattattccttaggggcagattaaaaccacactgagatagcactacacatctgttagaataaagactgaccatagcaagtcgagggcaggaagcaactggaactctcatgtactgctgatggatgtgtaaaatggtacaatcattctagaaaatagctagtttctttaaaagctaaacatatagatagcaaataacccagtcattttacaggtatttactgaagagcaatcaaagtatgggtctatacaaggactgaacatgattattcatagaagctttattttaatagtcaaaaactagaaacaacccatatgtccatcagtgtccatcaatagatgaatggataaataaacggtggtatagctatacaatgggatacttatcaataaaataaatgaactattagcacatgcaacatgagtgaaattcaatgtaattatactgatagaagcagataaaaatgacatactgtatgattttatttatacacaaatctagaaaattcagatatttatagtgacagaaagcagataagtagttgcctggggatagggggagtggagagtagtcgaagaaaaggatttcaaaggggctagaaaaacgtcttgggatgatggatatgttcataatcttgattgtggtgacagttttataggtatatgtatatgtatgacgtcaaacttatcagattgtacttatataaaataagtacattattttatatcatttacacctcaataaaggtgctaatagcaagtaaataggggatattcattgaaaggcaggtgatgatagggtaaaacaatttagctttgaagccaggatgcctgggttactaattttttcttctcctcactggttgtatcactttggactggttaactcttctgggcctttttttctatgtctaaaatggagaaaactattccaacttctgtgggttcttgtgagcattaagttggtttattaatataaagcacttatggtactccctggtatgtaagaagtatttaacaaatgtta

SEQ ID NO: 13240 - DNA, 1030 bp, Homo sapiens
atttatatacagtgagttatttaatccctgcaacaacccatgggtaggtactattatttttccttctttatagataagaacattgaggcacaaaaatgctaaattacagagtgggatcaatgtgttgctcgcttagaaaatgagtcaagttccatatgtgtgagtaaatgtgaacattcccacttccttgtcacttggttttctttctcaagtttggtgtgtttgctctgtgttcacaggatattgttaacttcttagtcctttgaagaaaaatcaaattttttcttaagaagagacttttgaaactcacaatatgaattcaagaagcaaaaaagaaaatcgaatttcacaaatgggataccaatagcttggaaaaatccattgcttttgcagggtttgttattgagggaaccctgcctttcccagcatccttaacatttcttcctcaaataaaaggtaataaaatgcaaccaactgactcattttctaagtgaatgacatatttactctactctttaagtttaaactctaaccaattccccaatccttagttcccatgaaatgtaatgttctcttcctaaaatgtttggccaagttggggaaggtgggcatggcagtgtgagcctgtagccaggttccaaggttcgcttgaggttaggaggttgagactagcctgggcaatatggcaagactctgtatccacaaaaaaaaaaaaaaaaattaaaaattaaatgtttggtcttctacaacctggctttccacttctcattcccaatcatgctctgggaccacctctttcctgtgctgaggaaggctaaggaagcactgtgttctttgaacacagtgctcaatccatcctgcattgatgcctttgctatgacagtttcctctggtctcttcctcctctgagtctagcttgagggccacttccgaacagctgcagagttgagctgctcctcggtacacttcactgttgaaccaacctgggccacaggtgttgcagtgaggttgtcttcagagcctcacccta

SEQ ID NO: 13241 - DNA, 1046 bp, Homo sapiens
tttttttttgaggcagagtctcactctgtcacccaggctgtagtgcagtggcgtgatcttggctcactgcaagctccgccttctgggttcacgcctcagcctcctgagtaggagtagctgggactacagtgcccgccaccatgcccggctaatttttttgtttctgtattttaagtagagacggggtttcactgtgttagccaggatggtctcgaactcctgacctcgtgatctgcccccatcagcctcccaaagtgctggaattacaggcgtgagccaccacacctggcaggcttacatcatttttattagactctacacagaactcatcctgaggctcggccctctcattctttcccaaagcagaattatttgccctcaatattaaagaaaattagaggatcattgattccaaggacggtactgggccggtggaggatgtgggtttccctgcagtgtctcactgccctacctcccttgtcctccccgagcagcataaaggtctcaacccctcttcgtgctcttcattgtcattgtagattattggttccagaatggaatgtcctctccttttctctttctgtttgtaaatcaaaaattccttttgtcttccaaagtaactttgagcatgcagcaattgtatctctaaacagccccatcagggacattctgtattttgttggagttgatccaaaggtcctgatagatgaacttcgaattgtcttttaatggtcctcagaaaagttttattaggtacatggtggacctggggaaacttgttgggacttgtaggttatataattcttttagcttcattgctaggatgcttgggacttttaaccatgacttcattgctcttgaatatgggtttcatgcatctggttgcttggctgttttcagaaagtaggggtaacagtcccatcaatgtatcatcttttccatgattagaaaagaaacctgagaatgctttcctagcaagtatgtagacacagtttcctccaacacctgttctttcaagtcatgagacatttgaaaataaccacaca

SEQ ID NO: 13242 - DNA, 1031 bp, Homo sapiens
tgtctggtcttcatgctttggtgcttctttatgggcaaggtgatttttttgtctgtttctttctttcttaaattactgagttactttccctttaggttttctacttcttcttgagttagttttgggaaattgtaatatttttccaggaaactttccatgatctttaagttcttacatatttactggcaagtttgttaatggtattctcttacagtttgccaaatatttactgctacaatgtgaatgtttgtgtccaaaactcctatgttgaaaccaaatccacagtgctatagaataagaagtggggcctttaggaggtgattaggtcactagggcagaatcctcctgaatggaattagtgctcttataaaagagatggaagggagcttcttagcccttctaccatatgagggcacagcaagaagatgccatatgtaaagcagaaagcagtctttaccagacactaaatctgcaggcaccttgatgctggacttcccagtctccagaactgtaagcaacaaatttttgtttataaattgcccagtttatggtattttgtcacagcagcctgaatagactaaaacatttactatatctatacttagtctctcttcatttctaatattgtttattttgcacacacactctctctttcttctactctcttttaccaaagacttatctattcaaagaaagagcaattttgttgatactgtcttttctttctcttctgtttaattaatttcctcttttaccacattttattccttttccctcctctgagtttctttctttcttttttttttttttttttttgagacagggtctcattctatcacccaggctggagtgcagtggtgcaattacagctcactgcagccttgacctccttgggctcagatgatcctcccacctcagcctccagagtaactgggattacaggtgtgcatcaccgtgccttgctaatttttgtatgttttgtagagatgagcttttgccatgttgcccaggctggtctcaaactccagggg

SEQ ID NO: 13243 - DNA, 1048 bp, Homo sapiens
aagcaggtactattcagacagtgaaggaaatcatgactgggttgtttttgcttgtttgtcatcctgtttcccaggaagataatggaaatgatatgtggccagttaatcatcagtgaggtggagtttccatgaggcttctgcagggttgtaactacaccagaaccttcaccagaagccccactcctcaattacgggctatttcagttctaggttcctcactgcggaacagaaatatctgcccagagttagcattaggacctagcaaactacacctggtccatagattgccctgacctagtgtgttctttcagaggattgtccacattcaaacactgaagcaattttattttgtagctaagacttcttaatgtgtgggaacaaagttcaaaggtgggtagctctggaggaattcgttctcagaactcccatgcagattgcagagctgtaatggtattatttattgtgccaagcatcttttcagaacctgccactagactgtaagctccacaagggcagggactgtgctgttttatttatttctgtgtttcctgcacccggcatagagtagcacaatagaattttgttcaggttgggcgcagtggctcatgcctataatctcaacactttgggaggctgaggctggaggatcttgagcccaggagttcaagaccagcctgggcaacatagtgagaccatgtctctacaaaaacaaaaaaaaagtaattgagtgcagtggtgcatgcctgtagttacagctacttgggaggctgaggtgaaaggatcacttgagcccgggtgttcaagcttgcagttagctatgatcataccattgtactccagcctgggcaacagagcaaaacctcatcgcaaaaaaaaaaaaaaaaaaaaaaaaaagagttttgttcaatgtgtggtgggaacttggaattcagagtcacatgatggaaggtacaaacacagcattatagtaatgagactgaaagcaagactgtattgtgaaatacataaaaacatcaatactacagcaactgtccttgcagggagaaag

SEQ ID NO: 13244 - DNA, 1148 bp, Homo sapiens
gtattttaatttactaaggctgggatgaccataattgcctaacaattcaatgcaacggaatgggctacttcagcactttttactgcatttttccatataatatctaaaagtcaccctgcgacacacacaggctatgtttatgaaagcaaggctttaacccttgcatttttctaggtttgaataattttcttaataaggcaaaaaatgtttgcaaatttgcaccatgatgtcagcacgtcattgtgaaggaggtaggactggcctgcacttcagggatgaagtcctgtccatttggtgtttgcaaaccttgaggatcctcgtggaagcccagtaactccaaagacccttgtttcttcccaagtttctgtctcctttcaggcaagggcaaacatatctgctttgctaggccagtctttagtttaatcttagagtctcaaaaacaaacagtggtaaggtctggataacatagttatccatttctgcgtttgcccagatgaaactttaaaaatgctaaaaataccagggcaatttctgttaattgctctggattatcaggctggagaaatggattgggcgggtatattctagtctattaaatcttgtgctaactttactgatatcgtctcttggactctggcagcctattctgcttttcagcattctccagggatgctcccagcgtgttggaaaccaaactccctgtctgcagagacagccctaacaccaaaacttttgctttactagagaagccagaagagaaaaataatgctgttgcatcctctctgactcagttgactcactttatgacttttattgtcggatcccaaacttgatggctgacctgactgaggtcaccagccccatagggctattttaaaactttgaaaatcacaaggcattttcagttcttgccacttatgagtttgtgcaactattctgatgagtgatccttgaagatacattgcctcgaaatatgaaggtgtgccaagctctagcaaaactgaaaaaaaaagtgtcatttcagaatgaccagaatcagtagacattgtttattacccttatcctccacacctgatgttaaaaacaaagactaggagcacccatgcctgccaggtcagtttatttgtgaacattgaggaatgtctaaa

SEQ ID NO: 13245 - DNA, 1050 bp, Homo sapiens
caaataaaaaaatacatttatactgtcttgtatatgtagttactttttctaatgctctttattttctttatttgaatttgagtcactgtctagtgttctttgactttagtgtgaaggactatctttagtatttattttattttatttttttttgagatggagtttcactcttgtcacccaggctggagtgcaatggtgtgatctcagctcactacaacctctgcctccagggttgaagcgattctcctgcctcagcttcctcagtagctagaattacaggcatgtgccaccatgcctggctaatttttgtatttttagtaggatggggtttctccatgttggtcaggctggtcttgaactcctgacctcgggtgatccacgcgcctcggcctcccaaagtgctgcgatcacagacatgagccactatgactggcctatcttgagtatttcttgtagagcagcctgctagtgataaatcctctcagctgtttattaggaatgtcttaacttcactattttgaagaatacttttgctggatataaaattctaggtcgacatcttggttgacattttttttttttaacacttagagtatataattccattgcttctggcttccatggtttctgatgagaaattatttgttatttttattgagaatccattgacctgatgagtagtttctttctttcaggtttcaagattctttctttgtccttcaacagttttattatgatgtatctagttgtagatctctttgactttatcatacttggagttcgttgagcttcttggatatatagtataacattttccttccaatttggaaagttttcagtcattatttttaattttttccccctttctctttatccttgacgtctgagactacatttatgcatgtttttaggcttgattatctctgagtctctgcttattttttttaattctctttatttctattacctagagtggataatctcaatggacctgtcttaaaatttactgattcttttgtctgcttgctgaaatctgctgttgagccctta

SEQ ID NO: 13246 - DNA, 1114 bp, Homo sapiens
taagtcaagaacttgacaattctgtcttagcctttacttcctgcttatacaaagcttcaagtttagccagaactgagagcacagggcattgtctgtttttcctgacaatacgcatagtcctgaacttgcacatggctccacatatgcatgtagccttttagattcccaggaatatgtcagcttttcaaagttccccatgaacatctcagattttcctttgaagccttttggttagtctattgtttgtatcaactgtgtctcacttcttcagggagctgcaatattcaacagattgttttcaacaaatgctccagaggaaaaggctgtttgcattagatgacttttgaagcagatcttataaggacaaccttttaagtagggtcttccagggaacttccagaaaggtcaaataattttaattttctgggaatggggattcaaagaagctccaaccttgttttgccctttccagtgactacaatgcttttgcttttcattgtgattgtgggttgtttattttatatctactgtagagctggagaaggtagagtggattggaataggacaagttaaaatgccacaaaactctctgtacttactgagattcagccatttttctgaataaacactctctggattgctgcaagcttttggttcctttccagacttctgaaaaagttaactctgacaatttttgctggttttctcattgcttttatgggggagaggattttcagaagtcattacttcatcattttcactgacatcacttcaagttctatttttttaatgaattttttaaagaattctgaaattccctcttaatcacacctaaatgagccactgtttattgaacttatattgaactaataagaacagaatttagtttaactcacctggcaaccttgatgaaaagtggagtcagctgagccattactccttctctaaacaatgctgactgaatgcaatgtcactttgatagacattacagtcaaacaaatgctcaacactatttagttgtctgtatttgatactatgttgagtgctgaataggtggagtgaaaagattattattctcagtttctggtagcaccacctgctctagtcaagacca

SEQ ID NO: 13247 - DNA, 1084 bp, Homo sapiens
attattttatcttctaatatttgttttcttattctctacttcatttttaaagttctgttttatttactgtcttagctcatttgtgctgctataataaaatatcacagactggctaatttataaagaacaaaaatatattttctcaaagctccggagctgggaagtccgagatcaaggtgctggcaggttcattgtctggtgaagctgctctctgtttccaagatggcatcgtgatggtgcatcctctggaggggagaaatgctctgtcctcacatggcagaaggcaaaaaggcaaatatgacaaattgtcttcctcaagttttttttataaggacctcttaccccatttataaaggaggagcccttatagcctcatcacctcttaagggcctcacctcttaatactgtcacattagcaacacctgaataatggaagggacatattgaaataggaaatgccacattaatttgtcttgtattccagttttgatatctaagactatttcttcaattgttttctaaattatttttaatggtagtttagctattaagtcaaagaggaaatgagagggctctgtaatccctaaaaagctttttggcttttcttcctggaagtctcagaaaatatctcattgattctgattgagtttgtgctcatctatgatatgtacttatctctgtgccaattattctggtcagcgtgatgagagataagacaatccagctcagcataaaacatatgattgataatggtggatgcatagtttcccaaagactgtttcaagtgtggtttcaatggagaaagaaaggaatggattctggatcctaaccagaaatgtccactagagtaaacatctattttccttttttattttattaagaatgtcataatgaagagctaagggctgctacattatctcaacaaaaactactaacgatacagaagttaatgacaaaaataatcttatatttgcctattaatttagtcttcaaactcattttcttatttgaccataccattcatgaaataattaggacttatatattgttttcatcttgcagatatggaaactgaggctcatag

SEQ ID NO: 13248 - DNA, 1033 bp, Homo sapiens
gtaatagaacctctctaggaggcactgttgaggagactgagtgaggcacacataggaagtgctctgtaagagttagctgtgcatcctcccggcatgaggtcattgcctctttgcaacaagcacagcaattcttcatgttgactaaagcctgagtctcttttattttcaaaatatattctcccaccacttctcaatattatctctgaaaagaatattttaaaagagtaatgcacaagaaacagttgttcactttagttctttcatcttaaaaactataggaacaataggccaagagagaattacaactcaatttaacaaaaatcttataataacacatacacaattataaactttaaaaggtttgggggctcattgactcttctgaggcatcctttgttcagtgatactgaacagtgaggaactttttctgaagtggccgcctggcttgttttgaggtgaagtaagaaggtgtgatgaagatcccagctcacaccagcagatgactgctgctgtttcagggctctctgatactgtctcagctatggagatggcactttttggaccacaccaaagattctcaaactttattgtctaaaactccatttgcattcagccaagacccatgtttccatgagatcatctctcattagatcacattatttatgaaatccacttttagaagaaatggatccagaagcatttcttggccacatcagggtcttcagtcgagtggcagagtcaagacatctggcctcactcttccctgtgaaactggctgaaaacaactaaaataccttttgaaaattagaaatgaaaatatacatcaaacttgaaaatagcccagctcctggtaagtgcagtcgggtcaaacttggttaagggaggcggctggaagcagatccgtgcctctgcagagctcaggtaacatggagcctgccggaagtaggcctgtcattcaaaggagggaagctattatccttgtggaacagccaggtttgagtgggaaggtgagctttggggacatccctgagcc

SEQ ID NO: 13249 - DNA, 1076 bp, Homo sapiens
ctgataatgcccaaaaggatgattacatgctggaaaattcttcctattttgagaacacatgttgaacatgtgatagatgcaaagatccaattgattatttctctttgtgtatatgatgttgccctgattgccctcaaactgttttacattagagaggtttgctttctataacagacataccagatcccttgaaggggtagggtatcattgatgttgtgccatcaaaagacatatgcctaatggggaagagagtgaatgagggcacacagtggtgagaacctgtcatgtgtgctagatatcattaaagtctcacaattgaatattttaaaaaaagtaaatactgcattctgctccataataatatgcatattatataaagataaaaaattgctttttaaataacttgccatcacaaaaatgggcacaacaggaagctgcatcatgtttgaggtgcagctttcagtcctttatgacatagcacttaatatccctcagttaggagacatacgcagtgggctatcaggactgcttcatcacatagtgctctaacatatttctggaataacttgaaagcatttctgaataatttaaattatctttcattttcaaattgattcagaagatctcctttttcctgtcatttggaaacatcttgaatttggaatcttgcgtcgagtttgataggggctgggtgggagaagggcagacaagaagaagaaagtgtatctttcctgccctcaactttcctggaagcttttcttggtctgtttattgctgtcttggagttcaggcagccctgaccttatgaacatagttagaacctgtagcgtcagtcatccatggtgtcatttgtggcagaaaaaaatataggatgacttgcctttacaatttattaataatggctgctagctttgtgcttactttttaaaatgttctctacctcccttgtcctcaaatcacaccttcttttcctgatcctatattcttttatctaaaattattttttctcttgaaattagaacttatttttttaataccttccttcttaacctatgtgatttcttttctttccaaac

SEQ ID NO: 13250 - DNA, 1099 bp, Homo sapiens
ccaatctcatgttgaattgtactctcataattcccatgtgttgggagagggacctggtgggagataattgaatcatgggggcggtttctcccatgctgttctcatagtagtgaataaaccttacgagacctgatggttttataaggagcaacacctttcatttggttctcattttctctcttgccaccggtatgtaagaagtgcctttcaccttctgccatgattgtgaggcttcgctagctacgtggaactgtaagtccattaaacctttttcttttgtaaattgcctagtcttgggtatgtctttattagcagtgtgaaaacaaactaatacacatatatacataatattttacatatttatgggataaatgtgatattttgttacatatatagagtgtgtaatgatcaaggcagggtatttggggtattcatcaccctgattatcatttctatgtgttaggaaaatttcaagttctgtcttctaattactttgaaatatacaatatgttgttgctaattatagccaccccactctgctgttgaacattagaactcagcatcagtgaatttttgaacagatcttcaccaaggttatggatcactgtggatgcaaccttgagaactgacctcagggaggcaaggatgggtgcaggataggaggctctcctgataggaggctgctccaataatccaagtaagacttgatgtgcttcattgccatagggttgtgttactggaaaggggtcccaatccataccccaagagagagttcttgaatctcatgcaagaaagaatttggggcaagcccacagattaaagtgaaagcaagtttattaggaaagtaaaggaataaagtaaagcaagtttattaggaaagtaaaggaataaagaatggctactccataggcagagcagtggcttaggctgctcaactgagtatacttatagttatttcttgattatacgctaaacaaggggtggattattcacgaggtttctggggaagggttgggtaattccggaactgagggtttcttccctttttagaccatatagggtaaattcctgatgttggtatggcatttataagctgtca

SEQ ID NO: 13251 - DNA, 1186 bp, Homo sapiens
caagagatactgatgctgctggtccggaaaccactgcccccaccccaggaaccactgcagtaaagactttgggaactagattgggatataagaatgacaagcctcatgtttggccctctttgtggtgggccagaatttatatggtcaaggaagtgcatgtaagtgcagagtgtgaggctcatcttcccagatgtagttgtcgtcttttccagaagatgagaaatcagcctgcttagttacccattcgggagttggaaacgatatgcccttggctgagggagcaccatactccagtaaagctgggcccttaataaagaaaacaaagattattaaacatttttcaaaagtatttggcggaggcggcttgtattcggttttagaaaacttgggatctgaagaacttactttgtgtactgaaaagtgagcacatgaacccacaggccaacagaactttaaagggatttatccgtgagacaagggtaaagatgcctaaccttgcaatgatacttttttccaacatttaattcatgctgttcatcgagttgcctgccacagcactgtgttatatcttgaaggatatatttaaatgtttgatttaggtatctttgcctctagttttcagtttgtttggagaagctggctatctcagataaacaaatctggaacttggaagagatactgtgagatatgcagacttgggacgttggttttcataggctggtgaagacagaaccatttcccatttcagcaaggcaagcatttcttttagtttgggatggtcttaaatgtttctgtaaaatggcctgggaatactagcctgtttgcagttttaatttctataagaggccattactttactttttggaaagtagtataagtttccatccctctttttctgccctaaaagtaaatgtttgagtcatatttttaatgtttttcttaagtccatttttcttgttaatgctactaagttgggatgtacccaggtgtgagaggtcacctgattcattgcgtttagaagactgcatttattgctgttgggggctgaacaattaattgggttcatctccaaggaaatgttaattgggaaaccctaacattgtgtattgaaaaaaaaaaaaagaagaaaaatcatttcaggcctgttaaaacaaaactcatttgggttcacttaggctgattaaaa

SEQ ID NO: 13252 - DNA, 1034 bp, Homo sapiens
tcatcctttttgtaatctgcaggaggtcttctccattttgccacacctgtggatcctctatttctgcttctccactacctcataaaggctgataaggaggtgagtttccagctcggagcatccacagtgaggaaacagaatcaactatttttgtttgatctcctctctctccttttaatgatccaaaggtggattctaccttcagatctattatagtgactagagaaaacatgaatcatatgggccagtgcaggacagagcactactgcacaggccagagaagcagcaccttactcttgatccagtctgaccctggcttgcttgtgacctctgacttgcctgactcactgtgctgtgcaccttactgcttgacaaagcctgacagctaacactcctttatcattaagtattccttacacttgaaatacaaaacaggtatttaaaaattgaccacatgtcttaaagagtctcttctttagtgagagactgtggaataggtaaactggagcgggtccaatagaagctcattaatggtgatgtgctagttgagacttaaggaatcccagatggataaaatttacctttggaatagaaataaagacacagcttactaatagtaataattttagccagaagttctgtaatattttggtctcaggatacatttacaattaaaattattaagggttccaaagagcttatgtttctgtgggttctagcaatactcttagaaattaaaactgagagatttaaaaattatttatttaaaagttaaaaataataaggccattacatgttaacataaataacacatttttattgaaacaaacaaccaaatttaatgaggcgtgtggcattgttttacatttttgcaaatctctttagtgtttggcttaactagaagacaactggattcttatatctgattctgcattcagtctgtttccatatgttattttggtaggattatatgaaaaatatgcggccccatacatctttgtagttagaaaaggaagaaataatgttacagcctt

SEQ ID NO: 13253 - DNA, 1096 bp, Homo sapiens
aattcttcccttaataagctgcagcctgtgaatctcaaaataatggaagttttaaaaacagaaagaaaaagatttttatttttatttttttatttttatttttttaagacaaggtcttgctctgttgcccaggatggaatgcagtggcacaatcacggctcactgcagcctcaatctctggggctcaagcaatcttcctacctcagcctcctgagtagctaagaccacaggcacaagccaccacacctggctaattttttcattttttttggagagatgagggggtctctctatgttacccaagctggtcttgaactcctgggctcaagggaacctcccgcctcagcctcctaaagtgccgagattataggtgtgagtcaccatgcccattctcaaaaagatttttaaatggggggaaaaatacgtaagattctcaaatgcctcatccttaagaagatattggaaaatcaaatatctaaaaattaaatatataaaacctaagcgggctttattgcaagaattcataattggttgagcatttaccataatttaccatatttatgcattacaaaattgtatgattatctcaaaagacacagaaaaggtatttgataaaattcagtcatgatatatattatcagcaaatgaagaataaaagggaacttccaagggcatctatggcaaacttaaacagctaacatcatcttcattgtaaaagactgaacacaatcttcccccaagactggatacaagagaaggatgcctgctcttaccacttctattcaccatgtggtggatgtcctagcatgtgcaataagacaagaaaaagacatacagattggaaagtcagtagtacaactgtctttattcatagacaatattgtcatgtatgaaaaaatccaaaagaatctacaaaagaagttactagaattgataagcaaagtttcaggatacaagttcaatatacaaatattagttgtgtttctatatactgacattgaacaattggataatggaataaaaacataccatttatactaccattaaaaataacattctagtgctaaatgtaacacaatatgttcaagaccaatat

SEQ ID NO: 13254 - DNA, 1082 bp, Homo sapiens
aatatatagataaatggaatagaatagagaatctagaaataaacccacacttatatggtcaattgattttttttttccaaaagtgtgaagataattcagtgggaaaaaggatagtctttacaacaaatgttgatggaagaatttggtatacatatgaaaaataacgttgattcttacctcatacagaaaaattaattcaaaatggatcactatgttaaattcaaaaatgaaaattattgagcttctagaagaaagcataggataaaatccttgttgtcttgggaggcaaagatttcttaggacacaaaacccactaactgtaaaaaaattataaattgtattttatcaaaagtattctcttttgtttttgaaaaatgccattaagaaaaaaggagattgtgagttgtgggacagttggaacttacctacctggctgtccacggcttaaaatgatatagccacttgacaatttcttacaactcaggaattctactactccctggtacaaagtaaggaactactgctagctgcaacaaaatggatgaatctcacagaaataatgttgagcaaaagaaattggacacaaaaagtatatactatatcatttcatttctatggtgttccagaataaagcaagaattgccctataatgatggatgagtggtgacctgtgatctgggtagccatgggagaattgactacataagggttccagggaactttgggggatgatgcttacatgactgcatacatttttccaaactcctcgatttgtacatttaaaatgggtgtgtccattgtgtgaacatgaacattgcgtgaacacctaaataaaattcatttttaaaacaatatttactgatccagcactagaagctaagcctcctgatttctaacacagtatttatttttacttgcccctttcccccaaaataatattggctccttttctctctatacttcctacctcccatgggatggagagatggaatgtgggaggcaaggccagtgtgagcactggctctgaggtttaggcctcgatattcaggagagtggtgtaggaggaagatgaaccactgggt

SEQ ID NO: 13255 - DNA, 1033 bp, Homo sapiens
cctaaattttgctatgtattcatagagtgatagggtgggaaaggagggaggaagctctacaggtaattttttgtcaaccctgctgcccagaagcagaaattatgatgataaaaattaataatttcaccattcagcattcaccctggcaaatggcattttggtaacagtccttacttagttttatacatgcattataaatacatatgtggcctttaacattggcattataatactcagttctgggctttttatttaacattaaattgtgaaaatgttcacatatcattaaacattctttgaaaaaatattcatgtttttatgatattcagtcatgggtgtttgtttcaccatatggaatgtaatttaatcatttccctatatttggacatataggttacttctgatttttttattttttgtttttattgaagtgatagacattcttatttacagtctgtatctccaatcatttcattagacacaattttgaactaagactaagagcttggagaacatgaattctttcataattgaaatatatatagctaaagtgcttttcaaaaatggagaaagttgtgcttccaaacattattgccaatgagtatttatcttgcatttttgacgacattgagtattgcttttattcttgaacattgttgcctgtcaaattaggctacatttctttaactagaaaggttctttttccaaatgcttatggcccatttgcatttttgcaaattgttggttcctgtcgcttgcctgtttttatgttgagatagtaatgtttctctgttgctttgtatgagctcattctaaattaaggctattaacacttttcatgaaatataggatacaaacttgttttaactttttcatttgattttttaacagtgttaaatttttctgagtgttaagtacagaaattgtttccctttatgatttttccattgtttttatgcttaggaaggccttgcccatctcaagataagttaactttcacttagattttaaaaatactaactgccctttgagt

SEQ ID NO: 13256 - DNA, 1023 bp, Homo sapiens
taaggcagctatcctgctggtctgggatgctttgcaacacaagtcatcttttgaatatcatagggttgtccttggtttcccatggagcaaatgaataaaatcagatggtaaattggtgtgaattattcatcatgtggtaatacaaggctgtaattcctacctctgacaattgcggcctgtgtcagttccattgtttgtgttattgtactttatgcaccctccagaattatctaccccctccccagtgtaaaccattggttggaacattctgcttcttagaaggcagcagttttgtcttctgcctcttttaacatattctgtctcttaggtctgaattctgaatagaaatcagaactttttcactcccttatgaagcatgttagtgggggatgcttaccttccttaatgaaacttgagacatgcagtcttctttgatttccatatatgattaataaatgttacattcataacaatttttctctcttattttcattaacagaaaaatagcaaaatgactgcagctcagaaggctttggctaaagttgacaagagtggaatgaaaagtattgataccttttttggggtaaaaaataaaaaaaaaattggaaaggtttgaaactttgaaaataaaatctagcaaaaatatttgctttttacatgtttcagtttgtccttcctgactgttaatgactacctttggttgggggaaggaagaggccaatttcatgttctcttaaacatttctttgcatttggtttttgtgttcctgaacaaaatatgggaaagtgtctaacttcatggctatggccttttggagtctcatctgacataatgaaaagtaatcacttgaagagaattaacatatagcatcatgattttctcaataaactgatgtgtgacaatgttagagtgtatgactgctttttaatgcaactttgcattcagtaggtttagtaataatattttcaatatactgagagaaactggattacaaaactgtgaggtaaattgttactttaaaaa

SEQ ID NO: 13257 - DNA, 1049 bp, Homo sapiens
aaattctcaacaaacttgtcataaaatatattttttgaatattcagcatttgaggtatggtttagtgggtttatacaatttaaatggcttatataattatttgaaatgaaaagaaaacctagtcagccagaaccaatttggcaatttttccatggtatgaaggcaaatcaattaaggccaaaacgttgaatgtgggagagatagtaagtgacttgtatgagggattactgcataataacgtaacgcacaccttactggattctccatatatatttacattaccagagaacagtggccctagggatgtttaagcactgcttataatggaaaaagtcagcttgagaagtaaacgtatatcagactacaggtaattcctcatcttgaagccatgcaacacctgcaaatctggatttatacaaaagttgctaatgtgtttcataaagatttagcatgagtaacagactcttggtgcatttaaaatatgtgagttccagaaagtagatttgcatacaccttttcaacagcacatttcactggaatggatgaggggcttctgaagaccactccactacctgaatttatttggatcactgaggaagagcatttgttgggattacagaattataggccattagacatcatgggtaggtagtcttaagatccttcaactttcaaaaaccacagtctaaggactatattcaaatgacaagagccgcactgtatactgctttctgcagtgaccatgctgggtcacgcatcctatgtttctcatttttaaatgatttggaacattttagccagcattttgatcacacagattaataatgctgttctccccaaaacgggaaactttacctgaaacgctctcctgaacaaacaccagtgcactgccagcctcacatgattgcatgggagctttaattaacgctggagcccagcaaccttggcttttcctgcctgttatctgctactgtcacaccgtgaatggtatttgaatctcacctccctctcacctcagtaagagtatgtttgtttacagccccaacctc

SEQ ID NO: 13258 - DNA, 1039 bp, Homo sapiens
tacagcagcaaatggaaattaatatatttgtttatttaatttttattactttaaaagaaatacatggttattggccaggaattcaaatagaatcaaatggtagaaagtaaaatcccctatttttcctcatgaactattcctgcatcctataggttaccactcttaacattttcatatgcattcatttcttcagaaatagtcacgtttggctgggtgtggtggctcacgcctgtaatcccaacactttgggaggccaaggcaggcagatcacctgagatcaggaatttgagaccagcctgaccaatatggtgaaaccctgtctctactaaaaatacaaaaattagctgggtgtggtggcgcatgcctgtaatccagctacttgggtggctgaggcaggacaatcgcttgcacctgggacatggaggttgcagtgagacgagctcgcaccactgcattccagcctgggtgacagagcgagactgtcttaaaaaaagaaaaagaaaaagaaacaatcacattttattttctcatttttggacaagtaagattatatcagatatgcatattttgttcttcaacttgcttatttaattaaatatatttttgaacatattttcaatcagaataaattgatctacctcattcagtaccacaatgtattttaccatttctctattagggggcatttaggttatttccagggcattttttcttttcgcctttttctgttatcaacaatgcttaaatgaactctcttctacaaatatcattggctgtcatctacagatgtaattgcaagcagtggaattgctacttgaatgttgttgtgtgtgtgtgggtatgtgtgtgcatgtgctgaagtgagagtagggggaagtgtatcttcctattcaactctttgcctatatgttatttttaacttaaaaaaattgtgaaatatacagaaaagcacatatgacataaatgtatgcttcaatgcactattgaaaagtgaacactcatataatcaccattcacgtcaagaaattgaatattgtta

SEQ ID NO: 13259 - DNA, 1023 bp, Homo sapiens
agatggtcaagtgggcagctaaatgataaggttgttcctggctagtcactagccccttgaggctgcaatcgagttttgcttcatatgctcatacttacatcttcataaattgtgacatatttaaaattcattttaacaggaatggcaaaataagagtaaagacagtgttatagaaataatcttgtcatttgaacacaagaataatttttccatgtatcctgtacttatgtgtgtatgtactttacacaattgtaatcacagtgtattttttctttagattttttttcagctaacaattttccatgagattattagattctaattctgcacacatgttatgggattatgagacccggcatcttaatattgtatagaaattgtgccaacatagtttactggtcaagggcaataaaactgactttcttagggcagtgcattaaatatcatttgattgctgttttcaggagtgtactcttgggaatctggttttattttgtagctaagtagaaagaagatagtctgttatacaggtggaagtttttgggggaaattctactagtttttattttctgaatatatcatgatagaaaattagaaaaaaagtaaatatgcagtttagaaggtctttttgttgttttattcagggcccttttataaagaatgaaaaatatgttactaagtgatatgttcacttagtggctgtcagtagaacttgaaattcttttttagtttaaaaataatctaagttggttgtttgaaaatgggactgtgtgtttgaatgatgtctttgaaccttctccagtgtttcctatgtgaccttgggtaaaacatctaatcatacccgtgaaaagtaggaataaaaaatatttgatgctgattgtgattatgataataggtagttcatgatctacatggcttctgtgaatatgaagggagacatataaaaactgtgctgggctctttagaacaactattaaatatttcagtattgggtaaattgtcaaaagaccccctatttagtgg

SEQ ID NO: 13260 - DNA, 1026 bp, Homo sapiens
ttggtttaatgagctgctgccaccatcttgtaattcttaatcaagttttttaaagggactctgtattttcattttgcactagtccctccaattatatgtttggacctgacagacatatgttgctgctaggactggtgagaaaggaaatgaggccatcccactaactgtagtatttatagatggcagatcctggtggttgtgaaaagtgggggctttgtgcacttgtaagagcatttgcagtgcagtacatggtaacactcatccatgaaataatgaccagtttgaaatgctttctagtataaacgctacagtgatgtcagctgaaacatgaatgttagaaggtatctgttcattcttcgtaacccctaacgtgtaaacctgggatgttccctcacctagcttttaactgaaaggtggttatattttgaatccctaaatcaagaagtcccagagcagctttattatcaaacttggaatccagcattcatcactgtgtttcactcttctatgttggaatattaacagcactggagtcccataaattatgtatttgttgctgaatgttgctgccagctatgagtggcaaagcagttccttatgtagcttattttggttttacaagatcattgatgtgtatcaagatggctcaacaaatgaaatgtagttcaaatcatagagttacgagtctgtgcaactagattgatttttcttgcccttgagtgtcacagtggtggcactctatactttaaaaagtgtgaaataacaaccaggagagatagggaaaacccaattggcttttaaaaaaatgaatacatgtcaaagattttatattaggcattaattaataattaattaactggcaaagtaagtggttactgcagtccaaaggaaaatccaaagagtagacacatacataggcaatggagaatgtgaaaatgaatttgttagcagacgcacagctggcttctcccatgggcagggtggagtgtgggattaggtgtgtcttaactggacaagatttgtttg

SEQ ID NO: 13261 - DNA, 1046 bp, Homo sapiens
tgttacccaggctggtcataaactactgtgttcaaacaatcctctcacctcagcctcccaaagtgctgggagagctactcaggaggctgatgcaggaggattgcttgagcccaggagtttacagttgtaatgagctatgatcatgccactgcactccagcctaggcatcagagcaagacactcatctgaaaaaaaaaaaaaaaaaaaagtggtgacaatgaatttaaactcctctttcagcgagcctaactccgaaaggaatggtattatttagagaacatgggggcaatggtttttggttattgtttttaatgggagagagttgggcatgtttatatgctgaggaaaggaggtagtagatattcaaaacaggagacaggtggaataaccaataggagccaggtcactgaaaagaggctgggttttagagcacctgcagagcatgggctttcagcaggaagagggacagtttttcctaagaaaaagaagatagggagagagaaggagagaaggactcatggatatagagaagttatggagctagaaaactgattctgcagaacgcgtactatctctgtgaaggaggaggcacagtcacacgatgagtgtgtgtggatgggagtgagctgagggatgagggtttggaatcactgatacactgggaaggaagctgaccaggcttaggattgccagtcatcatggaggaccccactaaaactggagaccataaatttgggtggaccagtaagtgcaactcccacttactgttaccattcctgagatatgtgctttacacagatctttcctttgtctttgttcctctactaaactatgctgtgtctaggtataaatttattttcgttgttgctgcttgataattgttttatttcccagatatgatgattactggcttcaaataattatagaaagttcacagctggaattgatttgcatattgttttctcatattcttttcttctggaactccttttcatatacatttgacttcatgcctcttaacttctctgtcacattttccatcatgt

SEQ ID NO: 13262 - DNA, 1027 bp, Homo sapiens
tttcgtttttggtttttttgtttttgtttttgttttttttttttgagatggagtctcactctctcgcccaggctagagtgcagtggcatgatctcggctcactgcaagctccgcttcctgggttcacgccattctcctgcctcagcctcccgagtaactgggactacaggcgcctgccaccacgcccggctcatttttttgtgtttttagtagagacggggtttcaccgtgttagccaggatggtcttgatctcctgacctcgtgatctgcccgtctaggcctcccaaagtgctgggattacaggcgtgagccatcgtgcccagccaagacagccatttttcaatcttaattgtaagtggtctgagaagcatggtttaagagccactcttactttaaaatacagtatgaaaatttaatcgcgacttggatacctagttaatgtcagagaaaataaaacttacatggatctgctttcttcattaaaaaaattaagcctattgaagagatgcgacacacgattgtagatattctaacaatgaagagtcaagaaaaagctaatttaggtaagttttagttattttatttccttcatgtgaactgtagtttttttttgttgttgttttttaacttttattttaagatcaggagtacgtgtgcaggatgtgcaggtttgttacaaaggtaaatgtgtgtcatgggggtttgttgtacagattattttatcacccaggtattaagcctagtatccattatttttcctgatcctctccctcctccaacccatgtgccccagtgtgtgttgttctttagctgtccatgtgttctcatcacttaactcccacatgcagtatttagttttctgttcctgtgtttgcgaaggataatggcctccagctccatccatgttcctgcaaaggacatgatctcattcctttttatagctgcatagtattccatggtgtatatgtacattttctttatccagtctatcattgatgggcatctggattgattctatgtctttgc

SEQ ID NO: 13263 - DNA, 2057 bp, Homo sapiens
gatataccatcccctctcctctcaacctaggtttagtgcacctgttttgtgctccctgtttttttccctatgcaatatttgatgcatttgattgtactatgtagttgtttgtcctgtcttttgcatatgtaaactcagtagataaggacagtgtctgatgttcctgaccattgagtctcctgtgctaatgcaatgcctgacacatatttggcacttaaatatttgttgaattaatctatattcttttctctccttcagcttccacttaaaactcagtcactatcatgcaactaaaacttctcttagtaaaaatttttaataattttcctaataattaaattcagaggtttttttttccagctcaatggattcaccaggatgtctcacaagtatttccagcctaacatgttttattttgaactctttgtctgccctcactgctttcccatgcccagtatccctttcccatacccaacatccctttctcccaaaaaagaaaagaaaaaactcttctctggcatttatgactcttaagaaatgttggataagacgctcctaatacatttgcacactcattcctacacagtcatgtattcatttgttaataagttctgacttgggtgggtgtggtggctcacgcctataatcccaacaccagaagtccaaggtggaagaatcgcttgaggtctagaattcgagaccatccttggcaacatagtgagaccccatctctacaaaaagtaaaaattagctgggtatggtggtacacacctttaggcccagctacttgggaggctttggcaggaggatcacttgaacctgggaagttgaggctgcagtgagctaagattatgccactgcactccatcctaggtgacagaacggcagacaccctgtctctaaaaaaaaaaaaaaaatgttctcagaaatatttctcagattggacccttcctttcctatctgatctcttcctaacttacttaggctattacaacaaccttgtcttcttgccatcacagattgttacttttcattctctgccattctagacagtcctttacattgaccaaatttaattatgtctgtctctggtgaattttttttaccaaacttctttcatataaagctcattacaatctagctctctggtgaattttttttaccaaacttctttcatataaagctcattacaatctagctcttgtttacctatctaagctcaatacctcctgctcccactcctaaccttgttccttaccctatattctaaacacactggctctttaatgttatgttaatttaatagatcattttcttttatgtgccatatgaaggttgtcttccttggtcttgatcaagtactcatttttaagacccagcctaaatctcgcttgtgaagcattccctaaccatctccctataccacaggcaaagttagttgtttctttttgtgggttttaataatcctttgttcttatttcatatatagcatttatttcattttataatagtatttgttatatagttggcagcagtatttgctgaggaaaaggaatggttcagagatggcaatcgtgttcttttattttgaaaatgtggccaactaggaacaactttaatgtcttctgattttgttcttaaaattcagccaaaagcttaatctataaatgtattttctataggagaaaatatggagaagtcttgtgcaagcaaggaagaagtcaaagaagtcagtattgaagatacaggtgttgatgtagatccagaaaaactggaaatggagagtaaacttcatagaaatttgctatttcaagattgtgaaaaagagcaagacaacaaaacaaaagatccaacccatgatgttaaaacccccaatacagaaacgaggacaagttgcttaattaaatataatgtgtctactacgccatacttgcaaaggtaaacttttaaaatgtaccatgatttgttttcatgcttggagataataaataacggcatttaaaaatctttgagatagcttcagattacagctaccatttattaatatagaaatttca

SEQ ID NO: 13264 - DNA, 1049 bp, Homo sapiens
cggcttactgcaacctccacctcctgggttcaagcgattctcctgcctcagcctcccaagtagctgggattactggtgcctgccactgtgcccagctaattttgtacttttagtagagaggggggtttctccatgttggcctggctggtcttgaactcctgacctcaggtcatccacccgccttggcctcccaaaatgctgggattacaggtgtgagccaccgatcctggctgtagctgagatttctaatgcacttgacctttttattatttcagtttcaataacaaaatatcagatatgaaaattgccagatgtgctacagctagaattaatataaggccagagcatcagattcagtttgaccaaggctatgacaattatcctggcctggagaagactgctgatcttagaaacaggtatcaggctttgtagtctgctgggttttgtttgtatagtttggttttaccttgactgtagatttaccttattgtgggtgtgtatgattgctgttggatatgtgagcattatgaatgcatttacatctgtgttcttactctctgtataccacttcctagagagggaaccatgtgctggagttagccagtcctgcatttttctataccttaaatcaaaataggccatgcttcatatctacccatgatgaatagggttcctttgatttagaataaatagagctgactgaattctgaacaagtgagtattttgtaagaaacattatttttcattttaaatatcaatgcctaatactgtgtattcatttaccctttatatctctatacatgcttatcttttgttacaccttagagaaatgacccaccatcaacgaaaagaaagaaaggcgtaggctgggcatggtggctcacgcctgtaatcccagcaatttagagggccgaggcaggcggatcacgaggtcgggagttcaagaccaacctggctaacatggtgaaaccccatctctactaaaaatacaaaaattagccggacgtggtggtgagctcctgcaatcccagctactcaggaggctgagg

SEQ ID NO: 13265 - DNA, 1027 bp, Homo sapiens
ctgtatttttctctcgttttgtgtgttctcttctgtttttgttgaccctgtctcaaaaaaaaaaaaaaaaaaaaaatcaaaactatcccttgggaatacataatgtttgtatatggaaaccctcatgcctttcttgctacctgtaggataaagtccaaaatccttagcttaacattcaaatttctccatcaaactgggttcctaggccaactatttcagagttaatgttgttcttgtttttttttttttttttttgtttttttttttttgagatagtgtctcgctctgttacccagtctagagtgcaatggcacaatcttggctcactgcaactgtcacctcccagggttcaagcagtcctctcacttggctcactgcaactgtcacctcccagggttcaagcaatcctctcacttcagcctcctgagttgctgggaccacaggcctgcaccatgcctggctaatagatgtgtgtatttttgtagaaaggggttttcaccatgttttcctgtctggtctccaactcctgggctcaagggattcacccctccttggcctcccaaagtggtgggattacaggcgtgagccattgcacccagctgatgtttttcttaaaatgcaaattctttggttacaccccatacctactgaatttgtatctcatgggaaagctgtacagtttgtatttttaactagtattgtttatttcttgctactcagagtggtcccaaattagcatctacatcactggaaacattttagaaaaatagaactccaggccctgctccagacctaatgaatcagaataatatagacattcaagttagaaaagtactaggtaatcttaatgtacacttggaagtttaagaataactgatctggccccaacctgtcattttaagtttgtccctcaatgttgctctacatttattcattcaaccaacatgtattgggtaaggtatcaaggatgtcttcacatagtcatggaactcttagtacaaagttgacagaatataatgtctgccct

SEQ ID NO: 13266 - DNA, 1039 bp, Homo sapiens
aactttttttttttttttgcaataagtctcgctcttgtcctccaggcttgagtgcaatggctcaatctcggctcactgcaacctctgcttcccggattcaaacgattctcctgcctctgcctcccaagtagctgggattaaggtgcctgccaccatgcccggctaatttttgtattttttagtagagatgaggtttcaccaagttggccaggctggtctcgaactcctgacctcaggtgatctgcccgcctcggcctcccaaagcgctgggattacaggcgtgagccactgtgcccggctgaaaacatttattaataacttcttaagcatttgtctgtccttcctcccaagatttcaataaactgatgccaagaatttatggagaaaattataaaaactttactaaaagacatacgaataactgaatgaaacaagcaattatgttcatggactggaagaggcaatacaagggaaatatatcatttctcctcaaacgaatctgcaaaatcaaagtgaacaatttgttgttgttgttgagactcacactgttacgtaggctggagtgcagtaacacgataagagtctcaacctcctgggctcaagcgatcctcctgcctcagcctcccaagtagctgaggcacgcgccaccatgcttggctaatgttttttatttatttattttttgtagagacgaggtctcaccatcttgcccaggctggtcttgaactcctgggctcaagtgatttttctgccttggcttcccaaagtgttgggattacaggcgtgagccactgcacccagcctgcacaaatcttgtgcataacttgataaaattttatgtttgaatacactgctgtgattaccagccagatcaagatatgtaacatttcccgcatccgagatttcttcatgctcctgttccccaccctccctgacaaccaggaggttcccttatgatacctctcatctaagtggaatcaatcatgatgtactccgtctggcttttttttttttttaccacaacttatgtatataagct

SEQ ID NO: 13267 - DNA, 1034 bp, Homo sapiens
taaaccccaagaccatggagaaaatgtctctccaggccatgtcagagatcttcacagtagcccctctcatcacaggcctggaggtccaggaggaaaaagtggcttcgtgggctgggcccagggtccctgtgctgtgtgcagcctagggacttggtgccctgtgtcccagccactccagccttggctgaaaggggccaacatatagcttgggctgtggcttcagagggtggaagccacaagccttggcagcttccatgtggtgttgagcctgtgggggcacaaagtcaagaattcaggtttgagaatctctacctagatttcagaggatgtatggaaatgcctggatgcccaggcaaaagtttgctgctgggatagagccctcatggagaacctctgttagtgtagtgcagaagggaaatgtggggttggagcccccacacagagtccctactggggcactgcctagtagagctgtgagaagaaggccactgtcctccagacttcagaatggtagagccactgacagcttgcactgtgcacctggaaaagctgcagacattcaacaccagcctgtgaaagcagctgggaggaaggctgtatcctgtaaagccacaagggcagagctgtccaagaccatggaaacccacctcttgcatcagtgtgacctggatgtgagacctggagtcaaaagagatgattttggagctttaaaatttgactgtcccactagatttcagacttgcctgggccctgtaacccctttgttttggccaacctcacccatttggaacagctgtatttacccaatacctgtaccctcattgtctctaggaagtaactagcttgcttttgattgtacaggctcataggtggaagggacttgccttgtctcagatgagactttggactgtggactttgggttaatactgaaatgagttaagactttggtggactgttcggaaggcatgattggttttgaaatgtgagggcatgagatttggaggggccagggttggaatgatgtggtttggct

SEQ ID NO: 13268 - DNA, 1053 bp, Homo sapiens
tcttccgggaactaccatgtccagagatttattgagttttaaataagagccatgaaaagatcagatttgccaagtttacaaagatagttctggcctttatttcaaggataggtgaagagatcaaggctcaagcaaagacaatttacggaaaaacattctttagagacaaacttcatcaatatatctttttcttaaggaaaagtgaagaaagggagaactctggttggccgtcagtgtccttgacttgtctccttcccctatttaaaaatagaatcagttaataatgtttattagtgttaatgttggacattttaaaataccctttgcttaagaattaataactttgttggatggctcaaaaattgtgttttggaagttgataaggtattgattttagatttaacatggtacaatatcaaatcatggcaaaaatgatccactttatgatttcactgactcttttcaataattaaggtttctctaagtgtaaagtgtaaagatttttagaggaagatgtggaagtactcataatatagttcttagtctaaatttctaatgagattttttttttaactaaggaagttttaagaacagatttacaaaacagtgattattgaaagatggtgatacttgctcttacctttcccatgatcagttgagctgatatggtcaactactaattccattcttagtgctatttccaaagcagtatgtgaatgaagctgtatttaaaacattcatttaccaagtagatatttattaagcaagacttttttctccaaaatctgagtttccttttttaagaaaatattttacgaatgccttttcttgttgttgtaatgtttagcacatgtatgactgtgttcatgtgcacatttgtttgcattagtcttacttatagctactgtttctttgggctgtctgctacagtctggcttgtgcttcttccacactgctgaaatgcttttgctaaagtaccagtgaccttccagttgtgagatatctttcaaatttttccttactggctctgttactttggacggtttatgtcta

SEQ ID NO: 13269 - DNA, 1056 bp, Homo sapiens
aatagctacatgtggctggaggattgtattggacagcataggctagatatttgtcaatgcctaggctaaaaatatgggataccaaaataaacagaattatgagctataataaccataacatgcctgtgatttaatttaaatgtccttattttaatggcattaacaaaagccaaataaaaagttcatcctgaattagcagcttatctatacttgttaacagtttcggacttgcttcaacttggaattttttttcgtaagtgaaaattagatgaaattttagattatcttttccaattatgttctctaggcctaaatttataataacaaaattactccttttttaggcaaaatactgataaatatggagtagaaatttttcaacttaggaacatgcttgcttaggaaatgtagtgtaaatatttgtctatcatttcacatttctctttgctgaaaatataaattaatatgcacagaaagattttacttaaaagcctatttttaaaacagcctttttcccctaaggtatgatactacttaaagatgtagaagttgccactttagttaaatttacttttcagacacgtaagcagattttactgttatttctcaactttgctctaagtatatttgttttatttttatctttgattgaaatttggccaacacatataatacagcattagatttaatatcgaagttaaagtttttattttaaaaaggaaaatgtgaaaatatgtcaattacaactcatacttcttcaactttttagttttggtggtattgtatgcttcatgtataccaggagagggagcactttaaacttgatgtctctgaacagaaaacactcttttgttgttgtgttgagacggagtctcgctctgtcatccaggctgcagtgcaatggcttgatctcggctcactgcaacttccatttcccggattcaagtgattcttctgcctcagcctcccaagtagctgggattacaggtgcatgccaccatacccagctaatttttgtatttttagtagagacggggattcaccatgttggcctgg

SEQ ID NO: 13270 - DNA, 1066 bp, Homo sapiens
tgagcaggcatttatcaggtgttccagccctttaatccagtgctggaggtacaaaggtaaatgaggtttagatttcagcctcttagtagctcatatgctaattaagtaggcacgtaggcatacaaatattgtaagacatatataaactgagaggtctaagagtctcaaaaattacttctgcctggggtaaccaggagtggggttaaaatatgagtaggtattttaaggtgcagggagggaatagcacatgcagagacacagtgttctgacaacagaaagagtgagaagttacatttggtggagcttaggtgatttagaacagtgggtatgcgagaggaaatgtggtaggttgaggccttgtatgaccttttcagtgatttcccttcttttttcttctttcatctggtgtctgcctctggtaaatgaggccccctcctcagaagatatgtttgtcgaaaatgttgatttctatatacaaagggagatttgttgacattgtgattatattctcttctttttgaagagtaggattcgtacttttgtgtagaaacagcttttcaaattcctatgacgaattcagtcacaccccttgcaagggagctcacagatgactgagaagaaagacttgccatgtaatggctcattctctgattttatggctgtatatttctctgaggaataaaaacacaaggtcagccctgagtgtcactgcccaatctgcccagtgctgtctactgtcatcccttgttgaatttattgcagcttgaaaactgaaaaaattaatcgtcgtatgctcttcactcatcattgaagcagcatgcctacttttggtgccgtaaaaatggcagctgacaaaatagttcttacaggtaaacaatttggaagacattatacaaaataagtttatagttatcttagaaggaaggtgaaacaactctctagatgggataaaccaggtgctaatacggatgtgttaccttacatgggctttgcatttctctgcggtgcttgtttctacttttctgtcctacctcctgccctgccccttgctagtttttattattat

SEQ ID NO: 13271 - DNA, 1058 bp, Homo sapiens
aaaacaaaaaaacaaaaaatccaattaaaaattgataaaagacctgaatagacatttctcaaaagaagacatacacatggccaacaggcatatgaaaaaatgctcagcatcactaaaactacaatgagagatcatctcacacagttagaatgcctattatcaaaaagacagaagataactgctatagtttggatatttgaccctctaaaccctatattggaatttgatccccagtgttggaggtggggcctagtgggaagtatttaggtcatggaggggcagagccctcattaatggcttggtgccatccttgcagtgagtgagttctttattacttcctgtgggcgctggttgttaaaaagagcctggcacctccctcttttctcttttgctgctcttttcatgtgatctgcatatacccctttgccttctgccatgagtggaagcaacctgaaaccctcaccagaattggatgctgatgccatgctgcttgtacagtctgcagaactatgagccaaataaacctttctttataaattacccagcctcaggtattcctttatagcaacacaaatagactaagacaatagcaaatgctgttgaggatgcagagaaaggggaatgctcaaacaccactgatcggaatgtaaattagtgcaaccaccatggaaaacggtatggcggttcctaaggaaactaaaaatagaaataccatatgatacagcagtctgactgctggatatatattcaaaagaaaggaagtcagcatattgaggaagcatctgcactcccatttttattgtagcactattcacaatacccacgatatggaatcaacctaagtgtgcatcattggttgaatggataaagaaaacatatgtatgtatgtatatgtgtgtgtatacacatacacacacacacatacacacacacacacatacactggaatattattccgccataaaaaagaatgaaatcttgtcatttgcaacaacagggatagaactggagagcattgtattaagtgaaataaaccaggcacagaaagacaaatattg

SEQ ID NO: 13272 - DNA, 1025 bp, Homo sapiens
ttttatcatctgtaaatgcaaaatatatattatttccgtttgacagataaggaaataggtttgtatattaatatttgtattaaagcaaaaataacataaggttatttctaaatggtttttgacccacaagtctagtgcctcgtatataaatacctgtttatcaacaagagagccatatctgactttatctaagtagctaaattactcagatacatgtattttcatttaatggatcaatttgtccattagtagtttttttaaccctggcagaaaaatatttttatagtaatcctaacctgagtttcatgatgaaatactgaaaataactcatggttattaatgatttaatgccagtagtataatggtagctttgttgaggtttaagagggaggttaatactggggtctggaatctactcagttaatcccccagctctaccctgtgctagttgtgtgaccttgtcaagcctctttagcttccttatctgtgaaatagggatgttataactgtactctgaggtaagctcatttggttttttaattatgtgagaaattttactaaactagaaatttttttcttttttgtatttgtaaggactagtttgggctttgcatgcattttacatgggactaaacagggcaatctttgcagttgtattgttggtgtgtgtggcactttttcttagaattctcatgatttgttcatttataacagcactagtcttatgctttatgctaactttttaaaaattggcttttctcagttttcttttaaaaggggctttgaaacaccaaaaaattagttgtttgaacactgggcatcataaatatgtttattttgagcttagtcttcaatttaatatgtgttgtatctataaagattttaatgagaacaggaaaacaattgtatatatttgaataattatacaaattataattgaaagaaaaataccatgccagattaaaactaatgttaattcttgtgatcattttttctgggatctggtgtttttatttagcataatg

SEQ ID NO: 13273 - DNA, 1027 bp, Homo sapiens
cttacgtggcttcttctctccttccttttgctgttccagggtggccatagctgatgagcacatttcttattccttactgtagctcttctattcagaggtgtttggtcctgaagtgatcattttctttctacagtcagtgacttttcctatttctcccttaagagtcctcattgctttatccttgattttaggtctgtataaacttagctggacaataaatttatcaggtgtacagctcatttagtgattctgttctgaactacagcaatactttcatattcttcctacttatttgtgaatatttatcctttattatgtcatttattaacctattttctttctctgcagtcaacttagaaatcttttataaaatatttgaaatattttacagaaagaagcaggatagaatcactaaatcttttggagattctggtatttcttttctcctacttttataatcaagtggttgttgacgttttatgaatttgcgtaggttactataacagacatctctggatcatgcacattatgatcagcctttcttctttatctgcataaataattaacttagttgagagaaatatctcctcgaaatatagaggccaccagcttaacatatctcaacctatttctattttaaaaaatatttgtgtgcatatagatgtaaaaaaaccctgaagaaatatagtctgtgttgctgtcagtacatgcaatgtagagttcatatagaattctcttagcccctgagagtattgaaagtgttaatgttggggtctttgagtactttttaaaaattttggtaagaggaaactgtaacaagttttaagtcaaaaatgtacaaaattatcaaaaaacaaaacattcactgtaccaataagaaggtaactgtaactgataagtcatactagaaaaattaaagggctgcaaagctgcagggaaatggttagagaggccttagcacaattacactatggattgtggaatttttaattttttaacttgtgcactatatatgtgcactacaatt

SEQ ID NO: 13274 - DNA, 1027 bp, Homo sapiens
ttttgtatttttagtagagacggggtttcaccgtgttagccaggatggtctcgatctcctgaccttgtgatcctcccgccttggcctcccaaagtgctgccacaggcgtgagccaccgcgcccggccgaaagactgattctttttatctctcatttctgctttctctggaaccagcttcattctacagcaggctacctaccccatgcggccacaagatggcttccagcaactcccagagcctaggggtggggttggggctgcttccagaaatgcactcagaagagaacaacttttctcgttagaccgcatttagctcttttgggctacttttctatctgtgaaccattaactccagcaaggcctagagattacctcaggcctgatctatgtgccccacgcttggcaatgggactggattggaggcagaggatatgcatctgaaagtcaagatacttgccaagaggagagggagaggtgttggtgatgcaaccagaatatccattacagtaaaccaattgtcagagctacaaactcttcgtttaatagtcttcctatagtctcagtcttgtggagccagaagtgaacaaataaatagaagaaagaagggaggcagaggaggaaggaagaagagaaagagaagccagagtgaacaattaaaaacagaagaaggaaggaggaggaagggagggaggaagaagagagagggaacactgggcaaaataattgataaaatgtgctttgaaggagaggtcctcaggcattccctcagggcctattatgtacattttcattattagcccacagatgttaatagttgggtctagcagtggtgttttggtttttgtttttgtcaggcctcccatgctgtgcatcataattaactagaagtgggtgagtctgggcagtgctatttttttaaagatctccaaatgattctaatgtgtgtcttaggttgagaaacagaggaagcccatggcagttttgatgcgtttgacagctgataataagggaagaggcagcagaact

SEQ ID NO: 13275 - DNA, 1050 bp, Homo sapiens
atgttttctatctttattttacacctgtaacctcaacatcaatgaattcttatgtcgacttatgtcaatcagaggcctcttaataacctctctacatgcaatattttactcctatttccttctaagtctgtcaccactacaactaccttactttgggtccatctttctcatgcaggttattgcaagagcatattcatctgtgtccttatctgatgcctaaatctcttgtcaaagcacatactgcaagattattcatgtcaagattccagttagataaatatacaaatttctttaaaattattctgtggtttctagattttaggataattttcaaatgtctttactgaacaaatcaaatctcttgactctttttcttgctctgtgttctactgtctcatatgcaatctctacttaagccattctaattaatatccagtttttggggtcctggtgttaacttaatgcttcgtccttctacctgctatgttttcttaagggaatattctgacccctcttctctgctgaagaatcttcttgatggactttgggacttacctcaaaagtaatcaacctcttctgagaaaatttcccaggtctgataggctaattcaaaagtcagttctttcctttgctttcacagcacttgggcatacatttatgagatggttaacaaaccacattgcaatcactggtttttacttttccccccgtagactatgggttcaatgtgattaaggactatgttgtttatttctgcactctgagcacaaaaaatatagtgtctgatacataggagatgatctcaagtattttgaatgaatgattaaatgagagaaaagttctgaggtgtggtttagcaactaacccgttaaaagctcaatgaataggtagttgtgagtatagggtgatcataagatcacataattcaaggcagggcaacatgcacctatttcttttagtctgttgacaacttgacaatactaatgctactacttcttttctctcctctctatatcttagtgaatcttaaaatattaaagtatataaatg

SEQ ID NO: 13276 - DNA, 1333 bp, Homo sapiens
caacatcatgcttgttgactttgttagaactgacattctcaccagtttgatacttgcgggtacgtaacaaaggtgcagaatacaataatgtaggttttattttaaaaataaagaaaatttgttgccccctcaacggcgcggagaccaggggcgacacgcggcccagggctggcaagttcagggcgggcggctggggactgacgcgtggcggtgggatgtgaggtgggggcgggacctggcctggtgcctggaggggaggagtccaggcggcgcctcggacttttgctcccacaagccctgcctcgaaggcggggaagctgggccaggagcagcccagagcgtctgagttgccgcccagccagggctcctgcgctccccagaacggtgggacgcgggggtcggcagcctccagctgaacatggcgccctggacgctgtctcgctgctgccactgcgtcatgggctgggtgccggtgctcctcatcaccttcgtggtcatctggtcctactacgcgtacgtggtggagctgtgcgtgtttactatttttggaaatgaagaaaatggaaagaccgtgttttaccttgtggctttccctctgttttttttatgtttgtatggtcctattggatgacaattttcacatctcctgcttccccctccaaagaattctacttgtccaattctgaaaaggaacgttatggaaaagaattcagccaagaaagacaacaagaaattttgagaagagcagcaagagctttacctatctgtaccacgccagtttcaaaaactatcagatattgtgaaaaatgtcagctgattaaacctgatcgggcgcatcactgctcaacatgtgactcatgtattcttaagatggatcatcactgtccttgggtgaataactgtgtgggattttctaattacaaattcttcctgctgtttttattgtattccctattatattgccttttcgtggctgcctacagttttagagtactttataaaattttggacgaatgaactgacagatacgcgtgcaaaattccacgtactttttcttttctttgtgtctgcaatgttcttcatcagcgtcctctcacttttcagctaccactgctggctagttggaaaaaataggacaacaatagaatcattctctgcacccacattttcatgtggacctgatggaaatggtttctctcttagatacaataaaaattggagacaagtctttggtgatgaaaagaaatattggctactttcaatattttcaagcttgggtgatggttgcagtttccaactcgccttgtagggatgggtccagaacaagcttctg

SEQ ID NO: 13277 - DNA, 1755 bp, Homo sapiens
cacagtgcttctgttcttactactaaatgatatattgtctgcaaaggtttataaagataatcttggtgtctcttagtacatagatttatcatatagaagaatggaaaagagtgggaaaatattataatttaatttaataatataattcaatgaatggttatggcttctaccaaggatagtcaatatattcttcacagagcatctcgtttcatccttagaaacaagcagtgtctttcagtatctcttcttacatattagccctctacttcaattcttcccatccttttcatgccaccatccacacagaaaattgtaactgaaaagcataccagtgtaagcaggtgagtcttggccatgtaggtgaccagtcctgaggtcccctctcctttgccaccctgcaaaggctcaacattcaggccacacctatacctatatgcatcatactggtgttcagtggtatgctggtcaggatgctctcccctgtatgacttcttagaatcttgtttgatctgactctagagtatttggccacagtgatttttacagtttccagcaatcacctgagtatttcatgttcttgaagtccctctgatgaagtagcaaaaggtttctgaatgcagtaatcctagttcagagcttacttgctatttgctaagcttgttatgtgctgccattttgaccatgataagatgaagagaaccattgataagatgaaggccattttgttatcctcaaaatggctactgttcaagctgggatatgtgggttgacactgtagtttattttctcatacttctcccacttgaaaaatctacttaatttctgaaatgtatacattctcatataagctttattaagccatgagcaagtctatatgtgaaaaaaattcacaccatggaatactatgcagccacaaaaagcatgagatcgcgtcctttgcatggacatggatgcagctggaggccattattcttagcaaactaatacaggaacagaaaaccaaacccctcatgttctcacttataagtgggagctaaatgatgagagcatgtggacatatagaggggaacagcacacactggggcctggtggagggtgagaggagggagatcaggaaaaataactgatggattctagacttaatacctggatgattaaataatctgtacaacaaaccccagtgacacaagttacctgtgtaacctgcatttgtacccctgaacttaaaataaaagttaaagaaaaaattctgagacaaaataattttaaattgtaaaaaaaaatatgtcttaccaatttactgatggaaggcaaggattctttcctgtaatggaataaagaagtggtcctagaaagctaactgctgagtccttggcaagtatatgctttgtgcttggacccaaaattttatattaaatcttgtagctgagaagtttatataacagtaattgcagattgtatcaaagtgaaaaaaaaattcatttggaaaaaatgttatattgtcagtgttttatttcagagttaatatttttgactgtttagaactgtgaactatcctcatctattttacagtaaaagttgattctaaaattattgccatgataaacttgttataattgaagagaaaaactttggacaatttttagatgtatgttgaattaaatacttcttaatttgtattaagggacaaagtttatcaaatttatattgttaaaagcaatttaatatcaatgtaagtcttttgaaataaagtat

SEQ ID NO: 13278 - DNA, 1030 bp, Homo sapiens
atatatttaattgtaagtttacataattttatttttaatattggttttaacaactggtgcacagaattcttgaaaatttaataatcagatcttgagagccagaacaaacaagccagcttcagtgccgtcattcatactggcctacttgcatgtctctgtcttaatatattccttcccttttcatccttttttttgtaaccccatcaaaaaaacctgggaaagaaatttaaaatactttgtctatgattaatcctcttagtttagtttgcaagtttcaaatttaactggttgatttgaagtattaagattcctctttatatatactttaaatttcttccatttttcctttggtcatttgtattaaaatttttgcatacagttataaagttagtatatgacatgtttaataattacttggaaaaacacaggtaccgtctcacattttgggtggaatttatgcctaattgtatgactttaattttcctagtttttcactaaagatgtcatcgtaccctctccttggactgatcatgaagggaaacagctttcacaatgtcattccagtaaatgtgagtgtactaaaaatgatatgaataaaaatcaaaaaagtcggtgaatataaagcaacatatcatgaagtgccagtatatctgctttgtaagaagcttgctttaaaattctggataacatagaatttaactccttttagggttagaattaaaaatttgactaaaatttattgaattgttttttagctgttatactctgaatttaactttttcttcatgactattgtgaatgtcagttataatgatggttatagaggatccatagatgaagaaatagttggtattgaatatagagatgagttgttaatgactttagcagtattttgaaggttaatattttagataaaaccgtaaattgtgttgccttttgctaatttgctgatttcttataaaggtaaagaaaggatgaagacttaatatgacctctgggacagtgtattattgctgagtatctgcaaaat

SEQ ID NO: 13279 - DNA, 1050 bp, Homo sapiens
attttttaaaaatattaataccaagtgatatgagaagagtaaatttattttaattatgacagataaggcatattttatattcacattaactgatatttgtatggagtaggaaaaggtaagagcagaaaagaaattagcctgctctagagaaatcaatcctgctagagtcaggcaggattcatcactgtttcatgtggatccagtcccccaaaacatgcaaggtctggtatagtatttgcattctaaaaataaaatcatttttgtttttcctttatgtgatttaggggggataaaaagagtttagagcactggttttttttttgagatggggtctcactctgtcacccaggctggagtgcagtggtgtgatcttggctcagtgcaacctccaccttctgggttcaagcaattctcctgcctcagcctcctgagtagctgggactacaggtgtgcgtcaccacacctggctaatttttgtatttttgtagagataggatttagctatgttggccaggctggtctcgaactcatgacctcagttgatccgcccacctcagcctcccaaagtgctgggattataggcatgagccaccgcgcctggccttagagttcttttatgtatgcatttttgtgcttttcttttagaaacatgatttatagcaacatttttcatgaaattatacatttccaattttgcaatgtctctgacaacaggaaaacctgattcatttaacagatacgtatacttcataattagcactttggaaaggcatttgttccattcattgttgtgttctttgagctgagaattttgaaggaacttctttagaagttctgactttagtcagaaggggatagcaataacatctaacactaacgtagcattactatgtgccaagtcctattctgagacctttacatgttttactttgttgaatttttacagcaatcctgtgaggtatgtgtactgttatccctgttttacagatgaggaaactgagggtcagagaggttaagtaaattacctaaagtttctatacaactagtaag

SEQ ID NO: 13280 - DNA, 1158 bp, Homo sapiens
tctggagcaacttttgattctccaatttctaaaaatctttttttttttaaatctccttttttgaatttttgggcaatttcctccagtttatataataacctttctattgagttttttattttctacacttttgaaatgcgttcggtactaattttaaaagtctgcaatgtggctggcaaggctggtctttctactctccagcttgtttccttcattctctgtttaggtcccactagctttccaaagttttaaaaagccacgttttctcttgttacagggcctttttgcacatgctatgtagcatttctatcccattttacttagttaactcctatttatttttttcattgacaacttattgattacatcctcaagccttcccagatcacattagccaggccagacctcattatatgctttcatgattccatgcacattttgcattctttccaatcagaccactaatgcagcagtcatgcatgtttttatccccagtgcttattaaaaagaacccgtcacgtaatagccgctcattaaatatttgtgtaacaaaaacagaacgaatacgtaggttaagttcaaccagagggatggtatttactgagagtaacggggagccaggatttggaactctgaggaagaattgagagggatcaggtaaaggaagtacagcccctgaaggagactgaaaagaaccagccaaagaggagaaagggacacttagaaagcacagtgtcatgaagcattttaagcaggaaagaatggttagcattgccaaaataggagcaagcaacattgggcttgaaaaggggctaatggactaataagaaaagtaattaataactgaacagcctcaaggtgaatggaaggaaggttaaagaagaagtaatgaaataacgtgtgtagataactctggagtttagttgtgaagggaaagaaaatgatacctagagaagagcatcaaagtcagatctttttgtagtttgcttttttactttgtttttacttaacccatttatgcctaaggttgcaattttttgaatttttgcaatcagaccttggcgatgaccttgaacaacagggtataagtaactcccacatgcttagtgttccagtaatggaacacagaagaaacagcatacagcatttaaatgaaga

SEQ ID NO: 13281 - DNA, 1917 bp, Homo sapiens
gttgtgaatgaggccgacttgagtgcaaaagagtgtggatcttagacatgttgagtttgagagatctgttagatgtacagtcaaaggtatgtggatatacaggtgtgaactttagaagataagcattcaagagtcatcagcataaagacgatatttaaagccaggatgagattaccaaaggagagtgagtgtagggaagagaaggaagaccacagcttgagctccagggcacttcaacattgaaatgtgggagagagaaggaggagttaccagtgaaatagggaaattaagagaattttatgtccaggaaatcaaagggcaaaagtttgtcaaggaaaagagagtgatcagctgtttcaaatgctgttgataggtacagttagatgaagactaagaattgacattgtatttaacaaggtcattgaaaaccttgtcaagagtagttctggaggagggatagggtcagcagtttgattacagtgtttgagagtgaatggaggaaataaactggacatagagtatagacaactctttctgagtaatactactgtatagaggaacaaagagagttggcaattacaggaaacatggagccagggaaggcttgttttttttttgtttttttgttttgttttttgttttttgtttttttccttaagagagatgacagctgttgtatttaaaatcacattgtaaccataaaaattttctcattgtcgacaacggtagaaggacattcatgtaattgttaaccaacagtgtaggtagtactgttggatacccagttatagttatgtttaaggctccccactttagtgctatccgtgtaataaaaagagtcatgtatatttggggtattgccaatagtatgtgtttctgtgattatgatatttggggaaactactagaacagaggggtgtttgttgattgaattactcctgattagttctgtgggactttcttaatatctaaatagtggtttaaagaataataatttagtaaagtgagataatttatctcttaatagctagagttttaattatgtcacaaaaagttgagtttcgatttaaaaaacaactgaagaatatatttataagtgagtaaggaagatagagaatgttatgaccactagaggagggtttacaaaaagatctgggttatttaaatgaggctgggggaggttgaagaggtgattggacactgtcaggttactgaggttcaattgtcatcagtgagaaccattgtctctagacttttaaaactaatcacaaacccctaatttatgaaagtgctaaatgaaattgtcagtttttcatttgaagttttctgttttttcttctgttacttggaatgttcttatctgagtgttttttgcccagtggtatttcatgtttctttcctcttcagtctgtgggctgcatatatatacttattgttggcctgaagcagacaataaaaacagagaaatgcccatcatatccaaaggaagtagcaagaaaatttcgacttttccaatggtgtcattaattttaagtttcttgacccaaaagagtaaattttcctcttaactatagtgggagaaaaaataatatattttcctcacccattgcaaggtttatggctgagactccaataataaaagagtaataagagaaaagcataacaaatttatgtataatttatatgtataatttaatataaattttatgtgacatgggaaccttcagaaatgaagactaaaagacccagggaaaatgtatttttgtggattgtcatgcataagtatgattggaagacaaaagtgtatgatctgatggtaatcaactgggagaatttagcaaggcttgtttgttcacattcttcttgggctgtctgtgacattccttcccattaggtatagggcaggacgcctgtcac

SEQ ID NO: 13282 - DNA, 1268 bp, Homo sapiens
ggtccatgatatatagctgcaaccaccataaagttactaaattttttcttttttgagccagagtcacactcttgtcacctaggctgcagtgcagtggtacagtctcggctcactggaacctttgcctcccgggttcaagcgattctcctgcctcagcctcccaagtagctgggattacaggcacccaccaccacactcagctaatttttgtttgtttgttttttgagatggagtctcgctttgtcgcccaggctggcatgcagtggcacgatctcggttcactgcaagctccgccttctgggtttacgccattctcctgcctcaacctcccgagtagctgggactacaggcacacgccacgacgcctggctaattttttgtatttttagtagagacggggtttcaccatgttagccaggatggtctcgatctcctgacctcgtcatccgcccgccttgacctcccaaagtgttgggattacaggtatgagccaccacacctggcctgaagttactaacttttaataagacatgatccaaatttttcatatgacattattcaaaagatcttcataaagtgattcaacaaatattttattcttcaactcatacttatttaaggttggatattttaagataaacaacattagtcttattaatgactttatgtaattttaaagttggatacaatataagctttggggaaaaaaacatgactagatggtattcacccaagaattttaagggacttaaaggatgaacctgaaactgcagcacatgtataatattgctatcaaacagagcacttgaagtaggtgtaattgcttgaaagctggtaaattgcctgcctgagtctagaaactaaagacctccacacttaaaactgataaagcactcttttatgcttactgagcttgtgtaatgcatgaagattaggatcagtgaatacttaggcaagttaaatacttccccttatgggggaaggtcaacagagtggtacaaatggacaaattatatttcacatatatataaagagaaaatagagaacaaattatatagactttcaaaaagccattgacaggttttaaattctagcttttaaaaattggcaggcttttaaaaaattacagtgaataacataacattaaatttaagactttattttcatgtatacaattcagtaaagaatactcacattgtgcaacagatctctagtacttttgtatgttgcaacactgaaaactacccactagacactgattctccctc

SEQ ID NO: 13283 - DNA, 1064 bp, Homo sapiens
catttttattgtatttgtcttatcaaatacctctccatctatccatctgccagtcacatttaattttatgggaaaatgctgaacttttttttccatttgtcagtaatttcttccttttcattactgagtggtattacattgaatggctctagttatttaccatttaatgggcatttgagttatttccgattcagagactttacaaacaaagctctgagaacatttgagtatggttttttgtgtggacatgttttttctcttgagtaagtacttaagtgtggaattttttacttctagaatttcagtttggttatttattatagcttttatttctctatttgtttacttattatgaacatattttcctttacaccactgagaattgttaaaataggagctttaaaattcttgtctgctaattccaaacactgggtcaccttggagttgatctctgttgattgtcttttcttttagaaatgggtcacatgttcctctttcttcagatgtcaagtaacttaaaattgtttagaccatcgagtaagtgtagatgagaacattgtgagtattatgttgttgagactctgcattttatgtacctctaaacggtggtgatgttcttgttttagcaggaaattacttggttgtactcaaacagcatactctgtctattgggcaggtgttcaaatttcagttcaattttttttggtattattggggctgctcagagtctgtcctacacatatgttgtttagagggtagccagatacttaagcagaaattacccagagaattcagtttcccctctctggctatctctgaaatttcctcctcatttagagcagctgcagttcccataaataccaaagattttctcatgcaccttgatccatccaacctggcacagaatgggactggcctcaggctaagggctactaaacaaaaacaaaaaataccaggaaactcacctaaatgctgaaaatgatagcaataatgacaactccatagtggtttactaagagaaactaaggtatttgttaggcatatctctgagttttgagaccagc

SEQ ID NO: 13284 - DNA, 1077 bp, Homo sapiens
ggaaagaaattaatacagtcaagcttgaaaagtaagatggcatcactgtggatactttttgtttctacatgtatgtaggtagtcaccttagagcaaactgttactttactgcaaaaggataaagaatatcttaatcgccaaaacatggagcttagtgttcgctgtgctcatgaagaggatcgccttgaaagacttcaagctcaactggaagaaagcaaaaaggctagagaagagatgtatgaaaaatatgtagcatccaggcaagatttgcattatttcccacgtaaatagataccaattaacagattttctttgagggaactcttggctttggggaagatttagtgatttttttaaggtctattctatatgataatactaagataataccttattttattttattttattttattttttgattttgacatttctgctttctgtttgcatacatttaagtggtgtaattttcccatgtgcctttattttaaaactttgtcatttggttttaggtacgtttcttgaatacagtaatgagctgatgtatccattaggataatttgggttgcaaataatgcagaagggtttaaaaaatgaagtgagatatgtttgcttttttttttttttttttataaattatactttacgttctggggtacatgtgcagaatatgcagttttgttacataggtatacacatgccatggtggtttgctgcacccatcaacccgtcacctacattagatatttctcctaatgttatccctcccctagccccccactccccgacaggcgccggtgtgtgatgttcccctccctgtgtccacgtgttctcattgttcaactcccgcttatgagtgagaacatacggtgtttggttttctgttcttgtgatagtttgctgagaatgatggtttccagcttcatccatgtccctgcaaaggacatgaactcatcctttttaatggctgcatagcatatatattccatggtacatatgtgccacattttctctatccagtctgttattgaaggacatttgggtcggttccaagtctttgctattgtgaacagtgct

SEQ ID NO: 13285 - DNA, 1020 bp, Homo sapiens
acttcataaatgaagaactgccccttttgactaaaactactattaaaagtaaaacttcagacacattaaatttaaagtttaattgagcaatgaacaattcgcaaatcaggcagcttccagaatcacagcagattcagagagactccaggggtccctcatggtcagaacaaatttatagacaaaaaaagtaaagtggcatacagaaatcagaagtgagatacagaaacagctggatttgttataggttggtgtttaacttatttgaacactcagcagtgtatgaatggttgaagtatggctgctggggttggcccagactcagctgttgttacaggcacatacccccaagttaggttttctatcttgtctgcctattaagttaggttgcagtttgtcaatacggactcaaatatagaagtacggagtccttcttaaggccatatttagtttgcattaacactatgaactaaggaaggaaaggaaattgggggaatgaatatatagcatatataaaagcctgaaagtaggacaaaaaggacaaaatgaagctttttgaacaaactaattcggtatggctgaaggatagactgagaggcagggagttaaaagagatgaaacagaagcaggaaatgggcccaaagaatgcatttggaccattatgtaagacctgtggggaacaattgaaagattttaagaagaggcatgaattgatctgattttatatcaaaagatcactgtaatgtagagaatagattggaatggcataagcctgttagacagagagggtctacttttagaggttatttccattatccagatgagaggtgataatggaactggattagtatcagtaaagatgagagaaatgggccaggttggaaaagtatttaggagacagagccgacaggactcagtgactagattggattggttggatgagaactcgttaaggatgtcagcaaggtttctgaattaaacagctgcataaatagtgatatagtttttaaaacattagaaaat

SEQ ID NO: 13286 - DNA, 1033 bp, Homo sapiens
tggtgctctacaaaagataatagaggtattcatgatgctcttgatgcagtacagaatctggaaattgaaatagctttacaattgtttgaaagggggtaggcagtagagaaaaagagattgaaaagatgcttttaagtgcaacaattagtattgctttagtgattttattttcctgccgaatcaataaaaaccatcttgaccacaatttatcttccaaaagtactcaagaagaaactttaatgatataaacttgaaatttatgtagaatcttagagtgatattaaacaactttgaatcttgaatctatttacaaaggttagttgagtatatgtattgtattacaatggtgaatttaactagtgtacagaggttccagtcatcattttaaaagtgtatgtcctcattagtgcttaagcaaacaaacaaacttcttttgttcatatcttaccaggtatctgtataatgttttaagttcttccatggaaaaatttaatagtaattactttgtcttttcagttagataattcttgaagtatatggctctgcagataactctctcagcatcttctcaaatattttaaattaatttttattatcagttatcttttattgttaactatattctttactccttagatgtttacaacgtgtgttcactgcttcattaataatacttaaaaatttcaagctctgtagggtgttccagatatgaagcaaggtaagttcaggttgcataggaatttagatatacctttgtggtgtaattcgttgtgtgttaggagaggctggtaaagtaagattgggccagattttaaaggttctgttgtcagtggggaatttccagaggttttatagtaggaaagaaacatgacttactcattttttataactacggttgcaatgcggggtggattatagttgaagaaagcctagaagcagggagatcacgtaggaggctgttgcacagcttaggtgatgaaaataagtagaaagagaaaatgatggatgaatttaaagaatacgtaggagaatt

SEQ ID NO: 13287 - DNA, 1054 bp, Homo sapiens
ccaccgcgcctggcctaatttctgatcttttacagatgtggcagccctgaccaagctcaaaagtgcttatctgagatcacacagctttttactagagatgtttctctgctgtgccccagatttcactccacttagccctcagattagtagaaggaaccctaagctgctaaagcccctccaacagtcttctctgttttccctaggatgccattaaaaatagtatcactttcattttatacaataaaaactttgaggaaacattgctgtaattatcaacctttaaattaacatcacgttttaatttacattttcatatttaggtagcatagtaagcatagttactatttattgagtacctattatgcgtcaagcattgtactcaacactttacatacgttgtagaaaaagaaacacattttatgaagtttaggtattaataaccgtattttacaagtaaggtaattgagacatcaactgtgacttgcctgtgattattataaacatttgttggtaaaaactagatacatctgactctgcaatgcagtgcacactcccatttaactggtcagtgctatgtaaactgatcaaagatttcctatcaaaactacaattttgaagttaatttacttaaaatagaaattctgtctttttttattattatactttaggttctgggatacatgtgcagaacgtgcaggtttgttacataggtatacacatgccatggtggtttgctgcacccatcaacccgtcatctacattaggtatttctcctaatgctctccgtcccctagcccttcaccccaacaggccccagtgtatgatgtttccctccctgtttccatgtgttctcattgttcaactcccacttatgagtgagaacattcagtgtttcggttttctgttcctgtgttagtttgctgagaatgatggagaaactctgtcttttaagagaatttgcaaacgacattccatgcttgagggctgagtatggatcattagagctttataaaagcatctgtaattttatttacacacacacacacacacacac

SEQ ID NO: 13288 - DNA, 1047 bp, Homo sapiens
tggtcactcgcatagttatgctggcctcctgttcttttacctgtaggtgtgctcctacctcaggtcctttgtattcagtttccactgcataaccatctactcctgatgatacacctgttcttgtggtcttttctgactttgttctatgttgtctttgtttttaatctatcaacatactacatatttatttactttgggtttttttcctactagaatgtgatctccatgagagtaggagttttcatgtatcgttcagtcctggactcccaggtaccagtgcctggtacgcagtaaacactcaatatacgtaatatttattgaatgaaagaatgaattggtactactttttagaaattaggtggctgttggtttagatgaaaacctactcaaaggtttataatggatttgatcaggactgagtgtcgtttgaagatatatagtagttactcagttaaccatctaccagattcattctgtttcattttgatatgttaccttttatcctgtcagctactttgtaaatcttaacacattaatggatttaagcaaatattttgcattttggtacttcaattttttataatttttcaaccataatttgggttcaatgtttatctactttgtgcttaagttttcatatctagaaacaaacaaaaatctgcttgagcaccaattgtcttcagtccattttatgctgctataacaggatacctgagactggataatttataatgaacagaagtttattggctcacaggtctggaggctgggaagtccaatatctacgtactggcatctggcaagagccttctcactacattatcatatggcataaggcaagaaggtaggagacagagcaagggggagccaaactcacccttttataatggcaccattcccactctcatggcctaatcaccattatcaggtcccacttcttaatactgttagaatggaagttaaatttcaacatgagttttggaggacaaaaacttttaaaccaaggcaccaactataataaaaggttaggaaagtgtagcattttca

SEQ ID NO: 13289 - DNA, 1048 bp, Homo sapiens
ccagtatgttatacttagtaaacagtatatgaagcataatatgtgtgaagttgaacatcagtaggtatatttttgttctcaaatatacacatcaaaaacaacacaatttaaaactatactgtattaatttcatagggttgcaatgataaattgccaaaacttggtggcaaaacaacagaaatttattctccattctagaggccagaactctgaaactaagatgttgacatggctttactgtctcctaaggctctaggggtaatcctttgcttgcttcttccagcttctgggggcctccaggcattccttggcttccttggcttgtaaccgtatcactctagtctctgcctctgtcttcatgtggctttctcctttgtgtgcctcttatatggatatatctgattgcatgtacggcacactcagataattcaggacaggtctctcatctcaagatgcttaacttaatcacatctacaaagactctttttccaaataaggtaatagtcacagcttttgggagttaggacatggacttctcttttttggcagggttgggggcaccattcaacctaccacatataccttttaattcatgtgaattatatttacttgagttcttcaataaaggtaacattttattttgaaatgatttaactaaaattttctaattttaggagttactgaaattctatgatatttctatggactatctttcaacctactagctgttgaacaaaatcataccttagagattctagaatctgccatttgatctatgacatacatttattatgacttaaaagtcttcctgtgtgacttttaataacattctttaagaacatcatgacagtgacattaagattaaagaaacagtagttatacatttttaacagatacagtataaaaacctagctttagacaagctatgttagcttcatttaggccatttaattgctagcaattaaattttgctctactgtgtttgagatcctttagatttgggatgctcttataatgactatttcatgttttattttcgttccttatt

SEQ ID NO: 13290 - DNA, 1060 bp, Homo sapiens
ccatggtgggaggatcactagaggctacgagtttgaaaccaggctgggcaacatagtgagaccccagctctcccaaaaagtaaaaaaaaaaaaaaaaaaaaaaagatgaaactacttcttccccattattgtctgtaccctaactaaatattaagcattccacttgagataccatctcacaccagttagaatggcaatcattaaaaagtcaggaaacaacaggtgctggagaggatgtggagaaataggaacacttttacactgttggtgggactgtaaactagttcaaccattgtggaagtcagtgtggcgattcctcagggatctagaagtagaaataccatttgacccagccatcccattactgggtatatacccaaaggactataattcatgctgctataaagacacatgcacacgtatgtttatcacggcattattcacaatagcaaagacttggaaccaacccaaatgtccaacaatggtagactggattgagaaagtgtggcacgtgtacaccatgggatactatgcagccataaaaaatgatgagttcatgtcctttgtagggacatggatgaaattggaaatcatcattctcagtaaactattgcaaggacaaaaaaccaagcactgcatgttctcactcatggatgggaattgaacaatgagagcacatggacacaggaaggggaacatcacactctggggactgttgtggggtggggggagggggaagggatagcattaggagatatacgtaatgctaaatgacgagttaatgggtgcagcacaccagcatggcacatatatacatgtgtaactaacctgcacattgtgcacatgtaccctaaaacttaaagtataataataataataaaaaataaataataaaaaaataaaaaataaagcattccacttataagaaagttattagctctgatcgcctctctttattcttatgtatgagttttcattccacaagttttagacactgtttataaagtataaggtataccaaggcatagctaaaggttgtggctacttaaccccccacctc

SEQ ID NO: 13291 - DNA, 1031 bp, Homo sapiens
ataccaaggtatgtagacattttctggaacttttaaactttctcattttataaacagctgtagaaaataaaaatataattataacataatatgtgtttactgagtgcctaacataagattatatttactatctatttgtttgaacatcccaagatagaatttaacagaaatactaacaagtaattatttggtccattaagtctaatgagagaaataagaggtggggaaatagtgatttagttcttattatgtgatttagttcttattatgtcttctatttatgtcttctttacttctgttttgtatgccctcatgataaactttattacattcttgtaggtaggctagtgagtcacgcatagattcctaaaattgtgtataaaatttgtaataattttaacttgttacagaactcagatagagcctgtcatatcacactacttttgctcccttttttgcatttcttttttgtaagtatttttagaatgttgtcatgtctccttctaccaccttagccattatccacactgtatattttttggaagtttaatcttttttgtagtttggacatacctaacctataatcattttggcttctcttttcttcactctctgtaatttgttttcatcttttacggacacctaaacctggaaacaataatcttaattcactggttttttcatacttcagaagagactgcccctcatcaaattagtatttaatattttaatgttttctatcctggcttgaacctatttagcattctaattttataacacctaaaaacctcatggttactatgactccattcattcactcagtaagcattaagagttagtaatattctggatataccattatctcattaagagcttataatatgccagaatatttactagatcctaggaatccaaagatggattagacaagattcctgcactgaagtaacttgtattttaattgtacagtgtgttgttgtgagcattttacttttgttagctcacattatcatccagaactcaacatgccc

SEQ ID NO: 13292 - DNA, 1051 bp, Homo sapiens
aataattcccgtctcaaggggtttctaatctactgagagaggtgaacataataacaaataattagagtagcaagataaatgctataagcaaaaaatatgcagttctcagtggaaatacaaaagagatcattaattaatcccacctttaaaggaggtgaggcatatctaagagaggagatgacactgcaattagtcttttcttttttcttttttttttttttgagacggagtttcactcttgttgcccaggctggattgcaacggtgtgatctcagctcacctcaacctctgcctcccggtttcaagcgattcttctgcctcagcctccgggtagctgggattacaggcatgcgccaccacacccagctcattttgtatttttagtagagacggggtttctccatgttggttaggcggtctcaaactcccgacctcaggtgatctgcccgcctcgacctcccaaaatgctgggattacagacgtgagccactgtgcccagccttggaatgagtcttgaagtacaaataaaaattcatttgagggtactgtgttataatctttgatctttaatttctgttttccttttttcttgttttcccctcttgttatcttcctgtcttatccctaacgttaataaatattttaaattaacatttcaccattggctgtgatgtttgctacagtacattatttgtgttcaaaagtcagataaccatggcattcttataaaaatgggtttaaacttcagttgaagttgaatttgaatctaggtagggttctaattattttaggcacatttttgcataaggactgtatttacttgtaggccaaatgtaagaaaaacttatttctttcctatcattgtcctatttcccatttccaaggtcaatgtctgataactgcaatagattttaaatttatcttcaatttcttcactggagtcaaagtaatctttgtaacattcaaattttcatatcatatgctggctttaatgacttttattgtcttcattaagacaataaagtcaaatttctttacatgacttcatgat

SEQ ID NO: 13293 - DNA, 1058 bp, Homo sapiens
atatatctttatatttcttttcattaaatcttaatataatctcttatatccttaataatacaatcttaataaatctgagtataatcttttaatgaaagattttatattatcttttgttcttttctgtgtatgtgtgtttgtactacattagtgggctaaatgggtcttttagggcaactgagaactttaataccatttctaatatatgtgtgtatatatatatatacacatatatatatatatacatatatatatacacacacatatatatacatatatatacatatatatacatatatatatatatatatacatatatatatgaggaaatgtgttttactgttcttacaactgacttagaggtgagtttttaaaatgtgaaccccatatatactggagaccaattgtaccatgttgtcttctacattattatcattatgcatcataaatgacatcaacagtcatactaatactcacggtccttcccgtcaccatcaattctcagaaagtttttctcagtaaaattgtactataaactagtaatcaaagcactgtagagtatatttgtaagcaatttgaagataccttagatactttccttctatttagagttgattttccttacttggaatctcccagtcaaaatcagggaaattcctttttgaagaaagtagtcctggtgttaaggcttaagcactagcataccaagaatttcttttttttgagatgaagtcttgctcttgtcccccaggctggagtgtgatggcaccatctcagctcattgcaacctccgcctcccaggttcaagcgattctcctgcctcagcctcctcagttgctgggattacaggcgcctgccaccacgcccagctaatttttgtatttttagtagagacagggtttcaccatgttggccaggctggtcttgaactcctgacctcaggtgatctgcctgcctcagtctcccaaagtgctgggattataggcgtgagccacctcacccggcaagaatttcttgagtcagtgttttatgacttatgatatttttattggtaagcg

SEQ ID NO: 13294 - DNA, 1034 bp, Homo sapiens
gctcctttcacttagcataatgttttcagggttcgtattttgccatctatcagtgctcagttcctttttatgactgaataatattccattttgcagattaactacattttgtttatccatcagttaatggatttttgtctgttttgaatagtgctgctgtgaacatttcatgttcaaattttttgtttgaacacctgttttcaattctcgttaagtggaattcaagatgaaatggtaattctatgattcacttttcaagaaactgcaaaactgtttttcgtagtgactatgccattttacattcccaccagccatttcaggggttccaatttttccacatcctcaccaatgcttatttttcatttttttaactctagccatcctggcaattacaaagtagtatcttctaatgattttgctttgcatttctctaattaggttaataatgttaactatcattttgggttcttattggccatttatatatcttctttagaaagatgtctgttcgagtcatttgcccacttttgaattgggttgtctttctgttgttgagttgtaagagttctttatatattctggacactagacctttatccaatacatgatttgcgaatattttctcccattctgtgtgggttgtctttcctccacttgttagtgtccttcaaggcacaaaagtctttaattttgataaaatctactttatcttaggtgtcttgtgcttcacctttggttttgtgggttttttattgaggtgaaattcacatgacataagattaaccattttaaagtaaaccgtttaatattcattcacagtgttgtacaatcactatctctatctagtcctaaaacatgttcatcaccccagaataaaaccttgtacccattaagcacttaatacccactcctctttgcccccaccctctgacaactgccaaatcactttatttctgtggatttacttcatctggatatgtttcatataaatggaatcatacaatatgtgacgttttgtgtctggtttctttcac

SEQ ID NO: 13295 - DNA, 1031 bp, Homo sapiens
gaaaatgaaaaaaatctgaaaatatgtcatgcaaaggggacacaaataccactagtcatggattagcaatatgaaatgagctttattggtataaagtaagtacttgaagtaataaaacatttatctctgccccttgagttgcctgacccattcttctgcctctaacaactgctaggagtgttcttccagcatccccagtgagctcagtctcttggaaagagtctgtggcacatacaactcacaggaccacacctcaacattataaaggaggagactcacatacctaccatgtggccctaaacaatctagatctgattaaatttcaaggtcaaccatatttctaagacttcaatgatgtaaaaaaaaaaaaaaaaaacccactgttttgtgtaccactgtgaggaagagtggaggatgctgctgattaaactgtgatacaatgctttgctattactttaatttttttcattttagacatactttcttttagactttaggcagtgatttttgtcctatattgcacaactctgtttctgtgtttttcttctgtttcaatgccgaatcccttgtgatctttttagatacttaaatgacaattgtactcagcctatgaaggactagccatactcaaaactcaattgaagtaataatatgaacagccaagaccaattttttcatgcatgggctttatcaacagcaattataagatgtatgctattttcatagaagagattaaaaacagtatgatttatagggttcctttgcctttcaaaatgtttgtctgtttgttgatattaaaaatcctttagtaggctgggcacagtgggtcacacctgtaatcccagcactttgggaggtcaaggcaggcagataacttgaggccaggagttcgagacctgcctgaccaacatgatgaaaccctgtctctactaaaaatacaaaaatcatccgggtgtggtggtgtgcacatatagtcccagctacttgggagtctgaggcaagagaattgcttgagcctgggaggcagaggt

SEQ ID NO: 13296 - DNA, 1034 bp, Homo sapiens
gttccccaaagtcttaactctttccaacattaacccaaaagtccaaggccaaagtcttatctgagacaaggcaagtcccttccgcctatgagcctgcaaaattaaaagcaagttagttacttcctagatacagtgggggtacaggcattgggtaaatacacccatttcaagtgggagaaactggccaaaatggaggggctacaggccccatgttaagtccaaaatccaacaggacagtcaaatcttaaagctccgaaatgacctcctttgactccacgtctcacatccaggtcacattgatgcaagaggtgggctcccacggtcttgggcagctctgcccttgtggctttgcatggttcagccctgctcccagctgctttcatgggctggcagtgtctacaacttttcaggcagacagtgcaaggtgttagtagatctacagttctggggtctggaagacggtggccgtcttctcacggctccactaggcagtgtcctagtgtggactttttgtgggtgctccaaccccacatttcccttccgcactgccctagcagaggttctccatgagggctctgcccctgcagcaaacttctgcctgaacatccaggagttttcatacatcctctgaaatctagtcagtggtttccaaacctcagttcttaacttctgtacccctacctgcatgcccaacaccacgtggaagctgccaaagcttgagacttgcaccatctgaagcaatggcctgagctgtacattggcccgagctgtacattggccccttctagtcatggctggagctgaagcagctgggatgcagggcaccatgtcccgaagctgcatagagcaggggggccctgggcctggccccaggaaaccatttttctctcctagggctccaggcctgtgattggaggggctgctgtgaaggtctctgacataccctggagacattttcaccattgtcttggcaattaacattttgctccttgttacataggcaaatttctgcaagaggctcaaatttctcccca

SEQ ID NO: 13297 - DNA, 1049 bp, Homo sapiens
ccaatcagcaaggaaaaaggcatcagacctatagatgctgcatgaatgtaggtattcaggcaaaaagcaatcagatatctctagtatggaagaatggttgtgaagcatatttctttgtggataattagtcacatttatttatcatttgtgtgtgtgcctgtgtacacacacatcagtgcacacatgcgtgtgcctttaatacaccttatttatcttcgggtcgtaggggagagggattcttttgtgttcacattctgggttatttttaataattgccttattttttgttattgggaagcagtaacaagtattgcctgaacatgattctggaaccagactcactggattcaaatctcagctttggcaattactagctatgtaaatttggaaaagttttttaacttctttggtttcagtgtcctcatttgtaaaatgttaagttccaaataaagcaactttcattgaaatatttcctcagaaaatgcaggggtttatttttttaaaaacagattgtgtcttataatatctaaggggtggaaaaacaggacagaagagaaaaggtaacgtttaaaaataggcaaagacaatctgaaagggctacgtacggtatgattccaactatgtaacatgctggaaaagacaaaactatggagtcagtaaaacagcagttgccaaaagttaggaagactccaccatgcctggctggtgtcgtgcattctatggggtttagacagatgcataatgacatgtgtctgtcattatattatcacacagagtagtttcactgccctaaaaatcccgtgttctgcctcccaggctcaagcaattctcatgcatcagccttccaagtagctgggactacaggcgtgcaccaccaaacctggctaattttagtatttttagtagagacggggtttcaccatattggccaggctggtcttgttggccatgttggccaggcctcaagtgagccgcttgcctcggcctccccaggtgcatgagccactgcatccagctttaatttcttttaatttctttctttcttttct

SEQ ID NO: 13298 - DNA, 1049 bp, Homo sapiens
tataggtacagaaagatttttgaaaactctattgaaggaattaaattctaataaattatgtttatttcaaacatggaattagcatcactttttattcagagatatgtacttttttcctgacaaatgaaaatcaactttggggatttagaagcctacaaacaggtttataaagaaatgtatctgtaacactaacagcattattatagtatttattatccagagtaaggcggttataggttttatgttaaagataccttttgaaagtaaggcttctggcccttaactttgtttataatactaaaacctttagccgggcatggtggtgcatgcctgtggtcctggcgactcaagaggctgaagtaggaggatcacttgagtctgggaggtcgaggctgcagtgagctgtggctctgcactctagcctaggcaacagagtgagatcctgtctcaaaaaaatatatgtatatattaaaacctaatatatgtaactactttcatgaaaaaattgaactaaaataattgagactgctgctgtatattttgtgcaactaaaataattgagactgctgctgttatgttttgtgcaattgaaattagatttggtatgttttaaacagctcattctagacagaagttaactgaaattcataaatgttcttagttattccctgccaccctttccccacacacacacttgaactgttctgcactttgaaacacaaagcaacttgtcagttcagtttattcagtcagggtcagttctgtgaaaacaaagccaaggcaattgtttgatttaattgactagacaaactggttatacaggttagtagaacttagttttatttttgtccagctgcatatttgaatgttcataaagtaacttagtaaaataataagattccagtgacattgtaatatattttaaagaataattaccaaagcaaagaaaaaaaacattctaaaacccaaactatagaagctattcatggtatttttttctttatggctccactttcactataatgaaatgtgttcccccaaaaaagtag

SEQ ID NO: 13299 - DNA, 1049 bp, Homo sapiens
ggtgttcttgaactcctgacctcaaatgatccgctggccttggcctcccaaagtgctgggattacaggcatgagccaccacacccaacctgagcatttgaaatgtggctactgttactgaggaactaaatttttaattctattaaaattaaattgtttaaattatctttaattttatttttaattttattaaaattaaagataattttaattgccctagtggccaatggctgtggtattgcacagtacagccagtttcctcatatgtgaaatgagagtggtgccgaggcagacagattgcctgagcccaggagttcgagaccagcctggacaacatggcaaaaccatgtttggttttgtctctacaaaaaatacagaaaaatttgccagtgtgatggcacgcttctgtagtcctggctactcaggaggctgaggtgggaggatgagttgagcctgggaggtggaggttgcaatgagcaactgcactccagcctgggtgacaaagcaaaactctgtctcaaaaaaaaaataaaaataaaaataatgagagtggtcctaacagcacccgattgatagggttgttctgaggaataaatgatataatcttcataatatacacagatataatagtgcctaaacattatattcaacagtgttcaataaatgtttgccattcttagtacttaccatacatgtaacaaatttttggttgaaaattatattaaaaatgagaaataacatttctcaaaatatgttgaatttcaacaaaaattaagactcccttaataacagcaacggttttcataaaggccatgtcatttatggaattaattaccaagaaaaattttgtactaaacatgagtcctttaatgttgtcttgtgtttcataaattaattgtgtgatattttagtacattctgaactgataattcacaggatatgaaatcttattcttaattgaagcaactaccttctaaagtgaaaagttattaatactttcagtagtttaattacaacacttgagatgttgctataggtgtaccctggtga

SEQ ID NO: 13300 - DNA, 1030 bp, Homo sapiens
gtgagtctccatctcaaaaaaaagaaaaagaaattatctgagatctggaatatgtgttaatatatatcagggggaaaatctggtaaggaaatagataaaacagtgttgacaaaacaatcctggtagttcctcaaacagttaaacatagagttacatacaacccagcagctctatgcccaggtatataaacaaaagaaattgaaacatatccacacaaaaatttacacacaaaacttttcactgtttcaaaatgtgtcagtgtttatgagtgcaacattattcatagtaaccaaaaagtggaaataacccagatgtccttcagctgatgagtaaacaaaatttggtatatccatgcagtggaatatgattttgccatgaaaggaaggaagtactgatagatggtacaacatggatgaactttaaaaacattatactaagtgaaagaagccagtcacaaaaaaagcagacggtatatgattccactgatgtgaactgtctagaactgggaattctacaaggacaaaaagtagattgattagtgacagcttagaattagagtgatgggggcatggcaggataggagggtatagttaaagcaatcagagtttcttaggttttggtttgtttttgttttttgtttcttttgagatgatggaaatattttaaaattgactggtaattgttgcatgtgtctgtgaatatactaaaaaccattgaattatacacttcaaatggatgaactgtgtggtatgtgaattatatctcaggaacgctatttgagaaagaaaatattgacaaaatgttgataattgaagttgcgcagtggaaagtggggactcagtattctatcccctccatttttgtgtcattgaaaatttccgtcataaaatgctttattaaaaaatgcccgaccaggcactgaggctcatgcctgtaatctcagcactttgggaggctgacacaggtggatcacttgaggtcaggagttcgagatcagactggccaatatggtgaaactccgtgtacacta

SEQ ID NO: 13301 - DNA, 1032 bp, Homo sapiens
aggcggagattgcagtgagccgagatcttgccactgcactccagcctggatgacagagcgagactccatctcaaaaaaaaaaagaaaagaaaaaccacaaaagtaacttaagaaaatataggaaaaaaacatggagaagaccacagaagaaaagattgacatattctgctacatcacaatcaaatgttcttcataacaaaaaaaaaaaagcggggggggggggtcataaacaaagtcaagtaagaggtaaactggaaaaattgccactcatattaaagacaaagggctaatttccctaacatataaagagctccttgaaatgtataagaaaatgaccactcagtagaaaaatgggccaaggcaatcaactgaaaaaaaaccttcaatatattaaaaaaaaaaaaaaactgctcaacttcactgtaaaaggaatgcaaaataaacatacacaaacccttatcagactggcaaaaatcctaaaaggtaacagaagcttacattttatcaattataaaactaaagctcattgaactagattaggcagcctaagtttaaacaataataatgtcaagaatagatgtgtcgtttgctaatagctttatactaaaatagtaccactacatgtgcttagccaggtgcagtggctcatgcctataatcccagcactttgggaggccaaggctggagaatcacttaaggccaggagtgagagaccagcctgagcaacatagtaagacctcatctctaccaaaaatttaaaaattagctgggtgtgggggaatgcccctgtagtcctagctactcaggaggctgaggcggtaggatggtttgaatgaactgtgatcacaccatagcactctagcatggacaacagagcaagaccctgtctctaaaaaaaaaaaaattgaagtggaattttcttggttcaaatttaccatcgatataagttggatcattatataagccaaacataataaaattgaaaatgtgttctaaatgttatttgggtacccactgtagctgtattatcct

SEQ ID NO: 13302 - DNA, 1035 bp, Homo sapiens
caaaaatcaggctgttgcttagaatcacaagtactacccctgatgcttgtaaagggtgatgttgcctgattagttaaaagcatattattgcattactgtagtagaattctcttttgtcttgcatagtagaaaggcttgaatagactcacatgaaactttatgcccagacttaaatagaactgaaaggcttctgtcacagcagacccaaacattcattcattcattgaaaaatgtttattgagcacttactttgtgccaagtactattccaagcagtagagatataaataattcctgcctctgtggatcttacattcatggatagagatagactataaaccgacaaacaaaaaaataaattgaataagatgtgaaaacatgacaaatgctatggagaaaatgtatgaggtaactgagaagtcctcgatttgcccactttgcaaaattaataaatggctagaacctgtgctttaaccactgtactatacggtgctcaaaccacaaaaatcaaagaaggcatgacatcgaacacctactgctggcgagacacttccctgcatgctgaagatacaacatgagataagataaatggtataaactaagagtataagagtcagcatctttaggaattgtgtcccactgctagttcagcagctttagcaaattgttcagtctctcacatacaggcctggagataactatttcaggacaagtatgtggccctatgaagtcatcaggaacctagattccctcttcctttctcttcaaccatccttagagtgtggcatctgttcttagaatcacaatatggttgctctggcctcagccatcatgtctgcattttaagcgggaagcgagaaaaagggaggaaaatagtctccctttccaaaggagtttttccctaagtcctacccaacatcttcagcttatatcccattggccagaacttagtcgtgtggccacacctagcagcaaggaaggctgataaatgttttatacagggtgaatctattgctttactgataaaatcagagtt

SEQ ID NO: 13303 - DNA, 1845 bp, Homo sapiens
tatcttaacaacaaataaaaagctgagctggaaaatcattaacttttcttttttttttttttttttttttttttttttgagacagagtttttcactctttgttgtccagggtggagtgcaatggtgtgatctcagctcactgcaacctccacctcccaggttcaagcgattctcctgcctcagcctcccaagtagatgggattacaggtgcctgccaccacacccggctaatttttgtatttttagtagagaagggtttcaccatgttggccaggctggtctcgaactcctgacctcaggtgatcccccccaccttggcctcccaaagtgctgggattacaggcgtgagccaccacacccagccaacttttcttaaatacataagagaagtgaggtcacaaagcaaactgctgcccccaaaattggacagataggccaatacagagaatgatgatgtatcagagcaaaaaatcccatggatgggaaccagtgctggggtaggaaaacctgaatgtaactgctagaagttaggtatggacaagtctgaaagttaaaaactccagtcatagaaggaacccccacactcttgtgaattttaactttagaagcttgacctagttcttacagtaaatattgggagaaaaatccccttccgtttccagcagtgggagggaaaaaagaacattttgaaatatgttagagaactcagttctcaacaaggtctcccttcaggagaagctattttaactagaagctaccctgctggggctttatcaaagcctaactgacctgggaaaaactcaatacccaatccagcccacctagccatcatggcccacctaagaagggaaaaaaaactgagaaacgtgtgtaaagttcatattccagaggcacactctaactgaaagactgagacctaatcataggaccataggatgacttccctacccccacaccttaccaccacattaccaaaggcccatttacggcagtttctttttcccagtacagtatgtccagttatcaggaaaaacttaaccaggtagactaaaaaccaaaaaacacagtttgaagagacagtgcaagcatcagaaccagagtcaattgtgccataaatgttggaattaacagacagagaacctaaaacaactatgattagtatgccaagggctgcaacagataaagtagacagcttgcaagaacagatgggcactgtgagcagaaagatgaaaatcctaagaaagaacccccccaaaaaggagaaatactagagatcaaaactgcttataacagaaacgacaaatgctggccgggtgcagtggctcacacctgtaatcccaatgctttgggaggccgaggcgagcagatcacctgagatcaggaggtcgagaccagcctgaccaacatggtgaaaccccatctctactaaaagtacaaaaactagctgggtgtagtggcaggcacctgtaatcccagctacttgggaggctgaggcaggagagttgcttgaacctgggaggccaaggttgcagtgagccgagattgtgccactgcactgcagcctggacaacaaagtgagactctgtctcagaaaaaaaaataaatgacaaatgcatttgataacctgattagtacagtggacattgctgaagaaagaatctctaaccttgagaatatttcaggccaggcacagtggttcatgcctataatcccagcactttgggagtgtgagaggatcacttgaacccaggagttcgagttccagaccaaccttggcaacataagagaccctgtctacacacacacacacaccaaaaaaaacaaaaaaaaacaaaaaaaacactt

SEQ ID NO: 13304 - DNA, 1050 bp, Homo sapiens
ttgagtaataaacccaagaagtactctggtaaatacttagaaattcataagatctaaaacacaataatttggatacagtaattatttaataaatatctattgagtgaatgaatatctattatctatatagatgagacaactgaaaagaagtcatgtccttgatttttttataattctctttgaaaataaaatcaattcgtaaaataattgcatccccagaaaatcttaagtataggctttgagcaagaaaacacagttttttctatcatatacctaccaggtgggagattatttatggcaaaagacaaagtcttcgcccttaagtatcctttctgaattaagaaaagcaattttttagtatagcttacataaaaaaacctcaatgtatatagttctctgagttgcctctcttgtcctccttgtaagcattttattggattttctttttctttttttaaacagactaaaaaagaagcacctgagtggtctaagaaacaaaagatgaagacctagtgttttggatgggaagcacctgtagaccattatatactcctgaagttctttttctgatggaaaacaaaattcagcttaatcgtgtactcagcattttttaaataacaatgtttatttgaactaatattaaattaacaaattcagtgtaatcaaaatgtgtaaagaacaatcaatatactttatttttttttctattttataaaataaatatatatgctatgctttaaattttggagctttcataaatgttcaatgcattttaagtgtgtggcttataaatattttggtatttttctatactacgtaaattctgagtttaaatgtcatacacaaatactaagacactttgcatttttaaaaattaagaatcatttgtgaagtccactacgaggtacttcaaaagcccagtaatggtggtcagataccatgtagatggatacagattgttgactcttttgaagttgtttttttcttatattttatattaccattaaccaataaaatctggcagaaagtctgctattccattggtaaagt

SEQ ID NO: 13305 - DNA, 1025 bp, Homo sapiens
cactgtgaagtttccctctaggtggggcagggagtgaaggaagggagtttcactgtaagggtggaaggatgctgtaagaaattatgtcatcgtggcagttcttgtactaacagctctttctcgagtgagctgagtggcggatagaccataaatatattctatagcgagtgcttctgcacgtggaaaagcaaactgcactgccttcctatggcataagccacgggcttgttaggagagtgatgaaagatagaaaacaaactacaagaatccattccagagggataaggaaactaggggtaggtcaaggttagtatctagagtctggataccctgtgtggttaaaaaaaaaaaaaagtacatcaagcattggggggaaaagatgcagattttaaaaattgttgacagatatggagtagaaatcttaaggcaacttcctagctatgaaaaggaaaaggagaaaagagaaaaacaggtttagaagagagaatcacttcattgtgtggacttggggtgcgtgtaaaagagcaaaaacatttgaaataatacaaagcatggatgataacggagatcactagaggagtgtgtgtgtgtacacacgcatgcgtttccaaactagttcatgtaattctatctccatatagaatttagatttaaagaaaagtaaggtgtggacggaagggaagaagatagggaaaagtacactaccttggcaaaggtgcggatttttaatgtttagacctttttcctctctacctctgtgtttgcagagatgtgaaaagtcagaaaatgtaaagatggcaaatttatttcatccttaattcaagaggaccatgtaaaagaatgtgtagcgagaaagtacggtcatagaatttgggggttgaaagtatctgtcgaatccaatactatgtggcttcaatcctgtttaaaaccaagatgattttgataaagaatgataacccatttccctaactatatataaaaacttcatttacttagtcttagataaccaaaagaaggatgaatta

SEQ ID NO: 13306 - DNA, 1033 bp, Homo sapiens
tgaatactgaaaaagcatagactaggaagcttgcaggaagtggagaaaggagcaggaagtagttcgaagtgctttagtgaactataaatagaaccaagtaagaatggatataatgtagaggagcccattgatctcctcagccccggactctttttttttttttttttttttttttttgagacggagtctggctctgtagcccaggctggagtgcagtggcgcaatctctgctcactgcaagctccgcctcccgggttcatgccattctcctgccttagcctcccgagtagctgggaatacaggcgccagccaccacgcccagctaatttttttgtatttttagtagagacggggtttcaccgtattagccaggatggtctcgatctcctgacctcgtgatccacccgcctcggcctcccagagtgctgggattacaggcgtgagccaccgcgcccggccctcagccccggactcttatagggcatgtgacttgttccaagaatgaacctaatctttgctgaacacattcttctaagaaagtttttataaatcactacgtttcttattaaacatacctagaaccttatttttgaccaatgatatcattagcaagtagattatcttctacaagcagagaaatgaagggataaggatagttgccctttaaacaggaaggtcttgtcttacaaaactcaaatgcatgtgagatgaatagcactgtttatatacgtgtcatggcttccactggttttgcaagacctcatttgatgatctaagtacatgtgatcattcttcagggagaaatgcctatggcaccttttttgtttgtttttaatttcaaaatttcagatgttagaccagcaaatactataatgtgttcttgaggtaagatatagtgatgcatttttaatatgatttttgtttcctctattccttttttctatcatctaaaacttattttgtaatgatgtacttaaaaagttatcagcttctttcgatataaagttattaattgtgaaaatgacattctcat

SEQ ID NO: 13307 - DNA, 1051 bp, Homo sapiens
aaattttattgtgtatatttgaagtttacaacatgatattgggttcatatacatagtaaaatagttacaatagtgaagcagattaatatatctatcatcacatagttactttttttgttacaagagcagctaaaatcttatttaacaaaaatttctaatgcaatatgattttattaactttagtcttctacttgtttttcctatacatctgctattttgtgtcctttgacctacatcacatcacatccctgctaacctctgtttcgttctctgtgtatttgagcttttccatgtatcagtgatattatacaatatttttctttctgtgtctggcttatttcacttagtataatgtccttcaggttcatccatgtagcaaatgttaggatctcccttttttaaagccgaataatatttctgtgtgtgtgtgtgtgtgtgtgtctatatctatgccaccttttctcccaaccaagtactaacaaggtccaaccctgcttaacttctgagatcagataggattgggtacattcagggtactatggtcatagactataccatgtttttatccatttagccatctatggacatttggtttgtttccatatcttggctatcctgagtaatgctgcagtgaacatggaagtgcagatatctttttttttttttgagatggagtctcgctctgttgcccaggctggagtgcagtggtgcgatctcggctcactgcaagctccgcctcctgggttcgcgccattctcccacctcagcctcccgagtagctgggactacaggtgcctgccaccacgcccggcttattttttgtatttttagtagagacggggtttcaccatgttagctgggatggtctcgatctcctgacctcgtgatccacccgccttggcctcccaaagtgctgggattacaggtgtgagccactacgcctggcctaaagtgcagatatctttacaaggtagagattcatctcctttacaaggtgattgtctcctttggatatgaattgctgggtcatatggtagtctattgttaattt

SEQ ID NO: 13308 - DNA, 1075 bp, Homo sapiens
tcatttgttttgagacagagtcttgctctgttgcccaggctgtagtgcagtggtgccatctcagctcactgcaacctttgcctcctgggttcaagcgattctcatggctcagtctctggagtagctgggattacaggcatgtgccaccacacctggctaatttttgtatcttcagtagagacggggtttcaccatgttagcctggctggtcttgaactcctgacctcagatgatccacccccttcagcctcccaaagtgctgggattacaggtgtgagctactgcgcccggccagtgatagtgttttgaatgtgttctttgtgatagtgcggtccagccagtaaatcataggcaaagaggctataaattttatttctctctgatatttatgtctcttggccttattttttttaattttttgatctaccataatttctttttttcctttagttgctttgtatcattttaggaatttttcctacacattacatcttgaaattatcaaatcttattttgctttgtcatcaggaacattaacaacagactaagctgtagaactgtaaacttttcagcataagaccttaacatactgaacctttccagttttttatcaatcgaacttacatgaataatgtccatttattctgatagtgttacttaaaatgtaatttagaagcacaataataaaattcatattttgagcacagatacatttgttgttagaagcagtctattatttttttcttccataggcaagagataaaagaagcagtttcttaactacttgtaggttttctatagacatcgtttgtttcttttattgcaggggatcaggaaaatgtttctgtaaaggactagatagtaaatattttcagctttgcaggcctttaagtgtctgttgcaactatttgactttgccttgtaaacagccatagacaatacataatgaaattttacttatgaaaagaggcagtgggccagatttggcctgtaggctgtcatttgctgaccccgctctattggaagcagaaagttatggaaaaactataaacaaaacaataaaatcatctttctc

SEQ ID NO: 13309 - DNA, 1050 bp, Homo sapiens
agaccttctctgaggcatagcctctgagcaaaagcctaaagctgagagtggaacaagagcattgaaaaagaaaacatcctacaacccaacttccactctaagcacaaggttatgccagataaattttaaaccaatggtattctcaaggtaatcatagcaacaataaaacccaaacagtaaactcttgactaggttggcttatccccatacactaagttgtagcagaagatgagacacgcccatttttaggcatacatattatttatcacagtctctatactcctagagaaggtgtctggcttttaaccaaaagcattcagcagagctagactcatatatgatctagatgtcaaactatcagacagggaatttaaaataattaaatgctcaagtggaaaagatggaaaacatgttctatcacatgggtaatatcagcagaattggaaactattaacataagaaagaatcaaatggaaatgccagtaatgaaaaatacggtactagagatgaagaatgccattaacagattcaccagtagactcaacaaagttgagaaaagaatcggtgaatgtgaagataaatcactggaaattacccaaacttactcacaaaggggaaaaaaatagtggaaaagagggggaaaaaccacacaaaacaaacagtgcatccaacagctgtgggacaatttcaagtgatgtaatatgtgaaaatggaatcccagaaggagaagagagatggaaagatatgatgggggtgggagtgggtgaggggtggggtcttgagacaaaaagtatttgaagggtaatggccaactattttccaaaaataattacagacatcaaaccacagcttcaggaatctcagagacactaggtaggatgaatacccttatcctccaaaaaacaaacacacatatatacctactgagatacattaaaattcaaagataaatggaaaatgttgctgaagaacaaagataaatggaaaatgttcaaggcagccacatgaaaaagacagagtagatactaagaattcataagaattacagca

SEQ ID NO: 13310 - DNA, 1074 bp, Homo sapiens
ttaggattactaaatcaaagatagcaactatgtactataaatttatagcacatataaaaataaaataagacaatagcacaaagggagggagggagaaattgggataatactgttgtgaggttcttatactacatatgtagtggtgtaatactgtttgaaggtactccgtaactaaagatatatcttgtaaatcctcaggcaattactgaaaagcttaaaaagtataaacaagaagcccacagtacagataaaatagaataataaaaataatgcaaaaagcagaaaagtaacagagcagatggaaaaaataaagaactgacaatgtagatttaaatccagccatataaaacatcacatgaagttaatgaaatgtcagtataaagactcaaatgtctataaaccctcaaattgaaagaaagatcagtttagtaaaaaagcaagacacaattatatgctgtttacaagaaagtcattttaaaaaacgtaagaagataacaatcaaaaggatgggaaaagatgaactatacaaacactaaccaaaagaaagctagagtagttatattgacatgaagttaagtagacttcagaacaagaaatattcccagtgttgaagaaggacattacataaggataaagaggttatctcaccaagaagacatagcatacacgtaacagaaagtatgtgtatgcagctaacaattagagcctctaaatgtatgaggcaaacactgttagaactgaaaagagaaatagacaaattcacaattatagttggagatgtcaacactcagaatcaataaaaagatacagaacattactaaaaaattgaagatttgaacaacattgtcaaacaacttgacccttttgatatttgtggaacacttcagaaatttggaatacaacagttgaatatacagtcttctcaagtgcacatgggttagttaccaggatagaccatattctggattaaaaaatcaaccttaaatttttttaaaaaatttaatttatacaaagaatgttttctattcatagtggagttaaactacaaatcaacaatagaaaaatatctggaaa

SEQ ID NO: 13311 - DNA, 1041 bp, Homo sapiens
ctgagcccaggagtttgaggctacagtgtgctatgattgcacctgtgaacagccactacacttctgcctgggtgacatggcaagacgtcatctcttaaaaaaaaaagaaaagaagacactatataacttttaagaaagaagtcatttcaaagttcaatttgctctctgtgggttcttgcattggtagattcaaccaactgtggattgaaagtattagaaaataaataccaatacaacaataaaaaacaaattttgaaaacaacataacaactatttacatagcatttatattgtattatgtatgataagtaatctagagatgatttaaagtatttggaattgtgtaggttatatgcaaatactataccatttaggtagagtatgtcaaggggcttgaacatctcaaaattttggtatgagatggggccggtgtcctggaaccagtcccccacagatatggagagatgactgtaactttatttttaaaaataaggctgtatgattgtagacattgtgcaagttaatttctataggatatctatatttaacagagaatggtggtagtctttaatgtattaattccctactctaataaattgtaaggttaaccaatgaaaaggactgagttatttctcttttgttatcaccctcccttttccttggggcctcatatagtttctggcatatgtaaaggggaagaagtacatattttaaaatagataaaatgactccttgtggatatagagtagagcattgggatttagaggtggatttggaactgattgaacaatcagattaaaaaaccattaactaataaattattgtctacctgaagtaacaggaatactttgaagcagttttagaaattttattttgaagtaacttaagatgtttgtagaagttacagaaatagtatacagagctcccatacatcctcccacagattacccagattcaattcatatttctgagccatttgaaaataagttgaagacatgatgccccattatctttaaaacttcggtgtgtattttctcaaaa

SEQ ID NO: 13312 - DNA, 1033 bp, Homo sapiens
atttacatagtttctcaaaatatgctgtgagaaacactaactttgcaggactcttaatgggtaagaaagatttgaagtcaagtatcttgaaaatattgggttaaacaatttttttgaaagttacaggtatatttggagggggggcaattatagaatgcctcagttttttcaaaaaatattccatgtattatgaacaacattttctaaacattttagggagcagcacttagagctagccttctttggcacacagtttaaggtggtagtcccttgtggaacagacagcttgaaaacttttcttgcttctctcttaggtttatgtgtaaacttctagttctcaactctattccctacaatactttgtttagtcactttcttaaaacttggcacttgtagaaaagattaatagtttactttgtgtgaaaactcgtggagacactaagtttgataagttgtgggttatttctgtatactgctgttaatgaccgtgatagcggggaaaatagaactaaaatgagaactagaactaaatgtttttgcttggtggacttttgagaacatcatctttcactgggtataatggtttgctttaaattactgaaacagatgagcttttataagccccataatacttaacctgaatattttcaatgttcatttgtgagtaaagcagaaattacctgtattctatggcaagtcgaagtttaagctatcttaaatgaaaactatctttgattccttataaaaatatttgaacgaatctgatttaaatttattttattccatctttgatttgtgtgcaagccttatttgataagctttatcactgggctgtgtataacatacaacctgcttatttaatgaaaatagtagagcttaaaaggtatttttagacattaatgtttgtctactactgtatctttcaaaagaagcattatagggcttatgattcctctgttggtgctggtaagaattggaaagaggcatatttccatcacttttttagaactttcctattcatagaaatttattt

SEQ ID NO: 13313 - DNA, 1047 bp, Homo sapiens
gaaaatattagttaatgctgggtttcagacttctcctctcctgtcaaggcatttgttaggtctttcctttcctgccaaaggctcagagtgttttcccccagcgtaggtgccatctgtctgctcagggactcttgtttctgcatgtggccgaggagcatgggtggcctggctgagaggcagtgaggctggttttctttctcaccctctcctcctctttgtgactgccttctgtggttgttgggcagctcccccatcttgctgtctctcattgtacctaaagtcaacatctttttcctgatttgtgctctttagtctctgaaccttagttaaaacttctctgtatgccttgagcagtagtctgtcttttcttttaatcattttgcttttaggggaccttaaaataaaaaaaaaaactatttacgaatacttactgtcatgcatgtcatacagtgggagaatacagaaaaagatgtgtaaaatctttatggagtttcctgacctcaataaagtttcaatctaggacggaagagaagatgagcagatgatgatgccataaggcagaatggtgtaactactgacttagtcttagaaaatccgtgtcacagaagttatgggggagaaagactccctttgggacagtcatgtttggggctgacaggggaaagacgtaattggaattgttaagatggagaaatgaaggctctgggttcttttgtctaggtaaaaccaaggattcaggtgtgagaatgaaggggcgaaggggctcgaaggtaggtaggaaggcctcactctgcaggcagaatggatctctggaaggttttgagcagtgtttgtttttgtgaggaagactgttttgatttttaaggaagaatacaggcaggcattgaagtgttagggtagtagaggagattaaggcagaacaatccataggagaatgttgagtgtcacatctgccagagaagcctagaaccagagtggagagaattacatggatttggagggacagagaaggttcattctgatgttgagtctgggacgttgggagaa

SEQ ID NO: 13314 - DNA, 1061 bp, Homo sapiens
aacttccatcttgctccttggatcacgggctctatcaagcagccctttggagatgtccatttggtaaagaaccaaggcttcctgttaacaatcagccctgatttgtcagccacatgagtgagccgccttggaaacagctcctccaagctccaggaaagccttgggatgactgtagtcatggctgacatctcaattacaacctaatgaagggtcccccaattcagaactattcagctaaggccactcctgaattaccttcagaaactaaatgaaatcataaacacctattcccttaagctgcttaatttggggataatgtattatgcaccaatagataactaatagggtactacagtgaacaaatacaaaccttgattatcttggtagatctttgtggcttccccatcctacctcagtggtaagaactgctgttcctgatcattaagctctctaagttaccctagcccactccaccccacacctgttatggctgctttataattgattcaaggataaggggtggaagggagattggagacaatatgaaaatcttaaagccatgtgtctgttcttgcctgcctctcaaagggccaattttagaacctttaatttgtagtgtctccctttattcatagtcatagaaaaatttaaagcttaaaggagctattagatacatttagggctcattgtttctgtgtgtgtgtgtgtgtgtgtgtgtgtgtgtgtgtgtgtgtgtgtgtgtgtatgttggtttgtctttgagaagccacttttggtcctgaaagtacagggtttacagatgtttagagcaggattttgacatgaagtattttatggaagttgggtaatgaaatatttgtgtgatgggttgggccagggagggttgggctcctcttcttttgcagagaaaaatgattgcccttgataatgggttacagattcacaaactgctcatttcagggatgaggaaaatggggccagaaatgttaactctctttccaaagccacacagttgtttagggacaaagttaacttggagtcctggtgactagtccaattag

SEQ ID NO: 13315 - DNA, 1048 bp, Homo sapiens
ttaaaaatatataatgtggagactcctttgggtcaaaattcttgtcctgtcattattgtagatcaaaggacttagtgttggttagatcagtggttctcaactgggggcagttttgccaaccaggggatgtttggccacttccggagatacttccagttgtcatagctgggtgagtgtgctacaggcatctaatgggtcagggatgctgctgaatacactttaatgcacgggatagcctccacaacaaagaattttcctactccaaatattaatagtactggagttgagaaactctagctttagatttagaatttcttgtttattccctccctgccagcaaaatagtcatgtggaaatgaaggatactgactatgacacctttgacactctactaaaatataacttttatatacagacataatttatgcatttctgtgttagtatgtttattgtctgtttaaatgggaaggtgcattgtaacttgtctgagagtgtggtaatatgtgtgagtactttgaaattattttgcatatctgtatgcattaaatttaacaaggtgtagcaaatgatttgattatttaaaatgctgtattataactgcccagactgaatctaccggtgcatagacttgttgttggccttgctgcaaactcaatctaatcatgacgcatactgagagcaaataggaaaggacagtcgatatcctctgtgctggcaaatgaggggaacttttttgttagtgggcagtggtgatagttgctgtatggagcccaagcagagttgtgtatgttgaaaatgagtggcaatagcagaagcaagtaaagagctgttgttaatgaatagtttcaataatccaggactccaactgtttttcagttttctagctatctgaagtttacaatttaattcacagtaataacttttcaccaatcagacagagctagagtattctttatatttctgtaaattatcctcttatgtgttctaattttctaataattattttactttgtaggaagcagtagttttaattttttcaagtgtgttt

SEQ ID NO: 13316 - DNA, 1097 bp, Homo sapiens
ccatttgagccagcagtcatctatccagtatctacctaaagggaaagaatatcaaaaagatacctgcagtcatgtttattgcaacactatttgtaagagcaaagatacagaattaacgtaagtgtccatcaatggatgattggataaagaaatgttgtggatatatatatatatatatacatacatacatacatatatatatatatatatgccatgtatatatatcggatatatatatatatatatatatatatatatatatatatatataacgttaagtcgtagtaagtgattgtgtctaagggccacaagtctttttgaagttagttcattcataaaatcgtgggaattacagaaccaggaaggacttatctcgatcaacatttgaacttctgtatagtcatttcccttgcctccaggtgcattgttcattgttctcttccttgtctcccactcctaagtcaataatttgacaatctcgtgtttgatccctttttatactctattgaaactgtaagaagaaagttggaattatatgatttgaaagctttttaaaaaacttcttggaatagcttttatgaatgactttgataacatacccattttttgctaccaataacttcgattgtgatttcaaaagaattttaatttctgaagactttaaaaaattgacataggttaggaggagataaatatagtgtaaaaaagttattagccttcaacagctctggagcacgttatcccacaattctaatcgaggtaatacatgggaacatctaatattagttcagagtgcttcatcatgcatgtcatacagttgatgtgagtgttcactgttttatttgaacttaccagaaagcctctgagagagagcctctctagggacactagtaaagctctaggttgattttcctatcaatttaaaaattgtagtgtgaattgttaatttgagaaatgtgcacttttaagaaatgttcctttgttaagaggtaaaaatcagaataccagagctggaaggtactaaggacataatctcattcagggcagtccttttgcatgtgagaaaagtgtcccagatgaggtgaggtggcgtttgc

SEQ ID NO: 13317 - DNA, 1104 bp, Homo sapiens
aaaagtgttcctatttctccacatcctctccagcacctgtagtttcctgactttttatgattgccattctaactggtgtgagatggtatctcattgtggttttgatttgcatttctctgatggccagtgatgatgagcattttttcatgtgttttttggctgcataaatatcttcttttgagaagtgtctgttcatatcctttgcccactttttgatggggttgtttgtttttttcttgtaaatttgtttgagttcattgtagattctggatattagccctttgtcagatgagtaggttgcaaaaattttctcccattttgcaagttgcctgtttactctgatggtagtttcttttgctgtacagaagctctttagtttaattagatcccatttgtcaactttgtcttaaactaattagaattaaaaagtttcatgtgaaaatttggtaacaaaattcagctgtgaactatgagcttcactgtcataaactgttggcattgattagctgtagatgaggattaaaagggagaattaggagtaggtgtttcattttcttcagccaaatgatcctcatatgctgtgaatagacttttaggtcagatcaactggggcttgaattataacaatataataaaggtgacttctggaaaattgcttaatctcattaagcttcagtctcacctctgtaaaatgtgaataacactgaatatagaactgcattggtgataaaattaagctgcatatgaaatgtgtagggcaatgctgtatagtacttgtgtttattttctgttgccgctataacaaatgaccacaaatgtagtgacttaaaacaacacaaacttactctcctacatgtctctagatgtcatgtctaaaatgagtcttaaggggctaaaaacaaggcatcagcagggttggtttcttcttgcagctccaggggagaatccacttctttctgtctcttctagggatagccaagcattccttggctcctggctgcatcactgctccaatctctgcctctgtggtcacaatcccttctcctctacaacagtcgagtctccctcttcctccctctcataaggacacttgtgattatgttt

SEQ ID NO: 13318 - DNA, 1060 bp, Homo sapiens
ttaaaaaccagggtccctgcatgctttccgtgtgccatgcaaaggcacattatccgctttccagctcatctgcatgatgcttaaacatttgctactctcaagtcataggaaagctgttttaacttgattaaaaatctctttgcagctttaagcatgttgaattgtaactttcagaaaaattttcatttgtaaattaaatataactttataatgtaagcagctctcagaaatagttgcttttcttaaaggaaataaaagtacccagagtacaagtatgtggtggaaatgtcaacatgtacaaccatttcagtggctggatgtgttccctgtagtgaggggtaaattatatgactgagttagagaagaagacagaaacctaaaaccaaagcttgaaaagctaaagatttttctggattagagctaacagcagcaaatgttttctatcccaagatagttgtttcggatagtacaatatttgttttaaaggctgttgtgcatgcagttcaatgccaaggtaactacacaaataaagcaagattgtctgtaaattgagactgaataatatatgacatgtcaaacagtgggaagtattataatatgaatgtgtcctcagaaaattcaagtgtgttttggaccacttgaagtcaaataagtcaaatttataacaaaggatttctctctagtctgtcagttaccactactttttctttttctttctttttttctttctcttttttttttttttttttaagagatggagtcttgctatgttgcccaggctggtcttgagctcctgggccgaagcattcctcctgccttggcctcccaaagtgttaggattacagatgtgagccatcatgccctgcctaccggtgcttttcttaagtagatctgctgcagtgaaaagaaaatagaaatttaaattggattaagtgtaggcttttaatctagaacttgtttcatatttatgctgggtgatatttctctgaacataatgtacgttgtcaagcttggcatacttacctggaaaagcattattgctcaacatgctgtcattgaa

SEQ ID NO: 13319 - DNA, 1050 bp, Homo sapiens
caaagtagggattgaactctgtttgtgaaatgaaagagactatgcatctgcgcgtaaccatcacaatcgtgtttctgttttggccttaccagtgaaacatgtttcgcagaacagccaggtttttggagtgagatgaaaacgaactggaaacagttcctgatctatctaactgtcacctaattacaagcatttagcattctttatgaagtgtgcaatgaggcagatactttctgggaaaacaaaaatggggtctatcttattaggtcaggtttttgagacagacacatgagataaaggcttggtacagaaacgctggctataaaaagcaaaattagggcaccttggcatccagttggagtgaatagtttcagtgatgtaataagatactctggcacattctgtctgctagaaagggtgtatagaaattcaggtgtgcccctgctgatgtgatttttctgtcaggaccttgcaaaatggaaagatcgtcgaaaaagttacacttcagatctgcagaagaaaaaagaagagagagaagaaattgaaaagcaggcacttgagaagtctaagagaagctctaagacgtttaaggaaatgctgcaggacaggtaataatgctgaatgcacctcggttgtaacagggttggagatgccagtgttataaatagatattttatgtaagtgtagtgtgacataggtgtccaccaatattcaactttagtcaaatatgcaaagaaacgtttaagattttggtctgcggtgaaaaaacaaagcattgttgaaatagtgacttagagtaatagtaacaaaataaatgaggacttaaaataggtgttcattatttcttcttacattgtgcattcacatgcagaattggatggtgttggctgtgtctgatgcaggaaatacactgctttttactcttaagtgaattaaggaatgagatggtccaataaaatcagctcactcttttaactaaattgtgtaaaatataacgaagttctttttcatgtttaatggtgcaattcattatattttaaagaaagtttttat

SEQ ID NO: 13320 - DNA, 1050 bp, Homo sapiens
ctcattagtaagaaggcttgaaaaatgtgacttgcagctgtcatgttgtgagtagtggcaagtaaaaaattgggatttggtagatgttgtaacatttgaaattctttttttttttttttttcctgttaggccaaactatgagatgctgcccagtttattaataaaagaaccctgaagcttcttcagaaatatccattgatcctactctaatacctagagctagggtttattttggcatctgtatcttccttttactaactttgaatttgaaagatgagtaacagatggaactgttacacctggagaaaaaaggatttactgactattgtttaaaaaaacattgtcacttagtatactggcatagagacagctaatgatagaagtttctgaaaggaattatttcatagaaatgaagacttatattgtatatttttcttccttgcccatgtgctgcaacacaggaagctctgattcggtggttcctgatgtaagtagcattcatttgtcatttggaataaggtgaacttggtgggactgaattagtacaccgtagcatgcttaccatgattttaggttgcataagaatttatcagagagttatccttccaagttgaaaaacttattttaaaattcaaagccagctctcccttggtacagtttaagcaaactgtgatatgaataatttatgtgtgcaaaagtggttcagtagatgacttaatgaagttatgttgttctctatttgcatctcttctctgataactggttagcttccagttccaaccatcagtgccccgagtcgctgggtgtgggatcaagaggaggagcggaagcggcaggagaggtggcagaaggagcaggaccgcctactgcaggtagctctggctcacgtggacgggtagaaactaggttggatttcacggcttttctccagtctgtcaaccagtattgagaaactaattttaaacgcaacaatctcacaactaacaaatatttttgcacacagtacattttccataaaacaattacttttccattttgaagatttccaga

SEQ ID NO: 13321 - DNA, 1023 bp, Homo sapiens
gaacctttaaatcataaaccctgccatgtcatcttgcttcaccacccataacactccaagtcacttcctgtcacatcagaaccccatccagcatccttgccaaggcctagaaggctgccatgagctacattaccttgtagtacctctactcttccccttactcactctgttccagccccattggcctcctgtttcttccttgaaaatacccaaggacttttgtattttctagttcatctgcttggagaagtcatcaaatgtttgtgtgtcttgtgttctcattttcttctagtttctgctcaaacatcacctccttagacttttctagaatacctgatttaaaatacaggccccttctcactctttctctctgtatactcttattttatattgtgcatttatttgtttatctgttagcctgcctgctgcagtaagatgtaagtgctataaagtcagtaagtttgttttgtgtactcctatagcccattcttagagtggtactggaatatggtggggactcagtatgtatttgtagaatgaatggcttgcaaatgtctgttggcaatagtgggtctattttctgtggttattcattgaaatacctttgtatgtttagtttttaacccaaagaccatttgcataaagaggctagaatgacattattttgatacccttttcttaaactcagggaagggcttaaagtctaatattttgacaacaaaatctttttctatcttttaggcctgttgattcctatgatataccaaagacagaagaagcatcttcaggttttcttcctggtgacaggtatgtagagcatgttattgtaatttaattgatgataatggcttcagacaatattccagagcttgcatcgatgatttgtagaactactttagccctttgtcatttgtggggtataaagaggaattgctggttgatctttgtatcagttagcttttgctgtgtaacaactattcgtgaacttaatgaattagcttatgattttatggtcagcatgtt

SEQ ID NO: 13322 - DNA, 1049 bp, Homo sapiens
tcaaaatatatcctgactccaacctgtttcagtcatttattgtatgacactaacctaagtcattcaggtatttatctataatttgttctttttcccaaaatattttattttttaaagcagttttagattaacagaaaaattgaccagaaactataggaatttcccatatattttgttctttttccatcttttccatttagtttaggtctttgatacttctgaaatttatttttgcacatggtgtgaggttgaattttaattttttttcctttgtcttttatatttagcaagttttcagttgccttcaatctgccaccaaggcactcatctataaccagtttttcaatggtattttagtgctcttgttacgtgatgatactgcaaacattgggaatccagtcacagagctagcagctggcttgtctcagtttctggttgtgaggctgtgtctttgttaccctgtcgcctgaggcatgagtgagcatgagtcttgtcccctatcttatgcaaaacccttttagtcctcattgatccctaggaatgcaatccccatgactactattgacaggaggccatgaaacctggacatgaggtccactatttttgttctgtatctgatctgctgaaatggccaattttgtctccttctttttatctgtttatattttatctgttcttgttgcttgtttcaactagaaaagttgggtgaagtcaggaactcagagctgtctagattgaaagtcaaagatgatcctttggcaatgtcctttgacaacaatgctttaatctaaacaattagtttcaaagatgatgtttccagttcctaaggtaggctgataatgtattgtgagccagaaataagcttacatgtcttcttatagcatgtagacagcatctctccaatctcatcaagagcacttgagagtacttggctgatttgagagagagaaacaaggtaacattttcttctacaactagtgttttcatatatgtccttgaaaatgttcttaatgatataaaaatgacctcaggataaatgactttggatt

SEQ ID NO: 13323 - DNA, 1023 bp, Homo sapiens
ggtcaggtttagtatgtaaattctgtttaatcttctgtggccagtggttccaatatagttttcaaagactttgttattttgtttgggtctatcctggaactcagggtttagggtgagacttgggcattgttttatactatagattattgtaaaaatattttttatgctaatttgcatctgttttgcatatacagtatgagggtgagcccagaacttgagccagttcacagataaaagtagggaatcctcttctccagttcttccttccgaggagtttctctgtgggtacattgctcctgtcctctggctaaaaagctgaaatttcactcagaattttagtttcctatactttcctgtagtttcgtatggctttaaccttcaggaaaaaattgcaagaaaaaagaaaaatgtaggaggaatcccccctactcctttagaacacagggcctcttggttcctctggccaaaaatgaacttggattttgttgttattgctgttttgggtgttcatgttgttccaacagcagtgcagctttgtgagtaggtaaggcttccaacagagctggcagaaagaagaatacaaaacaaacaaaaacacgtggtaaattatccctacccttttgtccacagagggcctatttcccaaagaagaatttatttcagaatttttataatttgtacctgctgtgcagttttgtatcctatgcagccctccaaaagataaagagcagagagaaaaaacaaaaacaatactgtaacctcacctccataatggttgttctttaagttttgacttacttttcaattcttttgctattgctgacttttcagagccctcatgtagttgctttccatatcttgcctagatatcttagttgtaatcatgggaggagataagattcagtgggcttacttcatcttgacagaaatcagaagtctgtgggaatgtttaaaatttttgagtaattttcttaatacatataagggaatatatattttctatttctgtaattttgttggtag

SEQ ID NO: 13324 - DNA, 1017 bp, Homo sapiens
cttatgcactgaaacagtgcaagttctttacctagtgggagctttctgaaactataagcccatgacacctgaaacctgcagaagtatagtcatttgagatgctgtgcactttgttgacagtgaaaatatatcatttcctgaaaagtgtcttttcataaagagagagaagctgtagaaactccatcactacagaagacaaagtaggttgttccttctcttacttgtctaaattcaaagacagcaggaaagggactccttgctccccagtgctgctccatgcattgcattattttaggcctgctctcaactacctaacaaaagacttacttgtttgaagttcatacctaaactatcctttctttattttgctatcctccgtggccagcgttcatgtacctcatttataactactgttagctcatagtattttttcccactctcttcctgttcttggtactagaactacatttgctggaactatctgacctgtgaacaatttactgttctttctattcaccctgccctacttacacacacattggaccacatatatatacctgtagagatataattgctcattcctgtatgtggtcagtattcaacaagtgttaatttcttgctctagatgatactggaatggtagtttggagatatccttagaagttcttgtgtactgactcatgctgtttaattctgtcagtgctgtgaaaccaaaaaaggcttccaatcaagttactaattgaaacttaacaaatgttaaactggaagcaagacattggaaggatgagaaggagacaaaagctaaaagaagtagacaaattatgaaggtattgaaacgtctaaaagataaataagcacactaaggctaaggcaagagtgatgtcaggaaaaatgcaaggaacaaaatggattgtgaaatccttcaaggtaaaaaaaaaacaactcaaaatataagacctggaagttaactggatatgtaaagaaaagcatgaggaggaatcaaccttggcttcaaat

SEQ ID NO: 13325 - DNA, 1052 bp, Homo sapiens
gctagtaactggcttgtgttctttaagcatactaacatcactaaatcttaggatttaggattgctgtaaagatgtaagttgtgtatgtttggcaggtcacattgaatggcagtgataatgattaatcaaagaacaaatgtcatccttgatcttgcctaatgtagtttatgtgccaaactttccagggttttgtagtcacctagattttaagctgatagcatagtgcttcagcggttcttctaaccggggtatgcaggaacatggctgcagacacgtttgggtaaacaggcaccttctgacttcttcattgtttcctgtagttctccctcttcccacaaagctgtcagcgcagtggaagaggttgcacttctccgagagaggacaggtttctgttaagatcaccaagtagctgtgctttaattagagccagacaagctttcaaggtcctttaagtatttgatgatcaactgaacacgtttctattcaaggagaaaacaccattcagtaagaagatggagtagatatcagataaaacaattcacgtttaatatgtaaatgtaccaattatgtgattcagtttcaactttcaagtacttcctgagaggttagtacattattattgagctctcacagaaagcttaatcatagatataattaacctgatccaaatgagtaaagtggaccttagaaaggctaagtgatctttctctggctatccagctagtagtaatgaagtcaggtcttgaaccccggttctgctgactgaattggatgcactatagtacaggcttttagcaccgaagtgtggtcctcagaccagtgcctgccaaccagatgttactggtctgtgaggaaataagtacagatactgacaggaagcttttataaacaatttattggagtgtttttgtttctgttgggtctaattaaaaaaattggagcttgtattttatgtgtctttggtcttattttgtctaggaattcatttttgctgggtttttttttttcaactgtagtcccacaacagtctgaaaataacccagtcaccagat

SEQ ID NO: 13326 - DNA, 1043 bp, Homo sapiens
ccaacagtgtaataaaaccaagaaataaacaaaaccaaaacaaaacagtgataataacgtgcctgatcctctttttcctctttttcttttcccacggcatttatcacttcctagcttgttaggtattgtatgtcagttgtttagtgtccatctcccacctggaatataagaatggcaaaaacatgaatctggccgggtgtggtggctcacgcctgtcatcccagcactttgggaggctgaggtgggcggatcaccggaggtcaggggtttaagatgagcctggccaacatggagaaacctcatctctactaaaaatagaaaaactagctgagtgtggtggcgggcacctgtaatcccagccactcaggaggctgagacaggagaattgcttgaatccgggaggcagaagttgcaccgagctgagattgagccactgcactccagcctgggcaacagagcaagactccatctcaaaaaaaaaaaaaaccaaaaaacaaaaacatgaatcttagtctgcttggttcaccaatcctaggctcctaaaccagtctgtaaatgtttcttccaaggatgaaagaatgtggcaaaacaggacttatgttttattacatggcgtagttacctggacttaacccaaaataaatctgtcctgaggaatagatagggacttagatgtcacagaagagggaagactcttaagaggcaaatgggaagatgatgagagaacacagtcataagttagtttatgagtcagaggacccatatcatacaaagaaccctgttcttttgtgattcaccaatttcttatgttccacagtgaatggtaaacctccatatagaaacaggggccatccaagctgggacagtctttcccctgggaatttggaattaataccggcagaaagagagtagtctgttccttgggtccttagacttgtaacacatcaacccaggagctataggtgatctttttaccacatggtctgcaaagcagagaaaggtgctctgcactgagaaagaagaagagaaaatagacgcataga

SEQ ID NO: 13327 - DNA, 1058 bp, Homo sapiens
acataattttattattacattttatgcatcaagattttgtttgcattgcaaatctttttgatgaagaaaatatcaacagggtttaatttttaaagtttaacccacttgttaatgcttgcaaagcactctgttcctttatcactgcagactatagtgtcccagtagtgtggtctcagaaataagagtgctgttcatttggttccctgatatgtttgcaggatggcaacttatttttatttcctgtgtttattaagaaacaactggagtgggtatatagtaccttattttaaaaatatttaaaactacaagttttacatgctcattgtaaaaaaactaaaacatagatgtaggtataaggtcacaaaaattatcttccttgtccccaatttattaccgtgactcagaattcaccctgttaatactctgcagctccttcaagataaaaaaatataattacaacaatcaatatacaaacatatacacatcagttttttttaacacttgcctttcattgaacatacattggacatttgtgtattcatgtgacatcacatctcccagtaacaaaggcatcattattagagtaacaatattaaggaacaagttactgttaactgtatcacctacagtttttcatgcattttttattgtgatttcatcctaatgggttgaacaaaatgtgtttgcttatttatttagaatagcacttcctgctaaaaatgtcataagttcaggaaagtttacaaatgtagattaatcactggatattttagctattcttttatgtaagtatatcttttctaataaaaccttagaatacattattttccttttattaacaacttggacaatatttgggttaagagttatgtgtgtaaggaaaatcatgactaacagaaccaatattttctttatgatagttcattagttaatgattaaccaggtctttgagatcatttttctgaataattatttaacctataagtagtatcttaaaaaaaacagctttaaagagaatggagtgttatgctctcccttttgacaaaaaagctttgatg

SEQ ID NO: 13328 - DNA, 1080 bp, Homo sapiens
tatctgtcttatcccattgctaatctgtttttattttgttttcaggagacttcttcaacttgatattccaaactcatttactgactcttttgtttttgctatgatagtttcatttcccaagcatgaataaactgtttttttcaatatccatgtgtatgtgtgtgcttgtgtgtgtgtgtgaatgtaacattttcttttagatgatataaattatattcgtcttgacattttcatctgttccctgcattgtttttctctttggttctctttactccctctacttttagtctcagtgtttcatgtaaaaggaatatttcacatatttggtgtcactggttgtctgttcatacccaaaggaggtgccgaagccgatctaaagctcttaatggatggagctccttggtgcagtttactagtgattggatgggtagccaggccacattcaagcatctctaggtcttctcttggattcatctttttctctatgcataaaccttctatactcctaggagatgtaagcaaggcagtcatttctaggaatataaagaaagaaatgggaccagaattctaacgagtcagcatgtggacttccatttaatgtttggttaagtaaggtacctcatttatccttcagctaagtttggtgtgcctgaagtcagggcttctctggatcagcttattcacatagcaaagtctctgatctcaggttgagatgaagaggggtggtaggactggctgtattggaggggatttgggattccagttgtcccttaggtagactttcaactggattcactgcttttagtgccatgatcatccctaccttctatgaaatgcggagtgggaatgagatatagtaccagacaataggaattggactatggagtatgaaagagaaatctccataagtgaacatggcatagtgggtcacttagaaactgaatgtgcctgtagaaatgagcactgcttttgaatatgctgtgaggcagtgtggacaaatgaaatatttgtatcacataggccctaagtaattgaagacaccttactgtggtgttcccctacaaacaaaaaaaggactct

SEQ ID NO: 13329 - DNA, 1014 bp, Homo sapiens
tgtatatatttttcccaattattaaaaaaatatgaaaacatttcttagctggtgaattattacaaaagcaggagtgggctggatttggggtactctcggccacagtttacccaccccggcattaagtcatttgcacactagatagatttacatacatataagcattatgtcatttgcacactagatacatttacatataaggttaggtttttttttcttttctaaaaagtaatcctaattggtggttgctattgagatattagactaagtgcttcattatccgattttcctttcattgatgtggagctcaggcagaatcgtgaggtcatgaggataggaactggcatactgcagttttgttcatgatgtaatttatttaaacttcctgtaaaagtttagagaacgagtttttcaaaaccaaaattagtcttttacttaatttgtatataaactcaaaacttcttttgctgtgacactaaatgtttttattccagagatccataatccataatcctgttgagataagaagtaaccaattaggttgtttactggagaaaattcttttttaaaaaattcaacttatattttataaaatatagtttaaaaaatagtcttacaactgttataagacaaatatcaaattgctgccccaatctctcatgccctttttatttcccagatatacttaagaaaagctatttgttttggttttactgtttacctctctttttaaattccatgtttatatggccattgctttgaattttttcattttaaacattatccattggcttttgactttggatggtgaagatttaattcttttacacctcacttctatattttttctctgcatgtcctttctatgtaaccttttactacctttaggggacatcagtatatattatgatagaaagttatattcaagccatgcaatattttatcatttctttttccatctaacttttttgtttttgagacagattcttgctctgtgcccaggctggagtgcag

SEQ ID NO: 13330 - DNA, 1049 bp, Homo sapiens
gttttgttcattgctgtgaccctttctgtgcctggaataactcccatcgcactgtaggtgttgtatgctagttgttgaaggagtgaatatggtggaagttttcaccttaatagttatgcctcatccctgctccactgtgattgagatggttgtccttatttctagggccttgcctagtaagtggggacatttagcagatttcacagggctattttagaaagatttctggaaatattggatgtgaaattacttcagaaatgtggagtactacatatacagaaacattcctaatgtacagattttcatttagaaattgaacataaaatacagggaatcctctttgcctggctacttatacttcatagaaaactaagtgtgtttttggcagagggtgggtatctgttttctctacctacaaatacaggtatttgttagggatcttacactgaaaaattttgtaagtgtagtttattattcaacatagaaaatctacaacaatctctttagttggttgtttttattttattttttattagatctgtgtgtattccatttctaactcgcccatctttctaacccccctctacccctttagaataaaaataacaaaactgcatagaactttcatgggtaggattagctcacttgatatcctaaattgaaataaggctaatctagggtctttggtaaattcacgcatgaggctgggatgttaaataaccaaataatgatcaaaggcttatctaagtaatttgaaacgcccaaaatgtggctcagttaatttggggccagttaataaaagcttatcttggcttaaggtacttgaatgtctataactattgaatcaggacaggtcacatttgagcagagtaggtgtacttttcacaaatagtggaggcctacacaattatatccttggctcatgtttcgctatgaccatctgtcatttcctctgggattagatactaaggaaatgtgaatagaaattaccccattcattgagtttttcttttatcttcatatggtaccagttcccaatcttattttag

SEQ ID NO: 13331 - DNA, 1035 bp, Homo sapiens
attcacttccatcaaacaccgtttgaaaaggattaggtttctgtgaatcctgtgctgggatactcttcacaggaaagtggagacatatcacagtttaggtccctttatggtagttttattttgcctaaaatgtctagttttcacaatacaagaaaaatggaatacaaaggcaatcttctggatatgacttctgactaattagcttaatggttgagagcagaggctctgaagtccagtagatcctgtgtttctcaactgtctaaggttcggtttccctaactaaaatgtggacaagatgatatctgtctcttaggaaacttaggtataatttcacaccaaaccatctggtacacattttctccacctaaatatattataaggaataaatgaaataatgaatgttacattgcatgtagcctggagtggatgtgctaaataaaggttgtcttctccccttttgtttttaaacttttattaacatatgattcagatgtcctagcctgcatttgttactatagaatattgagcaaaaaactgaaataagaatggtaactttgaagctaatctattaaatatttttctaaattatcaaaataatatagatagaaaataattgtaaactgttgattcattttaaaataattgagaataaactagaaatgtatattaatatttactgcttttgtagttcctacactgcctagatttaaagagatggttcataaaactttctgggatatttctgagattcatagaattaaaagaagcataactggaataacttgctaaatatcaaaatgactcaacttgtagaatctttaccaacttttttataattctacggtatggcaggggttactggaggcatgatgtagtccttattatcatgaggacctcccctggagcctgtgttgcctggatgcctagatctagctgtttggtggacaatgagtgtctcctttagtcctaaagattcctgagtctttgttcatagagtgatgagtcttgctgcctctttaatgtgagcaagctcat

SEQ ID NO: 13332 - DNA, 1027 bp, Homo sapiens
gcccttcattttataggttttgctactattataaatgtaataatgcccagcaactcagatagataaatgacataatgaatattatttaaggaatatatctgtaataaactgtttgtacctacagataccaccttgtcttcttttctgtaattacaactattaaagtatctcctcattttattttcttggaaccaccaccaaagcaagcatcaagaaatcctaatgtctagcaagcaaacggggaagactttctcttgtgagaactcagacatcatcacatttgtaaaggaaaggaggctgtgcttagaactggcttctgcatatagccaggcactccaaaatgtggctgatggacagaccaggagatctttgtcaaggattagaattttccatttctcagtgctgtctggaacctatattctgtttttctcctcctgtgtatattgtactctcaggcataatggactcttctgaaaataacacacatttcctaagtcggatagtggtagaaggttgctcacatgaatatcattttctcttctagttccatcaccgggacagcttcaacacagggtccacagcgtggggcatttcccagtgtctatccgacagcctcttaaagccacagcctatgtgagtccaaccgttcaaggcagcagtaacatgcctttatcaaacggcttacagctgtattccaacacaggaatccccacaccgaacaaagctgcagcttctgggataatgggtcgcagtgcactcccaagaccttcgttggcaataaatgggagtaacctgcctcgaagcaaaattgcacaacctgttagaaggtaagaatgtgtatttgcgtaacttcatttgcagtttggaactagaaactgctccagacacacgctgacttttcctttggctcactttaaccttagtaagacactaccctttatggcctgacttgtgctctcctccctttgaaaagtgatggatatccctgtgtgggtcaggtccccttctctctgatgtcattttcttc

SEQ ID NO: 13333 - DNA, 1030 bp, Homo sapiens
cagatacgggaaaggctatggctgggagaaggttcaaaaagccatggttcttgcggagatcaccaaagtgagttcaggtagataggagaggactcaggactgagatctagggcacttaggccctttatctcatgtgagttgctcaaaggagataccacggataacaacctggaactcatacaggaaagaggatgcttttttctccaatgtggaagggagttgtggtgttgggttaatacggacaacctagcatggtttacatttgtactagttagctagtgctgtgtaacaagttagcacaagacttagtggtttaaaacaatattatctcagtttctgtgggtctggcatctggctatggcttagctgggttctctggcttagtgtttcttacaaggatgcagtcatctcgagcatgcttgtggaagaacctgcttcaagttcacttttgtggttgttggaaaaacccatttccttgtgtgctgtcaacagaagctgctctcatagtctcttgttgtgtggacctctccttgcgcaggtcaaaaagtagcatcttgcttcatcagaatgatccaacaagatggaaattaaggccttttaaacgtaatcttgaaagtgaggtctcatcacttttgccctactctgttcatcagaagccagccagtaggtccagcccttattcatggggagagaatgacacaaaaatgtgaatgctggaggtgaggatgattgggaccatcttaattatagaagctgcctgtaaaacattgccattaactttaccagataatcccaaccaatttccaaaataactgtataatattacgtttttgccagcagtgtatgagaattccagtatatccttgctatacatccttgatattgttagtctttaactttttaatctgtgggtgtatagcaatgtctccttgtggttttaatttgcatttccctggttgccagtaagaccaataccttttccttttcattcatttattagatggattcctgttcagatcttttgcttatt

SEQ ID NO: 13334 - DNA, 1087 bp, Homo sapiens
gaagtaccatatccaccatggagacgattgtattcacctaataaacagtggatagactggaaggaaaatataggaggggcacgaagacaggaatatagatgaaagacttggttttaacagagctaagccaatttggtggtttgtgcttggcagattctgtttagtgcacatcacatccaagggttagagtgagtgagggctgtggtccactctcccacagtctcgcagactaagatgttacaggcaacggctttaccagatgcttaccatggcagaacatgagtcactgctttctgcttttgataccattttcctaatgcccccctgccctgcttaactgctaagtagcgcacattttacattttagtcatagaaacactcaatttcctgcactaatgattctattcctaagtataggtatgttagtttggtttgccccaaggcagatcctgagacaagggtaagtagcttcattggaaggtgcaggaaatatcataggtgggtggcgaattgaggaagaactgggaaaactggcaataaagaagacttattaagcacgttagcactgtgggcaactggaaaattctacaagaaaattctgagatataaatgcacacctcagggctagtctgctcaggagctgaggtatatatatacctcctcccatcagtcaaggttgaggatgttcctgaggggtgtgaatttccacccctcctgtgttgaagctgccatctcagcttttgagaaagctgtcagccccctgataatcccctccatagttgtctagaacttggtcacaaactatggtccatgagccagattccacccacagcctactcttttgttacaagctaagggtgatttttatatttttatagagttgttgaaaaaaatcatatgtaacagagactgtggcctgcaaagcctaaaatattcacttatggttttcagaaagagtttgccaatttcttggtgtacatggtcttgcagtaagaaataatctccaaatctcaggttaaaaacaactatttctccgttgtggtctatgtctgatagagggcagaagtgggcttgcttcatgtagtca

SEQ ID NO: 13335 - DNA, 1031 bp, Homo sapiens
gtcacgctctgtcagaatttattctctataaaaattccataaactcatctatgctaataatatattctattcttcctgacagtggtgctttttagcaagaacattctggagatattaataataactatattaaaaaacataatctcagtataaaaatctctagcactttgcagactagtaaatgggatattttaggacttatggggccttaagtctaaagttatctctatcagcagttttctctcagatagtttatttgatgacttaattaaatgagtcttcggaggtccatagcaatgcagatgattcctgtttatgacaatgcaaatgaattttgtctggtggaaagaataaatctctgtaagtctaattcttatttgaatgggttttaacatctttaactcctactgggtattctttgctatgtgagatacctcacattcaatctcaacccctagctcctagaattactgtgaatgtttggaaagctagtctgaaagtagttgagaacaattgtaaatcaacaagtagagattggagcagatggaggatcagacaaacttcttctgatagacatcttattgcctatatgctttgtttgttgaatctcctgtaaaagtgaacaatctgaaaagtcagccttgtgagagaggagagtgatactatctgccaggcaaacttgaaaagagaataaacagcacattcctcttcattaaagtacgtcacactgctgactttttgcatgtaagagtttacgaaagaaaatctggagccactaaaggctacttactcaaccaataccttgtaaccataacattcagctttttggaagaaagacagaagccaggatacaaatactttaaattttccaaagtctctctaaagagcaggtacaccagtcagtcctgaaggaaatgaatgattttttgtcagtttgtaagtgtataactcaggttttaaaaactgagtttcaaattttataagcacgaaaatgccatgtgtctagttgtattagaaaagaggttaggtgg

SEQ ID NO: 13336 - DNA, 1048 bp, Homo sapiens
aataagacagtaagccatgcgaagagcattctaggcagaggcaagagcatgtgcaaacgccctgaggtcaaaacaagcctggtgaactggaggtacagcaatgaggctactagctactaaagctggagaagactgacccagcccaaatgcatggaaaatgaagttgtagagggaagaatttgaatgctttttttgagggagttcattgcaaggtttgaagaagggaaatggcatgatctaacatatttttcaagagatcactgttgctgcccagtgtagaatagaatgtagggccaagaaaggaagcactgatgagaactagtggtgagctggatcctgtgcgccctgaggctgtgaagagcgggttataggctgtatatattttaagggtagaggtagctagcaggacttgctgatgggttggacacatgatgttggaagtcaggacactcacagaggtttaccatgtgcatggtgaagccatttactgaaatgggggagactcagtgcaccacaggtctgaaccagctttgaacccatgtagctttaaaagaactgccaattacccttagaaataagaataaaaattatccaactggtttcaaggattatgctagacccagcctggtacaacttattcagacaatattctgctattgattactcctcccttcaaaacatgaagcctaatttccctgcctttgaatgtggattggacttagtgatttgttttcaatgaatacaatgtgacaaaagtgatgatgtgtgatgtctgacactagttcctaaagaactggcttcctctctcttggaacacttattctgggggaggccagctgccatgtcatgaggacactcaagcacctctgtggagaaaccagatggcaaagaactgaggcctcttgaaaacatcaagcactaatttgccacgtctgtgaataagaggatcctccagctttagacaaacgtttggacaactgcatccccagccagtattttaaatgtaccttcttgagagaccctaagccagggccacccaactaagcca

SEQ ID NO: 13337 - DNA, 1036 bp, Homo sapiens
actttgttgaaagcactactgtaagcattgcaagatatacaaacaagtatgagatgtagtccttatcttcacagaaattacactcatgcttggaagcccagtcaaagaaacatggaaagctcaagagcaatatagaaaactttacaaatagtccctgactagttgtcaagttagcttttcacacattaggtgatcagtaaatgtttgctggggagaaggcagaggacagatcacgaaagaagggtggagaagaatggtgaagaaggtgagtgatgggattatagtgcagcttcccatcctataagagagtcaggcaaggctccatggagcaggtgtggtttagcataaacttaatggatgggtagggttgtattcaattgtattgaatgatgggcaggttttatcattgccaccaaattatgaagggccctgtgatggttaattttatgtgtcaacttggttgggccatgaaatgcccagattatatgtgactttgggggtgtatctgtgagggtgcttgtgagattaacatttgaataagtggcctcggtaggttgccacccccaatgtgggtgggaatcatcaaccccttaagagcccgaatataagaaaaggtggagaaaggaagaattcatcccttttgttctgcctcactacttgagtaggacatcccatctcctcttctacccttgaaccggtatttacaccattcattctcagactaaaactgaattacaccattggctttcctgggtccccagcttgcagaatgcagattgtggcaattcttagcctccatatgacatgagccaatgcctcataataaatctcctttttatatacagatagatagatgatagatagagggtagataaatatagggacataaatatacacatagatataggtatatatctctgatttgtttggtttctctggagaatcctgactaatgtagttcctattaaagaatttgcatttatcttataggcagaaagacatccttaatgtttgtagaatattgcactgtcagtaa

SEQ ID NO: 13338 - DNA, 1117 bp, Homo sapiens
agatttgtgtggagaatgtatggggctgaggtgggggtagccaagaaagatacaatggggagtggtagaagaaggaaacaattaggagaatattgtaatggtccatgtgagatgttggaagtttgaactagagtgttaatggtgttgatcttttcaaagttgttaaaaaaacaactattcagctctatcatttgaagatctgctttcagccaccattctttccttttctctttataggcaagcaagagttgtttgtactcattgtcccaggttcctctcttccatcactccagttcagtatgaactagcttctgtctctatcattttaccaaaacacttcttgccaaggttatcagtgacttgcttttcgctgacactgaccaaatgtagtatccacatttagtcttgtgttatttgatcaaatataacatttgacaacattgttcacatgtttttttcttgaaacacttttttccctgctatttttattgcatcacaatcttcttgggtttttccccctgatttttctgaatactgtaatgtatccttcttgaacttcaaccacacttcatatggatgtgccttggaattcctgttggtcttttttcaatctaaacatgatccccaacccatcttatctatttttactatttcaactcctatatccatgctgatgtttcccaaaggtcattacttggatgtcttctaggcatctcaaatcagtctctaaaactaaactcattatcttcactaaccaattttgcccctttcctgtgatatgtaactcatagaaagccaccatcatccaattgctcaagtcaaaaatctaagtatcatccttctccttttaccactatccaattaatatcccaatgaatatctattgagtcttcctcctaggcatacctagaatctactcattgtcattcaacccagatgatacactgcagccaaagaaatccattaaagccccctctaatcatgtaaacccttattggctccccatatcccaggctaaagtacaaatttattaattgtaatacttaattgaaattaactgtgttttatggtattaagcactgttctaaatgctttacatttatttattctcacaatt

SEQ ID NO: 13339 - DNA, 1057 bp, Homo sapiens
ccttactgaatagtacatgttctggatgagataatgtataatgagttttagttatactcatttcattttccactggaaagaagtgttgcaggctcttacctttccttactctctagttgtcaccttttcttgccagccttattcctttgatcgtctcttgtttgtttcttttgaatttatcagtatactttatctggcttatattcttaccacacctcttttacataatcaaggttacccaactgcatagtctgatagctacttttcagttctcatgttgcttgatttctctgttatactgacagtatgaatgttctttgaaactccgtccttattcctgatacagttaataagaagctttctacttctcttgactttttctgacttttcttgtcttagtgaactctttttgtacttaatccattctccttaaatattgatgcattacctggcatggaatattgtctgttactttcttcctcatttgaccatccttcaggaattgtttgcatcgtgtgaatcatatttgtagaatataggttgagtattcctaatccaaaaacccgaaatctaaaatgcccccaaatctgaaactttttgaacaccacatgatatcacaagtggaaaataccacatgtacgtattcaacacaactttgtttcatgcacatatagtcacgttcatctttgggtcccattcccaagatatttcattacgtatatgcaatattccaaaatccaaaaaaaatctgaaatccaaaacacttctggtcccaagcattttaaataagggatactcaacctgtataaattttttgttcttttgctcaaaaaccttcagtggccccttactgaatctgcccccaacatttaataacatttaatattaaaacttccaaatttttaaaaaagttgaaagaattgtacagttaacctccatacaaattgtgggctctacagttaacagtttattctatttgtattgttgtgtatttatcaatccatctatttttcgatcctttcaaagtaagttgcagggatcagtgtacttgcatgca

SEQ ID NO: 13340 - DNA, 1069 bp, Homo sapiens
ggtcattgttttcagcgagacgtttgggtgaaagccacatggtaatgaattggtgaggaaataaaagtacagaaaatgggagtatatacatacatatatatttcttttcaggatgtttatcactaaaggaaagaagggagctatggaaatagttcaaaaagcagaagaaaaagtatttatttttagctggggggaggttttttttttttctctttgaagtatggtgtgaatagaatatacacgtgggtagggagaaagaagtcagtgttgaaaaggaaggagagagaatttaaagaaaaaacaatcctttgggaggcaagatcttctctgtacagttgtctggcatttgggagtgaagaacataagttaggatggatgccataatgctaagtttagagctgcagaggagagaagttgaaggaatttttgcttgaaagcttattttcctccatgaagtaggaagcaaagattttgactgagagtctcatggttagaagtggagactggtggaattggaacacctgccatggtgtcagtgaactcttatggccttgttggaactggaaactaaatttgctgtggcagccacctacatagtcacgtgatttgttgtcttccctccaccagaaggcagtagacagacttatcccaaattgagtcttaatgggatagatgtggccaaggataagcggactagagaattgagggtgcagttgaaggtcatacaagttttgcattttatagtccagactacataggatagaaggtaaaatcaggtagcagggaatagagggcccagagaataggctcagtggaagtaaggaatgaaaaatgttgaggccagaaggttgggataaggaaccaagttgtatgaatgtaatgtttttgggaagaagcagttctagatgatgaccagatcagggattctgtcagagggtagagaactgaggtttactggaccactcaactgtagatatccatcattactttttgttttgtggctgaggtgttaggatggtttagttgtcttgtattacagtaggatttaaggttgaggggatgatattgt

SEQ ID NO: 13341 - DNA, 1068 bp, Homo sapiens
cttatataaaactactgttgttataatggaggaaaatacaaaagtgatgtcaaacagtgtggtgtatgctacttttagaacctcccttttttgtgtgtgtgtcagtgactctagcataagtctaatgagttgattgacctgtatagcactttactttattacttatgttgtaataagtgatgggttttatttttaaaataagcagtctgtattttctattgtaatgtatttctggagattatatttcaaaaattggggtgagaaatacttataaaaggaaatctaaagaactagctggataaaggaaaaatgggaagagaaagggacaagagtggaaaagtaaaacttcaatcttttagcaaagggaaatactgaatttgcttaagagattagagccgttgctgaaatcaagatgtgtaaaaaaattaccccttgtatgttatcggagcaaagtatttggggtcaggagcttcctgtgtctgccacttaaatgtttaatattgtgcaagtaacttaactttcctgaacctcagagatgctaagatcaatgtatacagaagtggtatatgaaatggttagtattatgtaaatgtttgttattattactttttctttttgcttttttggctgtgagatagtgggcaagtaaactaagttctttgtgcatactaataagcacatagagaatactcatatattatgagattcttacttctcttgtctggcactctttttcagaatttcattctagaggttcttgtttagtgtattagcctttaaacggtatttatccattctttctctttataataaatttggactaaagtaagatatatgattgtaatagtaatttatatattttatagcttataacataggcctataatagcaatagtagtcctgtattggtggccagttgtaaattattaagtcatggctatggctacaaaattaaatagattttattggttattctttttgaattctttcttcagatacagaagtttacggtgagttttatcccgtgccacctccctatagcgttgctacctctcttcctacatacga

SEQ ID NO: 13342 - DNA, 1474 bp, Homo sapiens
tatatatattatttagagattggaggaatcttaaggaggttagtgtggggcagagtagaatacagaggacaatgccagttccacttcagagccataatctagtgtttatttatttaggggaatgtgaaaatgtaatcagtgataaaaatgttgctctcacatatgctgaaaagaatgttgagcactttgtagaatgctgagaaacagtagccactgagcgattggtttttaggtatgaactgggtggcttcttttagaaaatgcctgagaagtaaaatgtgtgttagaaaacagcagctttagagacaaaggaagggatcccacaaataagttggtttacatttttcaataatatttttacatttggataacagtattattatctttgaacagcatctggaagggcatgagggtggaattcagaaggagtcccaaaaggagggagttaggatatgggaagcagatgcgattgggtttagctgtaatttataccatttaagtcatcatttgtatctctcttctgtctttcctctccaatttactacacacatgcttcttgtttttagtgatttgattactgtcttgcagttggggtacaaatttagtttgagacttcatattttaaattcacaaactccttttcctcctggtgaggaaagtcatacacatacagtagatatcttctgtttttgtttttggatcccccccaccctgttttcctggttaaaaatttgctggagttaataaatgtttccctaagaatcatatgcttaagtatttcaaaggcttatactagtaatggtaatgttttatacttatctaatattttttatgtgaaactttagagaattttacaggtattgctttttaaattattaaatatatttgtggttgttattttaaaatactactttacaaaggagaaaactgaggtagatataagatgtatcccaaataatctaaatcattagagtgactgtcttccaagttgtcttttctaactcatcttaattttttattataagttagttttttattattacttcaaaataagaactcataattaaaaatatgtacataatgcacgtatcttcaaatacagatttcacagatgacaggcacttgatattactatacaggcttattgtttttttcctcataattgttagtaacctcatgtatatatttcctttttatctactttatataaataaatatgtcttagttcacccagtagttatattaattgaaaagattgagcccatgggttcaatggggtttttatgagttgaatcagtttaagtgcgtcaggtaactttactattgaagaaaatcacttaaatgtatatttttatgtaattctggatttttatagctagatttgctttaattttggtacatctaggcttaacaaattgaaaaattgtatttccttgtgacagagtttatccttatagtgtaaaatatattacag

SEQ ID NO: 13343 - DNA, 1030 bp, Homo sapiens
catcttttactctattcctctttccaccttctttgaaaaaacaacaacaacaacaaaaaaaaccaaaaaccttaattgctatctcttttaggaaacctttttctctcatcctctttaattttgatcatcttggtttccatagccctatgtgtgatttctgtcaaggtacttatgagacagtgctgggagtattaatttttaggttactatcctcaatggtagatattatatcttactcaattttgcatgtcactgcccccccccccgccccgccccacaacacctaagcacaaagctcaatacatttaatgaatggttggataggatggatgccagagtgaggctgtgtgtatgtactggcatatataaaatgccttctggcctttaacttagtgtctaatagaggaagatttataaacaggaaaattggctagtattcaggtaggaacaaaaatcatgggtcagagcaattgaactccaggagaaaaagggcagtcttcactgcagaggtgacattggaactagatgttaaagaataagtagaagtgtgcactgtgtttaagcatttcatacattctcatatttttccatctcttgcatgatgttctctgccttccttgattctcctcagaaggaaggaattatctttccaattctcataacagttcttctgaggctctttattaaaccgctttctactgtgtatctcagtactttgcattcatgcctcaccacttctgcttgagggcaggatctgtgtgaggtgtagagtcatagcctccaatgggcctagcacatactaaacacctttaaaagatcaagattttccacatcattgtgagccactcactttaccactgcagataccactgcaggtgtccacagtggtacagacttccttttctccaaatgcactgtgcaagaagtaagtagaataattgcgaacatctttttcacatatctcccaacttcatctccctctctagaagtaaccactattaacaatttattacacgctcttacagatgtt

SEQ ID NO: 13344 - DNA, 1047 bp, Homo sapiens
tatctgagtttgctcaaggaactgaaatcgtcgtgtgctgagctcaatgccatgtgcaaggtctccgactagcacacagaaaactctaaggaactgtaattcagtgattcttgccatctgcaagcctgtggaattcaggtgcccacaggaaggaatggagaggtttttccagcctgaccatatcagccgtctcaccacaagaaccttctgttttggctgtcgtccctctatcagactcaggctgttctttatggccaactgtgagtttaacgtgtctggtttacattctgttggtaaagtgtttctctcagttccaagctcctttccttccatccgatggcttgactgctttgtattcatgtttgttttttaagaggaggtaggatgggtggacgttagggaccataaaacaactctagaagtttgcattcacaaaatagtgaaattaatactaataaggagaaagacaggcactgatagtgcagcagagaaaatccaacaagtaggatcagaggtgtaaggatgtggtaggtgattaaataactctgtcagtgtggagtgggcagtaactaaccattttatttttaatttttttggtgaattaagcagaagttttaatgactatccctttctcatatttgtgaggtgtgggctgctgtaagctatagaaccatggcaaagggcttaatggggaggaaaacagttttaaaatttctcttagaacccagcccactggaattatgaaagcagcctcagtaagtaagatagacttgcatgcgtccagttacagaggtgtagggaaaggaatgactctagttactggaaactagtatttgcattggacaacattattatttgaattggatggtggaggcaaaagtacatcttaactttatcaaacatgtttcagatgcaattcttaattcctccacttaaggccattatgcttgtggatacaggatgatagttaatacttttaaaacacattttaaaaaattacctttaagctcctcaagtattctaaggatattcttaagctccttaaga

SEQ ID NO: 13345 - DNA, 1045 bp, Homo sapiens
atgtgagttacacattgaaaataccatctttaaaataaatattcagttctatagatgattcatttctttctcattaagtctaagccttttgtggtgctaaaggatactcaggaattgatgaactaagtggaccctcctgcagcctccgtcactccctcccttggcttctgtggactctgggccttagtagggatgagatagtgagtgtagactgaaagtgctctgtacagacttgctttgtggcctcctgttcagctgccagtctcacagcttgccctgagaatggacttcctgtgctgtcatttacactcagtatcacactaagggctctttgtcactcagtctttgagacagaagggggcgagataacaaatctagactgcttgtgttgactttgtggataaagtaaagggctggagtcaagaaccctgggtcttatcctaactctgcaactgcctttcctgtgacattgagccagcttttgacctctccattcctcagttttcctcatctatgaaatgaggatccctatactgtgttctcttattttattacagagatgtggtttctgaaagagtttctaaatgcttaaagcccttagtaaaagatttttttctacaagtagataaaatgacctttttctgctttggagagatgggatggataccgcagttgattaattactccctactcccagaaatacttctctttagaacctcgtaagtagggcctttcccttctaccgttgtaagttttttctcattatttcattttgtgtgctgtctcttccccctgcaatatttccttcctttctatgtgggaaatgatagccccatgctatgggatcagggtgcgtagaagttggtaaatataaagtacacttataaaaggctgtgttcaaagtgcatctgcagagacgtggaggaaaacaaggagagcatgctgagtgacaggaatgaatgagggcacacagtaaaggccatggaagcttcagcaaatttattggcttcagaaacataaatccacaaaagcagctaccacctgg

SEQ ID NO: 13346 - DNA, 1031 bp, Homo sapiens
tggtagtcatttatggatactcgatctaaagtcagtttcttttacccttggataaatcccttatttcttcaagtggcttgaggggataatgtatcctgaaaagaaaccacagccctaaggacagatatcgatgcacagtttataattaatggcaaaatgatcatataatagggacaaaatacacatgtacacaaaataaagtgcacttaatattttgagcataagtaaagagtgaccttttttttttttttttgagacggagtcttgctctcacccaggctggagtgcagtggcgctatctctgctcaccgcaacctccgcctcccgggttcacgccattctcctgcctcagcctcccgagtagctgggactataggcgcccgccaccgcgcccggctaatttttttgtatttttagtagagatggggtttcaccgtgttagccaggatggtctcgatctcctgacctcgtgatccgcccgcctcggccaaagagtgaccttcttaactatattctgaatgaacttaccgtgctgaaaaaaactccaaatattgtttccttttaacaaatcaaagtttacgtactgggatataactgaaaagtgagtgggatataagttaattttattctgaatataacattgttctctaatcattatacctttgtaagtaggtattccacttagcaaatgcatgtggaaataagtcatccaggtaatattgtgcattgtctatcgaaggttctctgttgattgctttgtatgttgcattattgctataaatatttaagtgccatgcactggagagtatatagagtgaaataaattgcaaccaaaaccaaatgcagtgaggaaatataactttaataaaaatattaaatcaaagaaatttatagattgtggccaactatgtcctttttctcaaaaagaaatttacattaacttacagcaacatgtgtgcagtctacatttgattgctcccaagttatttgaaaagtctccaaacaacattgaatgcatttaaaaacacatg

SEQ ID NO: 13347 - DNA, 1004 bp, Homo sapiens
tcccccacccactgggccacatgtgcaaaaaccccatctaccgctcccgagagggcaactccgtagaggattacaaagacctgcacgagctcaaggtcacctacagcagcaaccaccacctgcagcagcagcagcagccgccgccgccaccgcagcagccacagcagcagcccccgccgcagctgcagctgcagcccggggaggaggagaggcgggaaagccaccacttgcggagccccgcctacagcgtcagcaccatcgagccccgggaggacctgctgtcgccggtgcaggacgccgaccgcttttacaggggcattttagaaccagacaaacactgctccaccacccccgccggcaatagcctcccggaatatcccaaattcccgtgcagccccgctgcttacactttctcccccaactatgacctgagacgcccccatcagtatttgcacccgggggcaggggacagcaggctacgggaaccggtgctctacagccccccgagtgctgtctttgtagaacccaaccggaacgaatatctggagttaaaagcaaaactaaacgttgagccggactacctcgaagtgctggaaaaacagaccacgtttagccagttctaaaagcaaagaaactctcttggagcttttgcatttaaaacaaacaagcaagcagacacacacagtgaacacatttgattaattgtgttgtttcaacgtttagggtgaagtgccttggcacgggatttctcagcttcggtggaagatacgaaaagggtgtgcaatttcctttaaaatttacacgtgggaaacatttgtgtaaactgggcacatcactttctcttcttgcgtgtggggcaggtgtggagaagggctttaaggaggccaatttgctgcgcgggtgacctgtgaaaggtcacagtcatttttgtagtggttggaagtgctaagaatggtggatgatggcagagcatagattctactcttcctcttttgcttcctccc

SEQ ID NO: 13348 - DNA, 1001 bp, Homo sapiens
tctctattgtaaaaaaattgtgactaataggcttccttaaataattattgaggaaaaagaaaggattggctacacatgtcttttaataaactgagtagttatgaaagacaatcaaataatgcttaattaatttaatcaacaggaaacaataagtcacatgtagactatgtgctatttttcattctctagaaaacaaacattaccatgcttggctttgatacagaaccttgggagccttcaccttctgcggggcattccaaagacattatttagcattcctatcctccatggataattagaggaccatcaaatactctgtgttacatgatgcagttgtaaggcaacttgtacagcaacctgagcctcaactcttttatataccatcccattccttcaggtgaaatcttctacatccccatggtgtgtaggctgttgggtttgttttatttttttgtcttttttttttttttttttttcctgaccagggcttgcacttccccactctatgctgagaactgattcttataaatctggatgctaacatataaagtcagcagatattgaaaacaacatcatcatcttttaagacacatgctatagaccaggtcatttcatgaggcctcctgaccagcagagttcaggaaaatttaggttttcaatattttcaatccttttatcccaaatattgccagttttttatcacagtcccattctttccttataaaggtcgagacataccaagactgtgtgttgagtcttcactgcagtgtttccaaacttgtaaccattatcttcggcctgattttcagcctaatctttctagtggttacagtagttaaaattgcttttaatactaccaaggaattcgtgagatatttatagcacccttaaggtcgaagaaaaatctgtcctgagcgctctctctctctctctgtgtgtgtgtgtgtgtgtgtgtgtgcgtgttttgttcaaggtctccaaatttgtcaaatttgtcaaaa

SEQ ID NO: 13349 - DNA, 1069 bp, Homo sapiens
cagtcaccaccctaataatccacaagaaattaattgcattctacatattgtagttaatttattattattttattaaactttgtctagttcctcaaaactcccagaatccatttttaagagcaataagcaaatgcaagggaaataagcagaaagcaaaaacatatgacaggcataggatgcactcagtatgtctaaagaaatgtaattttatgtaatttgcctacctcattcatagacactcagtagtctaaaggggctccagaattaacaatctatattactttgttttcttcaggagagtagaacaacccactcattttttctttagagaagactaatggatttctatgctaaatagttatgatgtttatagtccattgaaaccaatataaaatatggacaaaagtattgtaaaggccaaattttaaaggtatgtaagactgacctactgctataggctacggcagaaatatcctaccatattacttcattacatttcttcatagagatgagagagatatgaagaatctatacatctgaaacaaaaacgaaggatgatattcatttgcaccttacaatttggcagccagaatgatagtaactgtcacatatgtttcatatttaattctaaaaaggagtgagatatttgtgagcataggcattttgaatatcaataaactgaggctcaaaaatgtgaagtaatttgctcatatttaatattttatctgtaaaagcagcaacagaaaaatagaaaagcttcaatatctgagtttttctcacatcatttggattaaacttttaatgatgcctgcagaatacattaaggtgtggtgtagatgtcggtgcttaaacatatagtaagtatatttatttgttaactcatgcaatcaatgatacttgagcatgtagtagaatgtgataaccactcaaaatattaaaggaaataataatatataagactcaatatcccaaaaggccttcagagtagagagttaaacaggggaacaggcacttctatgatttccataaatgttatgaaaggtgtattcacatggtagtatcagaacaa

SEQ ID NO: 13350 - DNA, 5586 bp, Homo sapiens
tgactctgacccgccgccccctggcggctacgcggagaatcgcagggccgcgctcccccttgtgcgacatgtgctgccggcccgggctccatgagcgtggcgggcactttgcagtctcgggtgttcctgcccggtcttctgttcctaaactgcagcaaagggaaaaggaactgaaaaaggcaggctcgtcgttgcaatatcaccaaaagagaaaattaacggcatgccatcaggaccacagcagttggagaaacaactctttatcccggcttgcagccacgaggtcttgattgggggaggggtggtgaagaatagtctgtgggctgctttttttttttccttttactggagctgtacagtggagtcggtgattgctgctgatcataatcaagtattttaggagcttatttagacatgtatctgatagctaaggatttttcaactttattctcttacgtatttttcaactgtaaattattgggcttttaaatcctgctagtattgctcgactcttactctcacaaatggatggaattaattgctgttaggaggttggaaaatagcaaatatagatttggacggtggtagtaattttgagcaaataatgttttatcttttttttccttatttttccctattccagtcatacacgtggacctaactgcaccagtagcttttctgagaatacttgctgaaaaggaagttttctggaatgggtaagtgtattctgattttcttgaacttttcttaaaaacaaatttttcttgctattaaagttgaataaataggattggtttcttagagagtaaaagtaggtgtttctttctttagacaatgtaccttttctgaaaaactaactcattaagtacggatttgctaattttaaggtagtaaaattacagtgtaaatattcctgtacatttttggaaactggcttatgcagtttacgaaatataattttagaccctcttttaagttgggtgataaagtagatataacctgagatgatagatttaaacaggatatttacgttctgctacaattgactgataacacttgaagtgtagtctgaacagtaattttgttaatcatttcaacaagtatttgctaagtggaagccagaagaggaggaaaatgttttgccacgtggatgtgaagatttcctctaaaaggtacacatggactaaattgcctttaaatgttccaaaattagttctcatttatttgcagtctcattttgttttgttttttttctctatgtgtcaatccatttgggagaggccagccattggaagagccaccacttccagtgctagttggatggttggttatgattgccttctgtaaagaattcttaaggcataaatacgtgtctaaatggacctcatatctttgagataattaaactaattttttcttccccattagggattatgctgaatttgtatggtttatagttgttagagtttgaggtgttaattctaattatctatttcaaatttagcaggaaaaaagagaacatcaccttgtaaaactgaagattgtgaccagtcagaataatgtcaaagtgcttacagtgcaggtagtgatatgtgcatctactgcagtgaaggcacttgtagcattatggtgacagctgcctcgggaagccaagttgggctttaaagtgcagggcctgctgatgttgagtgctttttgttctaaggtgcatctagtgcagatagtgaagtagattagcatctactgccctaagtgctccttctggcataagaagttatgtattcatccaataattcaagccaagcaagtatataggtgttttaatagtttttgtttgcagtcctctgttagttttgcatagttgcactacaagaagaatgtagttgtgcaaatctatgcaaaactgatggtggcctgctatttccttcaaatgaatgatttttactaattttgtgtacttttattgtgtcgatgtagaatctgcctggtctatctgatgtgacagcttctgtagcactaaagtgcttatagtgcaggtagtgtttagttatctactgcattatgagcacttaaagtactgctagctgtagaactccagcttcggcctgtcgcccaatcaaactgtcctgttactgaacactgttctatggttagttttgcaggtttgcatccagctgtgtgatattctgctgtgcaaatccatgcaaaactgactgtggtagtgaaaagtctgtagaaaagtaagggaaactcaaacccctttctacacaggttgggatcggttgcaatgctgtgtttctgtatggtattgcacttgtcccggcctgttgagtttggtggggattgtgaccagaagattttgaaaattaaatattactgaagatttcgacttccactgttaaatgtacaagatacatgaaatattaaagaaaatgtgtaactttttgtgtaaatacatcttgtcttgttttcattcaaaaacatttcacttttggggttgcgtgtcagatttggcagtataaattctggctatattttttgttgttagatttatttggctgttaagtattgcgatatgactaaacatactgtatacctgatgatcatctgtaaagttagagtatatctttttgctttctttggagttagtgttattccaggatattttacttaatctaaaagttaatttatgttgctcatatattactcaagtatttaaatttagagagaatgccgctctgtttaaagcaatgtgtaaagatgagtttttttaagcatggaatttagggttggggtacaatttgtttctattaagcaagtaccagtttaccaatacatgagtaactgaagtgtaactgttaaatgcttgtatactagtttttctttctgattgtcagtgatttataagctataaatgaccaaggtcctcagactgcttttagcatctgcaacttaaaaaaatgggagttagaaaaagaacaaatgctaaatagagtaacagttaaatgtatgtgtacactcttcccaaatgccaagagtgcagcggtggggtgagattcagatattcatttatttctaagtctgtagttaacatttatgttccctactccctacgtaagccagactttggcaacagtgatagttgattccaggcttatttgacttaaagtcactgaagtggaaactaagaagtggcagttagtgttttacccagcatttctgccttctctcttttcttcatgtgtttttgtctctagcctatgtgtatttgtgtagaataatgtgggatacctgaataatagatttaaaaggaccaagtggtaaaattgggcccaagctgaagtacaggcaaacttgatgtttgaaagataagttttgagaaatgtcattgtattttggagtaaaagaggctatcttagtaataagaaataaacttccataacactaggttagaccacccaataaatctagaaatcagcttttaaaaatattgtctgaagtctaacaaaagttttcacctctaatgtgttctttaagaaatttaaggaacttagccttggattcctgaatagaaaggtaagaattctatcattctggagttgatgaaaacataaattttcaggatgtgaaatgaacagtgatttataaaatggaaatcaaattgtacattagcagagttcttaagctttttgaattgaaggagacctaataattgtgtctttttggttatttagtgacaaacgtggctttcaaactatgcttaaaaagttccggctggacacggtggctcacacctataatcctagcacttggggaggctgaggcagacggattacctgaggtcaggagttcgagaccaacctggccgacatggtgaaacgctgtctctactaaaaatataaaaaattagccgggtgcagtggcgtgcacctgtaatcccagctactctggaggctgaggcaggagaatcacctgaacctgggaggtggaggtttcagtgagctgagatcctgccactgcactccagcctgggcgcaagaccaagacttaaacgcaaaaaaaaaaaaaaaaaaaaaaaaaaagtttcataatacagcatggtctggtagtttgcaaaatggtgtgcttttggggagatacactagcaatttttttaaaaactggaacagtgtgataggaagcctgctggatgatttcttaaatattctaaaatgtaagtcaaatatgttttaataacaaagacttaaatggcttttctccctagagactgaaactagtattcattgtgttcagaacttaattgggcttgaactgagatttaaatctaataaacaagttaataaatgtgtatgttttgttgtgggtttggtagtgatctgtggttctatagggtttaataggaattgcttttgatttgtttctggctttagaatgtgaggcaaattttacattcttggttctattaagattttcttaggcatgctaacatgccaacaaaaagccatgtaagtattgtataaaaagattcacattgttaatttagccattttgaaattcagatgagtgagcaagttgataatggcctcatctctgacctgagaaaaaacaactttgacccttgttcttaaaatgctttaaccttgaagttgcttgagacttaagaggtcatgttgctttaggtttaataaatagccttaactatttggaggggaaaaaatgggtcaacttttttttttttttttggcgtttgcatgtacaactttctatttttagcctatatttggaaagaaagcacttaacattttaggaattctttttaaagctgcttgcaaagtgttggtgattttactgaaaacttttgagatcttcattttacaggcagacctgtctaactacaagccagacttgggttttctcctgtagtttgaagacacactgactcctgacaaaatgcagcctgcaacttcctggagaacaactcagtgtcacattaaagtttattatgtatttaatgatacactgtttaattgacagttttgcatagtttgtctaactttagagaattaagagcctctcaactgagcagtaaaggtaaggagagctcaatctgcacagagccagtttttagtgtttgatggaaataagatcatcatgcccacttgagacttcagattattctttagcttagtggttgtatgagttacatcttattaaagtcgaaattaatgtagttttctgccttgataacatttcatatgtggtattagttttaaagggtcattaggaaaatgcacatattccatgaattttaagacccatagaaaagttgaagaatgcttaattttcttatccagtaatgtaaacacagagacagaacattgagatgtgcctagttctgtatttacagtttggtctggctgtttgagttctagcgcatttaatgttaataaataaaatactgcattttaaagctgttaagaaattgtccagaacgagaatattgaaataaaaacttcaaggttattatcgcagtttttatggcgtttttgttttgtcactacagatggtctaaaggttacttattaa

SEQ ID NO: 13351 - DNA, 1016 bp, Homo sapiens
aagactctgcctttggctcacggtctcttactccatcttcatatctagcagcagcaggtggcgtctgcatcacactggacccctcttacctccctctttcacttttaaggacccttgtgattaatattgagcccatccaaatatttagaaataatttattttaaggtcagctcattggcagtcttaattccccttgtaacatttcacatttgcaggttctaggattaggacttggatattgttggaggtcattctgcctgtcttagggaattgtgttggttttggacatggttatagttccaggcatacataactgcttagagttgttttcagacagcgtaagtgaaatgaatgagctaaggaaaatacttaatccaataaaaaatagaacatactcgggctgtctcaatgttttcctacggtatttaagtgccagtttatggaggttttaaagaaaagattttctcagacgagaagagcttataatatacttcctgcaaacattctagaaaatgtaggtccttatcagtcaaccttcagaatggggaaaccacaaaataagtgaaattttgttaacctatctaagtaaacattaaagagttgcttttagaaatgacacaatgtaaagagaccatcagggtctaaaacctcattagccagaactggaaaatgagcttttaaatacaggtaaaaagtaaataagcaatttatcctctactttgttagagtacagaaatagtatttcaaagcaaccactagcagaataaaagactatacttaactttgaaatcaccaggaaaaaggctaggaaaacagcccacaaagcaaaagacaaaaaggaggagacagaaataagaacatttttaattaaaattaagcacagaaaaattttaagtagtttgtattcaagtcagttttacttaaattttataacatgcaagccctggttatttttagtgattggaaatgtagacaactggtggtttgcccctagtcaatgggaagtcctggccctt

SEQ ID NO: 13352 - DNA, 1034 bp, Homo sapiens
actttacctaataataaggctatacagctatagtaattaaacatgtggtattgacgaagggatagacacgtagaacagattagagaacccacaacagacctacacaaatatgcctgattttgacataggtacaaaggctattcaatggagaaagaatatccttttcaacaaactgtgttgagaaattgaatattcataggggaaacctaaactttgtacattatacaaaaatgaacccaaaatagatcatatagtttatgtaaaactgtgaaacttttagaaaagaaaattgaagaatcttagggacctaggtctagaagaacagttcttagattagacaacaagaacacccatgtttcataaaagggaaaattgggccttgtgaaaattacaaaccatgttcagagaaaggttaagagaatgaaaacactgtaagcaaataattgcaaactgcatatgtgatgaagtacttgtatctagaatatattaaaaattcaacagttaaaaaaacccagtttaagtagaaaatgaacaaaatatatgaatagacattttacagaaggggtatgcagatgacaactaagtacatgaaaagatatgcaacatctagctttcctggaaatataattcaaagctataatgagatatcactacaccctatcaagtatggtgaaaatgaaaatagtaataacaccaattgttgacaaggatgtagagaaactggatcactgaggcactgttcatggtaatataaaatggcacagtctggaaaacagttggcagtttctattaaaattaaacctgcacttattgtattgtccaataaatgcacgcttggacatttattcagagaaatgaagtattatgttcatgcatagaactatacacgaatgttcatagcagctttatttgtagtagccccaaacaggaaattaatgtgcttcaacaggtgaatggataaacaaattgtgttatgtccatatcgtggaatatgactcagcaataaaaaggaatgaactattgatacatgcaaa

SEQ ID NO: 13353 - DNA, 1142 bp, Homo sapiens
agatctatatgccaacaaactctttgagtttatggataatacagagacaaagtagttaacaaagaaataagtaaaaatcacttccctctgatgaagttgaaaatactcaaaatatcagagtatttgaaaaagtctaaagacttaaatgacatagaaaaaatgactttgaataaaatatttttaaacatatttaaagtaaaagcacatgaatatcaagtaaattaaaaatataatgaattatttatggatgactttgatttataatttaaatcataaaccttgattttccaagttttcctgcttaataatttgactatttgattattatggtgattatccaattaaaagtttaaatactattataaaaacaaaacatgccaatgctgagaaaaaaataagaaatataaatgaatagcattgaaaacataagtcccaatgccccaaagtaaccatggttagtattttggtatacacatttttatatatatcaaatagacatatactagattttcaaatatgtgtatatatcttagtttttgggggctgctataagagaataccatagactgagtggcttataaacaacacagatttacttctcatagctctggaggctgggaatttcaagatcaaggggctggcagatttggtgtacggtaagggcctagttcctggttcatagatatctgtcttcttgctctgtcatcacatggcagaatgaggaagggagctctctggggtctcttttataagaatcccattcatgaggacctgtattagtctgttttcacactgctgataaagacatacccgagactgggtaacttacaaaatgaagaggtttattggagttacagttccacatggctggggaggcctaacaatcatggcggaaggcaaggaggagcaagcacatcttatatgggtggcaggaggcaaaaagagagcttgtgcagagaaactcccatttttaaaaccatcagatcttgtgagacccattcactatcacaagaacagcaagggaaagacccacccccatgattcagtcatctcccactgggtccctcccacaacacgtggaaattatgggagctaaagatgagatttgtgtggggacacagagccaaacaatatcacagcca

SEQ ID NO: 13354 - DNA, 1078 bp, Homo sapiens
gtcttattttacggtattgaagtttgcacagaaatgatttacagatagtggtccattgttttacttgaagggaccttgatacttactgaatagctttagctatccaaatcattctaaaatgattttatagaagtcattgtggataaagcgaagaacataggggttttttttcctataaaaattcatggcaagcctattgactttctttgagctatggggtaaagccggctgttagataaaatccctaactctcttttaaaacttacaaaggaaagatactttttagtataaattttgaaagctgtaagtagccctagactcctttaagaacttgttcttcactcttgcagaagaaaacagaagggagtgtgccgttattaagtattaggtatactagaaaaaggtagaagacaaacgtctttatactcagttcttattcaaagagtagctgtgtttatgtccttcactttctttttgttctttatacaaaagtagcagcttgaatagaaactgtgagaagtgtactctaaataggaactggtatgtgtgataaagctttaaagggtaaatactttggatctgacttttcacttttattcagtttcactgtattttgtcattcaacttgatgttttcttgtgcttccagattgggaatggtggctgaaacactctctttcattgtttccatgagtctcttagatctttctgctaataagactaaataaatgtgttactcgcagtgacatgatttagtcacaaaaacgtttttctggggatccagctaactgaagttttcaaatctagtcaagcagttattgagcatttgatgatttggcatgggaattaaacaagtgattgtaagaaactcaaataactccttaatggaaaaaaaatgaaaaaaaggcagattaaggaaattgacacttgaatgaagagtttaatatgattttgacaaaaatcctgaatattcattttatatatgttattgtcaaagctctggctaaaaacgattaaattgcaaatggtattgaaaagggaagcattcagcagttggataatccaaatgcaggaaggtg

SEQ ID NO: 13355 - DNA, 1077 bp, Homo sapiens
agattttttaaagcttactttctgatcctatgcgtattacaaagtaatgaagctgaatatctttagaggtagtcattattttcatttaaaaatgtatttaatgagtcatcactatgtgaaatgcctcttaagagctcaaactatagcttatattcagtataacactgataccctttactctcaaatatttgaccctataaaattgttttaaacctgtaaattttatattgataattttttctagtaccagtatctaatttatttcctaattatgtattatacaaacatattaaaagcattttacagtcttggacactaagcaatatggaggtaagacttggttgaagataatctaaagagataaatgtggagagataaaattaaaatgaactctgataagagagtaagtgcttcaacaaaaatgaaaatttatccctcttcaaagttttatcgtatatatatgtatatgtatgtgtgtgcacacctatgtgtatatgtctatctatgtctatacctgtatctatttctagtttgtcactacatcctgccacttggtttattatctctagtaaatagttaagagagcctcaaaatttgtagaaaaaagatgacatttatcaccaagggtaattatttaccatattctttttttgtggtaaaattgctaactatgatgtaaatgtagaatgtccaaacatttgtatacaagttgaatacagttagagctacattctgatttgccattttggtttctggaacttgtttgacctaaatagctaagaataaaatactgggaatagggagatttggtttctagtctctgatgagctgtgtaattttagataagccacttaaaccaaagacttaaactttagtctttggtttccatgttgtaagataagatatgatttaaagtctaacatactttgtaattccaagagtccacgaggtagaagagagtcaggtgcttcaagcaagtacaagtatcagaatcagatgagacagtaacagaaatcctggagacacagttttctggagtttgattctaccaggtcaacaataggaacaataagggac

SEQ ID NO: 13356 - DNA, 1026 bp, Homo sapiens
acaaacattagtgattgctataccttcgtgataaattgatccttttatcattaggaatgatctttgtagttgataatatcctttcttctgaaatatttttgatatttcatatagccattctggtttaatgtaattaataaagcaatgtatctttttgatatatattttttcattcttataattttaatctattgttgtcttatattaaagtatatttcttataggcagtgtgtaattgagtcttgttttttatccaatatgtttatctctgcctttaaattattatggctagatcacatgctatgtgattacattagtatggctagatcacatgctatgtggttaaatatattgttaggtttaaatctattatcagttttaatgtctttcctgacaattataatacactgtcaattctgcattggctttgacgtattggtttttcttttgattatgagttgtgttttccttattgtttgcatgcctcatagtttttgatcgaatatcagacattgtgaactttaccttttagggtgctgggttattttatattcctataaatattcttgagatttgttctgggatacagttaagttttatattttgggtctttcttttcagacttctgggtgggacaagaattatgtttagtataaggttaatttttccttaccacaaggcaagacccttctgtgtactctctccagtgcccggtgaattatgaggtttcccagtgttgctggtagggacagtcactatctgtcactgtaagagttgggtattctctctaattcttttgggtgttattttccgtgcctttcctagtagccttacatgaatagactgatcaatattctggtgaatactccagaaccctcattgaatctctgaagttctctcacctttttgatgttgtcttgcaaactctgccgctttgatttctccagactctctgcagtgtctccctaactcaataaatcttcctggctctgcatgagctcctctgcccactgcaaggcctggaaa

SEQ ID NO: 13357 - DNA, 1045 bp, Homo sapiens
cccaaggctcaggaaagctggccagagtgaatggaatcttgtctgtgcctaccccactttgctctacaactttggaacccccaaagcattgcactctgggtttttatacgccagagtaaactttgctcactgggctgaagtgtttcaggatggatatggaaaaaacccaggctgttccagatagttctccttatctcaggatgttacattatcagtacattcggcctgagaattgctaaggaaagggggaagacatggattggccagggcgattcaaagacaggtcctcctgcacacctatttgtgtacattcgttatatggaatcaattcatttgctcagttattcagcaactatttatttggtactttcagtttaccatgtgtggtgtcagctgatggtgatttggtgatgattatcaagtgagcaaagatttacttttggtatactcattaatgtttttattcagcatttaatgacagtggatatatctaaagtatgtcagaacagtagaaagattatgaatgcattataaaatgtttacatgcttaattgctgaatccaaatttcatttttatatcccacaaatatgaatgttgtcaaacttctgtcactttggaaaacagtaatgaaaagaatttattgcttgctttggttttattattgttttttgttttgtttctgcctctgaatatactatttttattaccgtacatttttcttccgtagctcattttatcacattccttaaatgtcaggttcattttgttcttataactttcattttgagtagtggcaaacaaagggataggctattaagaaaaatgcatcggcttcttcaaatgtgacagtagttttgtggcgatatcagcattccaccaggaattcatcagtgtgtctcactctgagactgaaattctcatctggctgctttcattttctaaatcattttgctgtaagtttagctttactgtttagttgatttcatttaattctgcatggaatttattcatctgtgaatttttaaaaactgttatgattaagta

SEQ ID NO: 13358 - DNA, 1029 bp, Homo sapiens
tggtatatggatatgtgtcctaacaatgttaatgtgtccatcctacaatggtctgatagaaagagagcatgcaagaaagagagagagagagattgagaaagagagagagagactatgtaatagtgggggcacttttatatatatatatatatctgtttgaggcattgttcattgatatgttgtcaattattctcaaacttagaagtgaaattccatgtttactttttttcctgcctatctagaatttctttgacagtttcttttcctttatttcctataactgattgtactttcaagcaatctcctgagcttgagaaagtcataaattctccctctgtggtcaattaaactggttggggaaaagtctcttgatttgccaatactggtggttattatagaatgtaggataatgaggttttgtgtttggatctgaatctgttaaactataaaataaatatattttttatttgtacattttacattttggatttgaatccattaaaaagtatactttggatctgaatgtgttaaaatatatttttgagcagtctccaaaatgaaagatagggtgttaagctttctgacagatatggtttggctgtgtccccacccaagtctcatctcgaattgtggttcccgtaatccccaggtgacctgggagggacctggtaggagatcatttaatcatggggatggtttccccgatcctgttcttgggatagtgagttaattctcccgagatctgatggttttatacggggcttcccctttgctgtgcacatatacttctctttgctgctgccatgtgaagaaggacgtatttgcttccccttatgccatgattaaaagtttcctgaggcctctctagccatgctgaactatgagtcaattaaacttctttcctttataaatcacccagtcttgggtatttcttcatagcactatgaaaatggactaatacaatgaattacaagtaaacctcctctatatgcagataggtggtttagttaccacaaaagtgatgagttc

SEQ ID NO: 13359 - DNA, 1083 bp, Homo sapiens
attgatgtttggggtaagaaaggctattttttttttagttattagtcatttttcaaaaatttatatttgaacatactttcatttttcctaagcaaaactttgtatgggtagttgatatttatttctagtatcatgagtcagaaacaatacctgaatagtacagagtttttattgcatacaacatattcaagagtcagtagtagacttctcataattgttctgcaaagacaaagcttaagtttatgcagagccagttcttaggttcccattttcacaagagtccctatatctcaaggaaaggatatgtaagaaggacatgggggttggtgtccaataccatagatttctcccttctgcgaggcaacaatgcttattctaccattgatacctgtagaaaacagatctctcgccctggctggcaaaacccaaaataaattctattggaaaagtctaagagaaaagtggtatcatgactaccgatgagttaaacctcccagcctctgctgagctggtccagttggtacctcacagtatcgtccactatagtataatatgtacatctagattatttgaaaatttgagtgcataattgataataaaaccaaaagagctttaatattaatcagctcctctcattgaggagtgagtacaatctcactgtgaggacacggtgaaatcttagtggtttcttaagtgggataagcatttcacagagggtgcaggaagaaaaaacagaccttaagtgtatatttattcagtctcattcttttatattactttggttgtagtaaggtatataaaatatgtaatatattagtgcaatagcacatacatataatttataaatacataaatatacatattaactgggcatttattcagattgtttttataagatatgcacaggatgaaagcagaacggaaaccctattacagataataaagatggtgctgttccataagaagtgcacagttataaaaaaaacacatttacagagaagaacacatagatacccaatataaaaaggattatagaaacccttaggaggagggttcacatatttattgcccattcagcaaaac

SEQ ID NO: 13360 - DNA, 1026 bp, Homo sapiens
tacttatgtagcaagtttcaggatttttcatgtttattatcctcttgtaattagttttctttgaattgattgctcatattctcatgtcctgggtgacatgtatttttggatcacacattgctacttgaattggcattttatatccttgaaatacaaggatattgtagtccactgtcatctttttggaagaattctgttaggggagactaaagatgccaagaccaaggagttagaaactataattgaaagtcaggttgtgctatagcattaaagttaattctccaaaaacataggcatggtccatcatgccactcaaggaatctttattactatgtcatgctccacttacagacatacataataatcttgggctacagtcacatgtatcatatctagctatcaaaatgcaaagtgaatgttagacaggatatagtaaaataatatctcttgaaatatatctatcccctagagattctaccaaaaatgggtggttgtttggcaacttaaaacttccatggacattaataataatagtcttatcctttacagtacatccagttctcagtacacacctattcagtgaagggaaagcaatagcttattaaaacatcaaatgagaaacatatgaattaacgaatttgaaatgaaatatcttaccacattccctcttatttttctttttttttccatgttgcttttaattttttgcctgggaggggaattaaaattttactacttaatatgcaaagctaccaataagatgctcaatttcaaaatgatattttattttccaatgaaaggtgactaatacagggcttagcaaccccattccttggggatataattagctagcttgtttacacatagcctgttgagcttgtaagtgtctatacacagattatgtcagttaccacggactggccatgtccacagtggattcccaatgtgtttttatgaatatattcactatttccagggctatccctggctatcatttaattaggatgcaaacaaattggaggaaat

SEQ ID NO: 13361 - DNA, 1053 bp, Homo sapiens
gcaattttaaatcaaactatggtctcaatggactcaatttcaacacgtcatgccatatgatagggtgaatgaagtcaatgcttaaaaatacccttttagttaccctgtatttccatactggattccaatgttcaaggtaattctttgcacaataaaaagcaattcctctctttaccagaaggtggcactgcacccctcactgtcattctgaggtgggtgctgtgaagagattattcaacaatctagaaagaagctgggctttagaacattttatttgaaataatgagacacatgtgattaatttcctaaagaataattttacttttgtcatattggggaaagatgtgcatactaagtaaaaatgaacagctgttgagaataaaaggaaaatgcttcatttagaatctattaatttctatcatcattgttcagtacaatattctcagacttaattactcatgtaaagaacagtatgactaaatgtgaaataaagttttctttactcccttcaagatctgttctccttctaaccacaaactgtgccactgacattttattatttattttttaacatagaaatcccactagggtaactaatttcattctgaaacccatttatttatgttgtgatatgacagtacctactttggctttttttttctctctcctagtcccacctcagtctcatgggagtaaataaatcaatcattactgcaggaatctctccttcgagagaacagggctctttaaaaatactagttgcatatgtaatatttaaacacctgatttttaaaaaaattcctgagacagttgagatagccttccatgcagttccaaatgtattgtttgctgatggcaggaggaaagaaaggagacagtgaaaagacttattgacagatgaaaggggctcaacttgattatattttaagaaatacaataggagaaattcatgttactaaaagcacaagcactcaattaattaattgtcagaatcaggagtaaaaattgcatcttacaagagagaaagtaaagggaaaggataagaaaaagtga

SEQ ID NO: 13362 - DNA, 1045 bp, Homo sapiens
cctatgctatagttacccaatacactgtctttattattattttaaacatttatcttctaggtacatttacaaaggaaatagagaacatgttgtcaaacctttattccatcttcaacactcttccttatgtagagtggagtttctgacctatataatttttttccctttaaataacttcttttggcattttgtcttagaaagtctttattttgccttcacttttacaggaaaatttcagtgaatacagaaatccaggctggtttgtgtgggtttttgttttccccttttcaatggtgcacatatttccctatatcttcttgcttgcatggtttttaatgggagtccactgtttttctcatccttgctgtatcagtaaggtgttccctccacactgacttctttcaggattttctctttgttttggttttctgcagtttgaatatcatatgtgtaggtgtttgtttctgttttttttttttttgtatttttctttattagcttctttttggtatttatcctgttgggtgttctctgagctttctgtatctgtggactgatatctagaattaattttggaaaaatctcagccattctgacttcaaatatttcattctgttgtttcttttttgctcgtgtttgaattatacatgttatactatctgaaattatcccccagttcttggatattctgttcttcttttggatttatagtttgtttttgttttccattaacttatctgtttgcatttttgtttgggaagtttctactgacttatggcaagctcactgattctttcctcatttacattcaatctgcttgtaaagccatgaaaggcatttgttatttctgttacaatgttttttatttgtagcatttcctttccattctttcttagagtttccatctcttttcttacattactcatatgtgctttcatgtcatgtttgcttttttcattagtgcttttaacatattagccaccattattttatgttacctatctgatgagtccaacacttgtgttaaatctcaatctgattttgt

SEQ ID NO: 13363 - DNA, 1016 bp, Homo sapiens
cccttgcaatcatgctctagccaagaatttcccacagtcccttgcaaagcatcaagtgtcatcctgtacccattccctctccacttagaaaaaccaccttcagtctttgccttgctgttttctcagtactctgtccaggcatcactgcctccagagagcctcctcctttccctccactgtcttgtctagggatatgcccatggcgtcctattcctatcgcacaaattatcactctgtcttaaaattgtctaactgttccatgatgtcttatatttattttttgttttccagtgctggatacagggtggggtgcataggacaggtcaagatacatgtatagaataaatgagtgagcagttgttactaattttgttaaagacatttttacattatttaaaacatccaagtaggttatcttaaggtctccttcctctctaatttttttttcttttctttttgagatggaatatcgctctgtcacccaggctggagtgcagtggtgcgatctcagctcactgcaacctccacctcccaggtttaagtaattctctgcctcaacctcccaagtatctaaatttctataccatttttaatatcattattagagtgttttctaacaagatatgagaagtgaaaggaaatctatttattaactagttcaaacatttatttcaccaatgaacaaacagagcagaaaagttaaatcattaatctaaggtctatcatatggttagcattatgattaagactagaattcttatctaccaatttactttatggggctctacttgattcacattatataattgctgagttggagtatgacattttaactcattttaaagccttaaatcttgtctgtacaattgttctatttgtatagtgcagaatagacagaaagtaaaaatttgtttaattgaacttcttgtaacttctatgtttaaaacccaatttcccacgtctcttgcaaagactttcattatggtaaacagcaaaaggggaattcacataggaat

SEQ ID NO: 13364 - DNA, 1055 bp, Homo sapiens
agtccgaaactggccaccctgacttaccttgccaggggaaactcaaataaaggcttggcctaaactttccccttgcttttctgtcttctgatgaccgtggtgttttttccacatggtcccatttggtatctcatgtctgctgcctacagggcctgtgagcacaataacgtttgtttctggagcctctccaccgcctcctcatatgaccacagctgaccatcacacaaaggaacatgaaaaactccctgtcccctctcttcaggcacccaagagttcagcattaatttcaaaaatgcaagcagaagaggctctggattcatttgtttttctactccctttttccacagggtatcgctttttagcagggattcctggcctttttgtttgttatccagaatatgactttattggcatgaatgaaagacaattattaagtaaagcaattatcttaaatattattagcaaaatataaacaaattgtgatagaacctatatttattttttcaacatatgaaacaataaaatctattagtaaatgtaaggactactttgattacaaaatagtgatttgtgatatattgtgaaaaatgcaaataactgtgatatgagaatattggatttctactggtgacaacgtcacagaacctcatacagcaattgtgggttttagcctacaaggtctgcgacatgatttctgccaacaccagtactggaactcaatatggcctctacctcacatatatttctaggtccctttctgctttttaacaagcagataaaccagaaagtctctgaatgggctgcagcagaaacagttaaggtttgtgattggctgtcacattaatgtttgcagtggaagtagtgagagaaggagatgggtaaatggaacaagtctagaacataatggttctccatatccccggcatatacattggcaacatcactcatagatgagactccataccaggcaaaaggtggaaaggtcccagtttagaaacagtctcaccttattttacacatgaaatctaatttctgcctcagatacagagaattaa

SEQ ID NO: 13365 - DNA, 1164 bp, Homo sapiens
ttggagtttttctattgctttattcactaacctaatgaagattgaggtattaaagagagttgtccatgtgttttgtgttgatgttttaatgcaatatagctagccccattgttattatttttgtgtctatttttcctgcttcattttattttttggtgtttaattaattattttataatttcattttttattttaaattcaggggatacatatacaggttttttacgtgggtatattgtaggacattgaagtttgggatacaaatgttaccgtcacccaggtagtgagcagagtacccaatgggtagtttttcagtcctttttccccttcttctctcctccctctagcagaccccactgtctattgttcccatctttatggtcatgtgtacttaaggcttagctcacatcggcaggtaagaacatgtggaatttgtttttctgttcctgcattaatttgcttaggataatggcctccagctaacaccattattttgaggctaatttacttcagatcgagttggtttaaatccaaataaaagatgttattctttctttatcctaatcagaaaattttaggaaataatcagataaactttacaattggcaaatcaaaggcagaactgcattaaacacccagatgtaaaaggtgtgacacctcttctactcttcttgtattcacttttaggcaagaaaacaggactcttctggaaggtaaaaatgcactcatttcccttttaagactcataagccattctggagtccactaatacctaaagtatttgtcaattaagcataattttgtctgaaatagcaagctttaaagaatacgtaaatattttaaaggaaaatagattttgaagaaatcaacacatttttacataagttttccaaaatgggttatatattattccactgaaggaaaaagaaacgaacatttattgagtgattatactgctccaggcactttcaccttggtttttttatttcttttcttaaagattagttttataagttctatctttttaaataaaggaactgaatctaagtgattaagatctccgtccagagtcatgcaaataaaaacctgccaacctcacttcaaggccatagttcctccccttggatgacgttgtctcacatatagctttttttcactgctaca

SEQ ID NO: 13366 - DNA, 1048 bp, Homo sapiens
gaaaacattttcactataaatttacttttggccaggcgtgatggctcacacctgtaatcccagcactttgggaggccaacatgggcagatcacgaggtcaggagatcaagaccatcctggccaaccccgtcatctactaaaaccgtgtcatctgtggtgaaaccctgtctctactaaaatacaaaaataattagctgggtgtggtggtgtgcacctgtagtcccagctacttgggaggctgaggcagggggatcacttgaacccaggaggcagaggttgcagtgagccaagatcacgtcactgcactccagcctggtgacagagcaagactccagattgaaggaaaacagtatgtgtgtgacatttatgtgttctctttgactcttcagtaaaaccaaaagatgctagggctcacagcaatgatctttgtgttcttctttgtatcgtaggagatcttttattgctgtgtccacagactgctaattgttttataaggtctcttgaactcttgcacagtgataaacattttttaactggattacatttcccattcttccttgaagttaggtttggccatgtacctaaattctggccaaaggaatttaagaagaaaagaggtgtgtaactttaaggttaaccaataaaaacaaaatgctgtgccttttactttactgtttcccacagctagaatgtggacattttgccagagttggagcagacgtttcggatcgtgaagtgggaataatcttgataagtgggatattggagtagtacctggtaagtgagcctggatccctggcctcctcagagtcaccatgctttgcttggatttttctgtaagagaaaaaaaatccccatcttatttaaaccactgttattttggtctttctcacagagttgtactgatgaccattttaataaactcttttataattcactcgtcctgaaataaaactttcttatagaaacataaaagtaagatatgatgcaaatcagtgtataaaatgccattatgagaatgttttatggtgttccatgtgacatttcc

SEQ ID NO: 13367 - DNA, 1056 bp, Homo sapiens
ttactctcatcaaaggtcagtgtgaaacattctagtctttcctcattcatcagaattatgacctaagtttccaatcctcctcatgttggtggctctaaacttctaaaggaactctaccactgaaaatagcacctgcttaaaactctgggaaattcagagaatgttgtttcaggcttactctgccactgttttatgccttgagtcttgctaggatcattaattataacactttgtagttaacagtgacttattggcctacatgatcatgttttcattacttatgtaatgtgacattatttaacaatctcttatatagaatttactatgtgcccatcacctacttaaaaattattacctttataatatcaccttactgaattcttccaataacttagtagatactacacattaaccccattttatagataaaaaggctgtgtgacaggaactttaataaacttacctaagggtgactctactagtaagtaatgaggctgcagttcaaacccaggcactctgactccagggtctatatacctaacttggctcactgccttacagtattaaacattcaccatttattttgaatgaatgcatgcaaaatctattctttcctcatttcatatatatatatatacgtatatatatatatacatatatatatatacgtatatatatatatatatacatatatatatatatatgtatatatatatatatatatatatatacgtatatatatatatatagtctggtattattaatcactatatacatatatgtatcccttccagttttgcatgctaaatacgtttctattttgttccaacgtctctaattctcaatatcactttgactttggattttgtattctcaggaattggccatgctaccaccattaaatggttcatgcgtttatgcctttttctgaacgttttctggcaagatatagttacataaaacacagaaactaaagtacatgtcttggtttctttcagtatactaggcctattgaaatattgggttagtccaacaaagctcatgctggaaagttat

SEQ ID NO: 13368 - DNA, 1051 bp, Homo sapiens
tggcttacatagtcagggcaagccgttatttcacataacaagaagtcccagtgcagagtcttgcaggagtgagaaagctgtaagcttgcagtatcaacagggtgccaggttctctctgtcttttggctctcagatccttgttccaccagatcacctccaaataaacacaagatgatggctagagttccaggagctaaggcctcatgacaatgcctagaggcacagaaagaaatgatttcttcccacatgtctcttccttgatgaggcagacaactctcaacagtcccccagcagagatgcccacccttctcattttagaattgcctcctatgcctgtacctagaagggaaggcaaaggatatggtctttcagctggaccctcagatgggagctgatgatcatagcatggcttagctaatcttcattatccttttttttgttattcttttaaatttcaatagctttaggagtacaagtggttgttggttacatggatgaattatatagtagtgaattctgagcttttagcgtacctgtcacccaaatagtgttcattgaacccaagagcaaatttttcatccctcaccctcttcccaccctccctacttcttagtctccggtgtctattataccagggatccccaacccccaggccatggactggtaatggtgtgtggcctgttagtgactgggccatacagcaggaggtaacagtaggcaagtgaacatcactgcctgcgctctgcctcctgtcgaatcagcagcggcattagcttttcataggagcatgaaatctatcgtgaactgtgcatgcgagggatgtaggttgcgtgctcattatgagaatctaatgcctgatggtctgaggtgaaacagtttcatatccaaaccatccccaccaatccatggaaaaactgtcttttatgaaaccattccctggtgccaaaaaggttggggactgctgcattataccactctatgtgcccctgtgtatgcatacttatctcccacttattagtgaaaacgtggtatttggttttctattcctgag

SEQ ID NO: 13369 - DNA, 1098 bp, Homo sapiens
atataagaatgaccagtgctgctcatttttggatgccatttgtgtggaatattttgttccactcctttaccttgagtctataagaatctttacaagttaagtgggtctcttgaaggcaacatatacttagattgtgcttattaaattaattccactaatcttatgttttaagtggagcatttagatcatttatattccaagttaatagtaatatattaaatactattccagtcatcatgttgattactacctagttgttttgtattctccatcatgttactattttataagcagtgagttttatacttttgaatgttttttatactgttgcgtatagaactttcattctgatgtttagaattcctttgagcatttcttataggtccagtctagtggtgacagattctctccgagtttgctttactgggagagaccttatttctccctcatttatgaaactaagttttgcaccatacaaaattcttggtgaccattactctgtttaagaagactaaagataggattccagtcccctctggcttgtgagttttttgctgggaagtctgccattagtctgacagattttcctttataagttttgatgcctttgtctcactagtcttagaattatttctttcatgttgactttagataacctgatgattacatgccttactgatattctttttgcaatgaatctcccagagttctttgagactcttgtgtctggatgtttaaatttctatcaagaccagacaagtttgcctcaaatattccctcaaataggttttccaaactttttactttttcttcttctccttcaggaatacctatgattatagggtttggatgttttagagaatcccatatttgttggagactgtattcatttcttttgattcttttttctttgtttttgttcggttgggtaaacccaaaagccttatatccaagctctgaaattatttcttttgcttggtctagtctcttggtaaaacttttcactgcattttgtaactccctaaatgagtctttcatttccagaagttctgtgttttgttttgttttgattttttgattttttaaaatctatctcct

SEQ ID NO: 13370 - DNA, 1188 bp, Homo sapiens
gaaagaggttggcatttcagtcttgtggacttttgggaaaaaaatgttaaacataactgaagagcccttgtcaaattggaggtttttccattttaaaaactagagaaatagtatgtcttttgatttcactttggtccaagcagcgcctcatatttccactttccagtggtaactagcagaggtaagagaaaaacagccatgcgggtgagtcatcattcctcactccaggaaatggctcattttacaagcttttggaaggacctttgggaagttgtgagctgccaccatttttgaattgaaaatatacatatgttgcaactctgatgtaaaaggcatatagttcctttttcctccacctcttggtttctccttctccttctcttcttgctcatataacctgtgtagttttccgcaggagctcccacttgatgggtaacaggagaaaacattttagtctgatctagttgaaaatgtagtctgatcagttttgcctttctagctgacagtcaatcaagtgggatacttgctgtggtgcagtggctttgactcctggctcctctacttagccttttctgaacctctctgtgccttgatttttccatctgtaaacaggggtaatagcaattcctatctctcatcactgggattgtgctacacgaatgaacacttctaaagctcttagaatagtatctgacaagtacgaaaggctgtacacatgcttgtcaattaacacagagtagaggaggaaataaatctcttagattgcggagtgataaaggagtgactctttctcacgaaagaaaactgagggtcctagggctctgcccatttccagggccctgctggcctgcatatctgggggtggtatactttgtgatctgctcttattcaagttgggaaggaccgggtaactagtccccttcctttggtattcaccctcacattggcctttctgggcatgaagacctcctgagtcactggtttgtcactcaactggcctctggcccacctccagccttgatcacttggcatggggggaccatgacaagcctctggtttgcaactccgctgctttctgagttcttcccaggagggctctagggattgctgagccagaccagtgctacccaggtgaggggtgtagctctccctctgagtactctgtgccccaaagttgaccctaaagtt

SEQ ID NO: 13371 - DNA, 1030 bp, Homo sapiens
tgagccaccacacctggctatcctgtatactttaaatcatctctacattacttataatacctaatacagtgtaaatgctatataaatagttgttatattatattttaaaattgtattattttttatgattgtattatcttttaattttatttttttttccaaaggttttcacccctccatttgttgaatccaggatgtggaacccatggatagagggcttaccgtatttagaatagaatatgtgaatccctatatagtaagcccagtcttcattcaccaacactttttttataagaacttcataaaggatgataagaaaatcagattatgaaatttcttagaggtctactctctgagttcttaaatctggcctgctttattttagacgccaaacatatggccatagctcattatatgcttaaatgctgatgcatttcaaaaccattgatgctactctgtgaaggacctgagaggaaattatagtaagatatatggttagaaagatagaagctgtaaagtgaaattctgacctttagaaagagctgccataaactttaaagaaatcaatgtgtttgttaagagctatatttaagtttccttttatgtatttaatatatatcaacatatttgtatatattcaagttgagcatccctcaactgaaaatcggagatccaaaatgctccaaaactggaaacagtttgagtactcgcatgacaccataagtagagaattctacacatggcacattggatttccgatggctcagtatgcacaaccttcatttcatgcacaaaattattaaaagtcgtatttaaaattaccttcagcctgtgtgtatgaggtgtatgtgaaacataaatgaatttcatgtttagacttgtgtcccatccccaagatatctcattaagcatatgcaaatatttgaaaacctgaaaaaatctgaaatttgaaagacttctggtcccaagcatttcagataagggtactcagcttacactggtgtatgtgtatatgtctatttcaaatata

SEQ ID NO: 13372 - DNA, 1033 bp, Homo sapiens
aaactggcagaaatgatgctgtaaagttaagaaacatgtgcttcaaaagtagaaggaggttgagttcgtaagacccagtacgttcattaatacaaaggaggaaagggaataaatactgttaggattcatatggccaatatttaattgcctccatacagcatagcctatgttttaagtgctttgagtttgaatatagaagctgagggcattcgggcatgaatattttgtaatatgcatatacagtttgtattaaggttttctctcaatagaataaggaagaatgactgttattcagttaaatatagttaatgttaataacttgatcagaatttaaggagattaaatgtcagagttaagggcctgttggtaaatatcacttatagaaggcagaaataatagagaattacatatagccttgtggcttttgccactctataagtagtaaaatgtgatttattattctgtattctgtcgtgtatttctcaagaggcacaaagaaatgatgacttagaattcctgcataaaaatgaactgagagactcatgctttctggatatgaaagagattataaacagactataacacctactttagtttattgcttactgatctataaagaaaataacttgtaaaacccaaattaagcaggagtaatgatagttcactaatagcaaaagccagctgtgctggtttcctttaatagtgatattgtagtattaaaatgtggagatttacatgttagatctttgtaaatataaagaagatttacttcttaggatcttgatgaattcaagtttgttacaacctatttcatttaaggataaaaatttttagaaatgcaattttctcttaaatgaaaatttaagattggactaatgtagatcttccaaaaagatatgcaccaatgccattaaaagcattggagctgctaccttgatctcttggatcactcattcatcgttttccacaggagagggtttttttttttaatttactatagactttaattcttcataaagaaattcacgccagt

SEQ ID NO: 13373 - DNA, 1031 bp, Homo sapiens
tagttaatttttttttcgcttgtattagggaaaaataagctgtagttttttacttgatatgaattcttcatttgataatggggtaaattggattgtataaactagaccactttggggcatattatttctgaaatgtgactagtttgaataagataattatagttcagtggtaattttaatgacttagctttgggaatatgtaagttgtctttagatggcagatttaccaaatgaataagataaacaaaactaaaactggttagggatttaaccatgatatataaatttattttacattctaacttgccttttaaaaattccaatgatagtcacttcatttgagaaataatttatagaccaatgaatgtgaaaaattttaagcactgaaatttgagaggaaattgaagaatgaggtgattcattgtctgtgtgtatatatatatatatatatatatatataacttagaaaatgtttgaatggtatgattagaatggagtcatagtgttttgcaaaacatggattgttgaaatacaaaaatccaggttttgaagattattaaataattcatgtaagatatcagagtggagctccaacaatttgttctactcttatttggatataatgtctgtgagtgattccgtaaatgaggtcataaatattcatctattttatcactggcaatagctgagaatctctgaacagacagtggaccacagaattcagaccctctatgcctgtgcctatccattgacttatccaactttatttccatgttagataccagcagttcagaaacatttgtatttcccagctgcggaaacagaattatgcttctttctattaggatttgaaaaagctggtatttgattatccataaaatgcagtaaggtggtaggttttattctcattaaaaatgtaggacaaaggaaaaataggcagtgtttaaggaaaagaagttttttacccttctcaacaaaagctgaaatgcaacaaaagccgaaatgacctgaaatgcaacctgtaaagtcaa

SEQ ID NO: 13374 - DNA, 1092 bp, Homo sapiens
acataactttattgtggtaaatatcttttcaatgtactataagttttctaagggcaggaatcacatttctttagaagctgagtgcctagaactcaatagaagctttttgaataaatgatgggagaaattttcttttattgaaattaagggtttttatgtttgctttcctaccataaaattagagtttagtcccttgatgctgtgcccttctctttttaatcatactccttattttgaaaataagtgtatattatatcccagtgaattaaatatcttttccctctttactatagttcctggaaagagtatattgatactgtaataatatttgttttcaacagtaataatttgctggtaaaccttatatttgcgttactggctttacagtttatcttgcaaaacatttgcttcaggatcttattattttagacaacaagtgctgcagagggaaatagaacataaatacctagttccagatagaaagtgccacagtgattcagtttcattgtgtgagctgaatagagatttttttttaaaaagtttgttttatttttaattgtggtaacaaatacgtaacattaaatttgccatcttaaccatttttaagtgtacagttcgatactattaggtatatccgcattgttgtacagctgacctccagaatttcatcttgcacagctgaaactctacgcccattaaacatggattctccctttttcttgcatccagcccttggcaaccacctttctcctttctgtttccataattttgactacttgaaatatatcataaagaaatattcttataagacattttgatacattagtttttatttgtgtttatcattgtcatgtggatcatttaattgctaagtgacgttttcattcttattcacgtacaataaaaccagttaattcttttttaattagtgtcatgaattttgcctgggtaaggataaacagtaaaataataaagcaaagaaaaatattttatataatttgtaaagcagtgggtatatttaggatacaaagtagcagatatatagagtgaacacatctagggctataggtaataaagttgtattatatgcgg

SEQ ID NO: 13375 - DNA, 1024 bp, Homo sapiens
tctgtgtgttatcttgtaatttcaagtgtggatattttaaatcctgaagaaatgggatcaaataagctctcagtagtgttctatatcaactgtaatttaacacatctgtccagaggagtagtgaataatgaattacactaatcaatccagataaaagagatttaattaacattaacatctcctcaaagtctttaaaactttcttttttttctttctgttttggtattcagggattctaatctaagggtcctttgatgatgaaagaatatttttaagagagattttattaaaaggatttgtgatatttagatgtatgtaagatgaaacttttctccaattttttaaaaaggcacttcataaaacataaaaaggctgtcagtattatcacttcgtattactttataaaaatatctggaaataaaagttgttgtatagggaataaacatgctttgccaaattttaattaatatgtattcaaaaaattgatgatgtctggataaccaatgagtgaccttcagtgctttgtagggcaacctgcaggcatggaggctcagcaataaatacttagcccactaaggtgattgaaggggttacaggtgttttctgcaaagtggttaaaccacttcatgagtaaatgtaaatcttcatacagacctgtatagggcagtctacaaccacaggccagttacagtaattaaacaagcaactgaagagttatgacaatgagagcagtgaaatgagaatctgaatatggtcttttcactatgtggggaagtcctcattttggtctaagatggaagcaagagaagagaccagggttaagagtgacaattgccacagatagggatgttatactgacccataactggattttatcggtaccacattgaagccttagtgtaactaatactgatgactttattaatgctaacactgcaacgtctttaatgcacaccagcaggagacaaggggagaaccctaacctgggagtcagaatgcctgactcatattctttcccaactca

SEQ ID NO: 13376 - DNA, 2178 bp, Homo sapiens
atgtttggttctatgtttagtgagactccatctctgcaacacacactgtggcctaccatgggggagggcatcaggataaatagctaatgcatgtggggcttaatacccaggtgatgggttgatagatgcagtacaccaccatggcacacatctacctgtgtagcaaacctgcacatgtatcccagaacttaaaatttaatttaattcttaaaaatgcaaaataaaaaaagaaattagctgagtgtgttagcgtgcacctgtggtcccagctacttgggaggctgaggcaggagtattgagtaagcccaggagtttgaggctgcagtgagtagtgagtgcaccactgggcaacagagcaagaccctgtctttaacagaacaaaaagtaaaaagtaaaaaacaaaatgattttccccaccctccccccttcacctcagctaaaatgtcacctcctccagaaattccttatcatttggttgtaccactgtttgctgcttaccactgtcttaagttgtaattacgtatggtcttctctctaggtagggaacaacttgagactaaagacgttgtgactcacatgagtttgtataaatgaagaaaatgcgatgggacataagtagggtgtggggagagccttcatggggagatcatacttgacctgagtcttcccaaaagcaatccctctgtcttacaatacagctgtcaccacaattggcttgataaaatatggagtaacaaatgttaggttcacctagactaatcttcccttcctatacatgaagtacttggaggaaagagaaagcagtaaagtgattttccagagtcacacattctgacataggcagtgccagaccaaaaatcagtcacttcccataaggtggatatgcacactcacagaaagaacgagcctatgcatagaatgatctcattttcaagtaaaataatttttgagatacaaacatcagcaatgacaaccacaccccattccccagatcttgcatgtacccagatttattataaatattttgtgataaactctaatcagagcccagtccctcagtttaatagtcatagatttcaggattttgcttctgcttatcttcccaggctttcttcctcttctgtcttcttatggactggagaagtccttgtccttctagcaggcaggcacaccactttgggtttctgtttgtttttgtgtttttcagacagggtcccactctgtcacccaggttggagtgcagtggtgccatcacagctcactgtagccttgacttcctgggcttaagcgatcctcccatctcagcctcaccagtaactgggagtactagcacatgccactaggcccacctaatattttcttttttcttttttttttttatagggatgggggtctccctatctttcctaggctagtctcaaattcctaggctcaagcaattggcccgcctcagcctcccaaagtgctgggattgtaggcatgagtcacctcgccccatgggtttctctgtctttttcaaaccatcccctgcgtactgcctgacgtggattttctctctctgggagtctaggttaggtatctctcaagctttctctgatcaaagcagatgcaatcccttccgttggtaccacagtagcacttttctcttagggttttttttttttttggaattagtcacatggtgtctcatgtaatagttatttttgcacttctgttacttgcatctattagattgtgcacttctggtggcaggcattttatgcaaccatctggactacagttccttggactcagtaaagatttattgaatacatgatctcatggggtcatttgtttctttcaacatcttgtttccactactctccataaaattcataggttctctagtaatgagcacttcccttttatctcataaatacctttaagtgactatctgccacttgcaaaaatatctaaggaggggaattaagtgattttgacttctaataaattgacagaaaatgttttaaccataaagattcaatcaatacaaccacttttaatacaaactactgttttgaatgtttgtgggcagtgcagagcaatgtaatatattaattcagccttcatggaagctaagtacttagtggaggaactaatttaaataaagtcagaaaacatgaaaatgtggaaggaaca

SEQ ID NO: 13377 - DNA, 1023 bp, Homo sapiens
gagccgagattgcgctactgcactccagcctgggtgacagagtgagactccatctcagaaaagaaaaatggttattgttagacaaaaagctgcctgagggcataacttataattacatatccttagtgactgagaagtaactggtgcatagcaagtcctctgacactggctgaaattgttgaaccaaatttaaataattggatctatagtcatgtgttatttatttatttagagattgagtctggctctgttgtctaggctggagtgcagtggcatgatctcagctcactggaacctctggtttctgggttcaagcaattctcctgcctcagcctcctgagtagctaggattgctggtgtgcaccaccacagccagctaacttttgtatttttagtagagacagggttttgccatgttggtcaggctggtctcgaactcctgacttcaagtgatctgcccgccttggcctcccaaagtgctgggattacaggcgtaagccactgcactgggctgtcatgggtaatttaatttctgaaactttattacacataataggactgcatttataatcttaatttttttatggctaagaaaatattaggaagaaagcaaactgcaacaatgttttatatgtatttagtttatttcagtgggaatactgatcatcattgtaggatcataattgaataatttatcctcttaaacattcctgtttgagagaatgctggttcattcattcagtcagtcatccattttttgatttaatgggcacttattgagtaggtacttttttaaggaaactactatagtggaacaaaatactgaactggaacaatgaactggaaaatacaacagatccaaatattttcctcccgtcaaagagacctttatttctttttagaagaccatgctgcctaggtatattggacacaaataattcttgtttacaatgtaaatgatatgctttttgaaaagaatttaaaggttcttgatataacaaattgtgactttttaagtataaa

SEQ ID NO: 13378 - DNA, 1071 bp, Homo sapiens
accgtataaaaaacaatgcagctaattgtttccagtcaagaaactccaccaggcctcatcttccttcttcctgcttccttctacgtcagttcccaagagcttggggttttgacttttttgttgaagcctctgccaggtccatctccgtggagtgagcaaaaccagaatcaccctcaggaggcactttggaaacacaacattcacatttctgtattaccatgtcgagtggttgtcatgaacttgtagtgattggatattaaagtaactagactttctgcattgctcagagatgcctttagtccttaaagcccttcaaatatccttcaaaccagtcccataaggaaaatcctgtatataattttccggttttggaaagttagtctactatatattaaaaattattttcccatggttttattataccataaactttttgaaaatgcgactaccatgtccatggagagaagacgctactttgttgcattctatattttaggagcattgtgcgctgttgtaactaatcataatatgatggctacactcgttttggtatttgaataactgatatgacacattgcatcatatctgtcttctcatcttcctcgcctaagcatttaccttctaactactactattttattataaacaatttttacaaactacgaaatccttttacagtttatactataatgaggacttttatctgatgaaaaaatattgagtaggtagcttacgttatctaagaatatcctttctgatataaaaatgaagagttgggtctcaaaggattcactgccattgtgtcatcactgcctgtggaacccagaaattgcattacccatggccctaaagtctagacctccggcatcagaaagggtagggcaatgccagctgggactcactatgcttatggaggaaattttgacaccttttctatttctggaaggctttggttttcagataatttttttgcaaggaatgagatatgtttacctgtgtcttaacatgcattcattttacatttccctgtgggagcacacagaagaaactaacatttcctttcatgtgatg

SEQ ID NO: 13379 - DNA, 1031 bp, Homo sapiens
tttagttgagcaccttgcaatacttctctggtttagaatactgcagaaactcaatggttctttctcatgctgtgtgtgattttgctttgtttaaaacctgatgtgcctaagtagatttaccttaccagtagatggtttaatttgattttaatgatattctatttggctctataaactgtactgaagccagcgctgccatgctgttaaaaatgtaatctattctataatggcattaggtgataatgaaagcagatattagagacataaccattttcatatttaatagagaagcaatgtgttctaggtaatgaagttaagacttcacatgacattgtcagcacatgttaactctatgttttggaaggctgctttttagacctaagtaaatataattcaaaatgcccctatacttgtttatctattagatgctcttgttttgttttacacatcataactgccaggatcatttatttggcagagcctcagaataaaaacaactcaaaccaaccaaacaaacaacaactaagaactaataaaatctttgaagcttgaaactgtagaaatgaggtaaattttttttttccttggataactacttccaatctagtatttgaatggcaaacaactaagcaacatttgtatgcttttcttttgaagtaaggtggaaacatttttcatcagtttttcaactgttagttggaatatttgtgatcactttaaagtgtgacagtaatatgaaactcctgagatgaccagcagcatagcctttagcccatttgtgttcattttaaatatgcttttattgaataattaatatgtctagacactttattgtgaaaactagaaatttttcctatccactccggtgtaacccgtgtaaatagtttcctgtgtataccctctatacattttccatcatatataagcaagcatgtaatagattttttttttaaagagacaagatcttgatatgttgcccaggctggagtacagtggctattcacaagtatgatcatagtgcactatagcct

SEQ ID NO: 13380 - DNA, 1003 bp, Homo sapiens
cattgaacttagagaggttgcatacattggaacaccatgcacagctgggggtggagtcagtctcacaatacacagtgagatatcccatcaattacttccgatagcactggcagactggcctataactgtcccctcatgcatctctacacagattagtgaaagctaattttctggagaaactggctccagaggaaagagatggtgacatttgaagagtcaggtcacatttgaaaatctgttcactctgcagtgaaaccctttggttgacaagctgcagccctcgtgcatagtgttcctaggctgtttattttctcacttgtaaatatgtataagaatcaccaagtgtttggagtgtgctctgacaagaaataaataggccacaagaaggggaaaaacccactaaaaaggaaattggagaaactaaattaataggtatggatcagaaaaaatggcttaaataagcaagagagaatgttaacttagagaaataaaagttgcatccacaaaacagaatgtgatgctattactgtcagagctaatgaagaacaagagagaccttgtgagaactaaaactttggaagcaggagtaaaataaagagtagaagcatttgagcattaagggtgtatcctagaaaatagaacaagtagaacatatagtatccagcttacactgttttcagaaaaagagcagaacaaataaaataaattctcaaagtaataaaattaagtcccaggacggaaggaaaggtgcttccacatgctgagtgcattgccaaattaatgaaaaatgggtagaaacaaaatcgcaaaatttcagaacgctaggcatgaagaccagatcacagaggcctctagatgagaaaaatacatatgtatttttctccttcatatacaacatatgaaggattaagaatccaagtgacataggatatacatggagcatagtggaaactagaagtgaaagaaaatcgcaaaacaatagctgtttgacagctctagggaa

SEQ ID NO: 13381 - DNA, 1114 bp, Homo sapiens
cttggatttgagggttctaatcttatctcgtgctgtatatagtgcagattttaagtttaactaaaaaatccttctctgattccagcgtcaaatatactatttttagaactgtagttgaatgaatttagcacattttccagcaataacaatagaatcagaggttcagagaattagggttgaaatggaccttagaatgtgtttattttaaacccatcaagttcaaataaaaaatgatttttcttaaagcaggagcatttatatttctctctagaaaatatcagtaaatacactcatctaataaataaaagaagttgcatcactaaggcactgccccaaatgctccatatctgtgagcagactagacaacaaaatacaagttgcccctgatcttttaccaagaattctcagcccatttcaacatctagtgtgagaccagcattagctacctgctggatgggctttctggtggggttacatctagaagtacagaacttctcaaactctctgtcgtgatgaatcagtcttcctcttcctcccttcttccccctcctccacctcctgctctcttttttcttccaatccattgcagattggttctctcataaaatacagctaaattaatttatacaattgtataaaaagacacataaaatacatgccccaaattgttattattagatctaatggacaagaaaacgttgacttgctaccaaaatttctaagtttattcttttttaaaacttttaagttcaagggtacatgtgcaggtttgttacgtaagtaaacttgtgtcatggagtttgttgtacaaattatttcacccaggtattaagcctagtacccattagttatttttcctgatcctctctctctttgttcaccctccaataggccacagtgtgtgtatatgtgtcaatgtgttctcatcatttaaatcccacttataagtgagaacgtgtggtattcagaaccagaaaatctaagttaattcttttttttttctttcttcttttttttttttttttttttttgagatggagtttcgctcttgttgcccaggctggagtgcaatggtgcattctcggctcactgcaacctctgccacttgggttca

SEQ ID NO: 13382 - DNA, 1030 bp, Homo sapiens
tatagacaggatatggtagaggctctataagaatgcagatattctgattccaaaatatatgctcttaactaaaactaatgcatcaagtcgactgaaatgacatcaaatacatccttgacactaaagggagcacacaaacggaatgcctgcctttctggtggagatgcttatgttgcagctaacaaagagaacgaattcttttataaatgaagtttaggatcacagggtttccactacccttctggttatgttttccaaggctgaaaatggagaacagtttggagcaggaagagtggaagtttataggttctgttttccctctttttcttcatggatctttcatctccccacacactattgcagcccgcaacctcagatggagtgaaattctcagcggaattaaatttcagttgctacccttaataactgtagagaacccctttggaaaggcctccctattacccttttttgtttgttcatttttcgctaaattaaactttaatattttataacatcacgaggaagctactgattttaggaatttggattcatgttttcttcttccttttctcttctatacctataaatcagcaagtaacaaaacgagtgatttccactgcaaagtcattatccccggtgagttgaatatgggcattgtaattcaccagcagctgatgactgagtggatctaaaggaagaatgaaaaggtagatcttaaggatgaattacagctgtaataataatttattccacaagattcacatggaactgaaatttatgacaggcagccagaccagaaaatcaggaagtttggattttctcttcttcctaatcagtttctccacatcttgttctgattagtgccctcgctgagtctccttacaggtatctctgacccatttccagtagaccttttgaaattccactgtttttcaggcagtgatttctgcctttgctggattttagaatataaaagtcattcatctgtatcttagaaggatgattcacatatttatgttctagaaagtag

SEQ ID NO: 13383 - DNA, 1044 bp, Homo sapiens
ttgcttttatgagccctagagggatttgttggtgggagggtgagcctgacttaaaggttcagggtggaaaggacgttggtcttgtttgaaaaacgttgataaaacaaaaagaagtccactactctagagccctcgttgttggcagctgtgccccagtagcagttctaggagggggaaaattcttttgttaatgctgtggttccttgacttcagtttggtttgatgcaaataaattctttcatgtgtatctcctgatgaacaccctgattttaaatcctctgttatgatcttaccaccaatcttctatttaaaataggagataaacaaaatgcttatgttatagaaaagagaatgtttgtttgccacataatttcctagagaaacttccaaactgaagtctattcttcaaaagaagcaccttttgttacaaaggacataaagaggtagggttgaaaagttaatcatacaaatgtgtattttaattcaagtaaatcggttgtattttcctgtggaataacattttcaagtgaatatttgtgaaatagcactgtagatttaagcccaatatttctttttctaatttgctttttatttgcattcaaaatcatggccttgctttgaacattctaaggtattttaaaagcctgtagtgactgagcctttgaaataatatagtaagcaaaatataagtattaagactttagtaattatcctggcaaaggattgtacataattatatagttttgaaatcagaaatgaccaaagaaatgattctgctacttgatggcttcctaatggctagttgataagcatgaaacaccttagcatgaagtaaggcactagctccaaactgacatatttaattcatcctctggctccattgtttgctccctgcgtttcttctatgacaacatgatgccgctgttgttcttcctccagcactggttggcctttgctctgctccatctggaaatccccactcactttcaaagactagtttccatataacacaactcttaattcctcagttaattgctccctatt

SEQ ID NO: 13384 - DNA, 1085 bp, Homo sapiens
ctagtttgcttgtgattaaatcccaagcttgaaaatatatgttgcatatgttagaaagctattgcacaaataaggacttagacctgttctctctctctctctctctctcttttttcttttttgtttttgctcatccccagattccctcaattttccacctagaatttgtcatattcttttttgcttaatgatcttcagcatgttccattgtccctagagaatggcattcaagaccccatgatatactcctgccactggaaacactttctctccatccctgcccacgctctcttaagagttgtggttcatagaaagtcaacattaattttttttttcttattccttcctcactttttatatagcaaggctcagcacagtgtgttatgtatagcagagactcagtaaactttggtggaacttaaaaaaaagagttgtctctctttatgacattttcattttagtaatctctgatattaaactcacatttatgctgtttagtcatgttctcctgaatggaaccccttcccctaacttttccaaacatcgaaattgctcctgcaaggatcctttcaaatattactacctctataaagttttatttctacctgtgattttatttcaccagaaaatatcattttctttcttgtattctaatagcattttatgcttgtaactgtcatggagctcatggaatttgatcatcagcatgcatttacttgcacgccttccacattggaccatgagttcctatagaaagtggcccagccttactcattcttaggtttcttttatatggcttagaaccccacacatattatagtaagtattcaataaatgctgattgaaggaactggaaccttggtgattatgtggttattgcctttattgttttgtaagtgaataaaaacaatgttgctctaagaattcatttggtgattacctcaatgtcctcatcagcccctgatagttcctctcttaggttattggtttcttgctttctattcaaatgtaatacaaacttaaaagttaatgaaacatattttcaagttggtgaggctgataggtccagaattatttcctccatt

SEQ ID NO: 13385 - DNA, 1048 bp, Homo sapiens
cctactcaacttggaagcctgtcctttgccaagtataattatatggtattttatgaccctgtacagagtgtgaaatgtatattcttagcacaaactggcagcattcctaacactgtaagatgctgctaaggtatctgaaagggattatatgaaactaagcatttttaatactttggaaccagtgttgattcttccaatagtaaatttgttctgggttcctttctggtttgctctgtgccagcccccatttcagcactttcaaactacatttaggcagtagcttttcagtacaccttgaattagtcccaaaacacactggagcatggagtgataatgaaatagtataaccagagagaaagatagcatattaatagaaccacccacaagaaagaccaagtccactgaagcaaaaacgtatgttctttttatgtttaaaaatctcatcacagtctctcccattaagctttccttgcagagttttcaaactaaggagtcacatttggatctggtctgggatggagtgctctctggggaggcaagtctgctcagaatgagtaatggtgatttgagaagtggtgtgctttgtttcatatgctacaaactccacttgtcttttcagaaatcaattgtgcaatatcttcattttctttcttactgtcttctggctgtagcaagggaggagtgttgaggacatgagtagtctgctttaacttgtgaatctgcaccccttaccctgagctagagcaatagccaggtgagtgcagggtttgtctcaagtatgacattatattagggtatggcatgtgtggaataatcattaattaatggcagctagcatgcactgaacacttgctataatttaaaccaggtcctatgccagatacttgacatgaattatctcatttaatgttcccattaccctcgagaggcagagagttactatctgcattctaaagacttgactaatgtttctaagatcacaagatgatgaggtgatagaattgggattaaaaattgagcctgtctgagggcaaagcctgtgtacttg

SEQ ID NO: 13386 - DNA, 1049 bp, Homo sapiens
ttttcatgtgcatgatctgaaatacccaaggggagtgtccttgatggtgcgtgttctgaatggaaaacctgaaagtgccggaaactgggagtgagcccttagaagggcttgtgcatcttctcttcatacacctattgcaatttgtaatcttactctttgtgttcacttgttttaacactgttcttctttgtcctgtactgtaatctacatgaatgcagaaaccatgcctgatttgtttcccctatgacccagtaccttgtgcagtgcctagcatatggcaagtacttcataaatccgccttgagtgaaggaaatcaataaatgaatgtgtgtgttctctctgagaggatacaacacaggaattcacatccaggcttaaaataattattaatatttcctacgcatacacgagatgctgaagtggacagaaagtttcaggtgacaagatcagaaaagaaatgtgagtgtgactcatgggtctgtcttttcatgctgttgaacatatttacacaggaagaatgaatttcttccctcggtaagtccagagactgtgcaaccacgtggacttggttctttctgaggtgtgccagtgcccctcaaggcagtggtgtttgatgggctttgtacacatggcctcctgcccacaccttccgagcttcccaaatcagtgctgcctaaatgcctttgtccaaaaatgtgtggatctctgtcttttgcagaggactgcatgtgtgttctacaagcttcttttagctcagaaggaataaatatgttgctagaacttagggagtttcaggtgacttgaatactgatcagaagtaggcaagatacaatgggagtcttatgtatataaaactcagtaaattgaaataatcgcataaagctacctcccatgaaagcatattctgattgaacatttcaggactggctgacaaggtgttgacctgcaggtcttaaagtggttgacggggagatgcagctagccatttgagggcttggggctactgcaatctcttagagatttggttttctaagctcacctcttccgac

SEQ ID NO: 13387 - DNA, 1024 bp, Homo sapiens
atctttataatgaaatgtttgaagtggtaaaaagtcatttccaggtggaatgttcttagtttctaatgtaatgcttttatcattttgtccgtgcacactggggtgcatttccttgaatggaactgagagtgccaatttgattctatgcttgaatcttaccactgaaattttctttaacctcaatataatccttttttttttcttcaaggataagtaaactgatgtttgtcagacttaaaggagacaatgaccagggtaaaatgaaacaaaacagaacaataaaacagagatatgttatataagttatctactggtgtgtaataaactacttccacatgtggtgccttttgaaacatcacacatttatttccttcaatactgctggacggtggggtggatcctctattggctttgcctgggccccttcatgcagctgcattcagccacagggccaattagactggaaagtcctagaggccccactcccatgtctggtagttggtgttgggtgttcagatgaggctaaggctttattgcctgcagtgttagcacagaaggtgaagacataagccacaagtcttcttgaagcttagattccagcatttgcatagtgtcacttctacattctattcattaaagccagtcaaaggacagcccaaattcaatgtttggtgaagtagactctgcctcttggtggaaagagtgatgaagaatttgtggccatgcttaatgtatcacacacaagctatcattttcttcctgcaaaactcatgccacacgatcagttaaaacacttctcaagcaaaattgttgtgcagccttagaatccttttaaatacagtgctccaggcagccaccacaaatcagtcagaactgccacaagaaatgaaatgtttctgccatctggactctgcagtgagttgttggtagcgcctggatggaaaattcaggatttctggctctcaacccagcatcttttctgtccccattagtctgtctcctcacttctagtcagttcattaac

SEQ ID NO: 13388 - DNA, 1035 bp, Homo sapiens
ggaataatcaaaggaggatagattttcacgttcaaactgtgagatggggcattgacattaattgaaataaattaaggaaatggccagaagtgtaaaagaaaacaaaataagagtcatttgttcatttccaagacctagcctatacctagtttggtagaacatcaccaattcctttttgattgggtaaattaagggtgaagaaacttgctgtattaggttcttcccctggagactggcctacatccaaagctggcttctgtttcttgatattcaagctggggctgaaagattaatccaagattgagtccagctcagggattcaacctctttcagtactattggatttaatatctgctgacctgttaatcattttattctatagttattcacttgcttctctcagataggaatcttttaattcctaaaacatggcccaattgattattcataggttgcattttttccaatacaaaacctttagctacaaaccatacttctttcaactgttaaataaaaagatgtttcagaaagcactttctatcagtattcatttatcattatttaacaataaagcttaactaggccttgagtatatatcaagttgaagagcagctggtaaagctatgatcacttagtggcatgctcacgggtactaatagggatattatgcctgcattaggactataccctgcctgaaagaatataggtcagttatttaaatgatttacacagagtttgtccctttaataccttgcaaagagtcaggcagagatagtattagtgagttctggcagatgggatacaaatttattacgacaagtcaattttctttttcgtttctaagactactatataataaatgggcctccacagtatattaaattaatggactttatttttcatgtgaaagaagaagaaaaatcttatgaagtgttaccctagaattccaggatagtctttgagtttctggctcataatgtagcttctgaaaagcaattataactttcatcttaaacttctttcaatgacaagtct

SEQ ID NO: 13389 - DNA, 1051 bp, Homo sapiens
tataccatagcatcactttattaatggcactataccatagcatcactttattaatggcactataccgtagcatcactttattaatggcactataccatagtattattttattaatggcacgataccatagtattattttattaatagcactataccatagtattattttattaatagcactatactgtagtatcattttattaatagcactataccatagtatcattttattaatagcactatgccatagtattattttattaataacattatcagatttcctaaaatatgtatagcttttcatacctaaatttctacattatggtattaaaagctatacatattttaggaaatctgatcataaaatgcatgtagaaaggtctgtgaggaaacatttaatactggtacttatattcaggtcaacatctgggtaaaaatgggactataagaataatatacatatattctctttgtgattagttgaaagctagatcaccaaatttaaaaggatggattcacttgtaaataactttgagtgtgtgtctttgagctttttatggctcagttctctatgtaaaggtatttgaaaaatgttagcatctccttatatcggtaatgtttgtagcaattaaaatactatgttaatgcagagtaacatagaaaggttgcttgcatttcaacctttgtagtttggaaaccatttagaaatgtatttccttatccactttgctattatggagctaagtgcttggaatattatttgaagtgagatttctatgaaataaaatgaaacacaacggaaatgtgtatttttatatttgcctttcaaccgataatacagcatctccatgcggattgaatccaagcctgtaacacagtgaagcctcctattagcaacagttctgtgaggctctttgctgagggtctgcctgtgtgccattccttcatgacagccatcctcctttgatgacaatgttccttttattgtgtttatgaacttgttaagaattgtaggaaccatgtttggagatgacactgtttctacattaaa

SEQ ID NO: 13390 - DNA, 1049 bp, Homo sapiens
gaacaacattgtttttgcccaaaattactattttacagaaaagatttataattacagagctaaaaagtaacattctggaaagattaatatgcatatagcaccaacaatgttgtcaaacttaaactgagttttcaccgtcctgataaattgatagaagctgttcttatccaccctaatcaaagttactttttctgtttctttataaatatatgtattcaaatgaaaatcatagtcctagtttgctctctgatcccagtttaatgaaggtagtcaggaaaggtcttttgaggaggtgctatttgaactgagtcctgatgggactaccgtgggaaggaggtgtccatgctgagttggagaatggctttcaaagcagaaggaatggaaaatgcaaaagccctcagagggagtgagcttgctatggggatgggtgagagaggttaaaaagagtgggaatgaggtgaggttggagaattctgcagaaggcagattttgctggaccttgaagactatgatatggaatttggatttttaattacaaggagaacccatggaatgtttgaagaaggaaagtgacatctaatgttcattttagaaggattatccttgtttttctgtgtagaaagaaacagaaaacaggagagacctttgcagtcatttgagcaaaatatactggttcagttatgtattcatttgtccagtcaacaaaaattcactggagtcccaccatatgccaaggaactgctgtaagtcctggggataccatggttattaaggtaaggatcttactctcatggagttttgactagtaggaggttcagtagtgttaagtcccatgaagacaatacaggtaattcaatggaatgggagtatctaattacattgagtgtcagggtcatggtggatcctgaatgactacaggaagccaagcatgagaaaatctccagaaagaacttcaacccaagggaagcacgagtgcaaagggcctaagatgagagcacgccaggcataaaacaacaacattgtgtctggaggattgagtgacggcggcg

SEQ ID NO: 13391 - DNA, 1051 bp, Homo sapiens
gcatttatcacacagccatttttgtatttatttgcttgcttgtttcttaccttccctgcactttatgaaacatcctcctccctacccccccatataagttccctttcacgcccaatatattgcctatctctgtttctcacggatactccagcattgagaaaaatatctgcctgatactgaagcaaataatggatagattgaatagatgtaataagtattacattaaaaataatgtcttaatgatggaacgtagaaaattggggaaaatatttggtcgctgttaaagtctaggtaatgggaactagaagcttacaaggtaaatatttctaatgtttccaaaacaattatttttctttcctagactccatggtatgtatatttctcctgaggtctctttggacaacatactatttattatcaaattatattcatttatcttattttctgaaaacaatatattttatgttcaaaaatatatgccatccactcacagcggagttgttgcacagggcgcatgatttgaaacttgtccttactgtatttgtagggtaatttgaggtaaatgaatttggacagaagccattaagtaaaatgattctttcctaaattaccttaagtggttaattttattactgataataccgtaatggagacgttcttcatataattttaagggaacacgctttgattaaaatcatatttgtattttattattattatttttgagacagggccttgctctgttgctcaggctggagtgcagtggtgccatcatagctcaccgcagtcttaacctcctggattcaagcaatcctcccgcttctaccttctcagtagctgggactacaggcatgggccaccacacccagccaattttatattttccaattttttgtagagccagggtctcactatgttggccaggttgatctcaaactcctggcttcaaacagtcctcccaccttgacttcccaaagttctgggattataggcgtgagccaacatgtctggcctaaaataatcctttttaaggaaagatctgagttttatt

SEQ ID NO: 13392 - DNA, 1028 bp, Homo sapiens
ctctgatctgataaccttataaaagtggtacaccaaccaagttactaagcaaggttgctatgtcatgacccctgattggtaatttgcatatatactgggaagaattataaatgaattacacataccagatggtgctgccgtaatgttgtgattcctgagtatggtgacttacaaatggtatgcaccaggagggtggtcctgaaagctatgtccatgggattaatttagtacatatggactcctcgtggagcatgaggcttgtaaccaggatgactgtcatacccactggtatgtatcttgtcttcttgcacctgaggaacagtgtggattgctcctgataattctgcagaataatacctgatgctaccctgctggcaagctgtgattcttttttttttttttttttttttttgagacatggtctcatcctgtcacccaggatggagtgcggtattgtgatcacaatgactcactgcagtctcgagctcctggacccaagccatcctcccacttcagcctcctaagttgttgggaccaccggcatgcaccaccatgaccagcttattttttatttttatttttttgtagagacagtttctccttatcttgcacaggctggtctcgaattcctaggctgaagtgattttcccgccaaggcctcccaaagtgttgagattacaggtgtgagccactgtgcccagccaagcggtgattcttgtcctgtaaccttctaagtgtttgatgccaggtgacacttgtggtggtcttgtgagcttgaatgtttagctgaacctgaaaactcttgggtagagtcctagcaagtaaaatttttgatttttttatccacagataaacaaatatcttcaatcatttgtcttgatcttaatggccattgtcctgtaatgaatgaatttgggctttgaattttgtgagcttgaatgttaattgaacctgaaaactctttagtagagtcatagaaagtaaaatttttcattttatgcccacatatacacgaatatcttcaatta

SEQ ID NO: 13393 - DNA, 1027 bp, Homo sapiens
cagtttgatctcagactgctgtgctagcaatcagcgagagtccgtgggcgtaggaccctccgagccaggtgtgggatatagtctcgtggtgcgccgttttttaagctggtctgaaaagcacaatattcgggtgggagtgacccgatttttcaggtgcgtccctcacccctttctttgactcggaaaaggaactccctgaccccttgcgcttcccaagtgaggcaatgcctcgccctgcttcggctcgcgcacccactggcctgcgcccactgtctggcactccctagggagatgaacccattacctcagatggaaatgcagaaatcacccgtcttctgcgtcgctcatgctgggagctgtagaccggagctgttcctattcggccatcttggctcctcccactattattatttcttaacaaaacttaactagtgttaatcaaaaattttaaagcctggggtttacattcaacactgctttatagagacagacaacatattgcagtggaggagcatatagactttggagccagattgtctggctctgccatttacaagctctgtgaccttgggcaacttacttaatctctctgtgcttcagcttcttcatctgtaaaaactgtggtaatttagaacctattctatacagttatcatgatgatttaataagttaatatttgtgaagtgctttaagatgtgcctgacacagaggacttattttataaatagtctgtgttaaacataatatatacaagattgagtctgctaggatgaaaaatacagatttataattttttttccttcctgatctaaacattgctaggcaattggaggattatgaacaccaacccaagttgcatttcttgtcaacctgctttcgatgcgttaatccgaggaaggttgcaatggcttgtgagatgatgacactgatgccctcgtgctgctgcagcctgactctctatggttgattctgtctgcatcactttaggagtaaaagattaaaacaacaaaaatctagatttttttcc

SEQ ID NO: 13394 - DNA, 1048 bp, Homo sapiens
tggatttcatttgctctccactgtgctttgggcaaagtgtcaggaacatgccccccaagaggtaactaaagatcattctcacaaaatgtgctatcaaaacccaattgtctaagagcatgtgtttggaaaagaaaataaacctgagtgtcagtgaaacagaatagcttctaggattttatctgggaaaactgtcaggttttcttctaataggtttatacaggttcactcacctctgactccttgccttatttctgggaatttctcctggaaattgaaacttttataaagtacaacaggatagactcttctgagcactcgaagtggaaaaactgaactaatttttgatttgttcaggagccattctttttattcaccaaccttaaagtacttaacaaaaaaaggcctgggatgatggttgagcttgaggtcagtcaatggattttcaaactagagcacaaggctaagtttctcagatggttaattatttataggtgccagagctatctccttataatagtaggcattcaatatatgactgaaagaatgagtagagaaatgtaaagtgattgtgaataaatgaattaataaagaaccaatggtttcagcccagtggctcacaacctactcacacaagacccttatgtatttgctatacacatcttatgtttagaaggagaatgcacaacattgtaggatcctagagtttaaaagtgcattgtttgtttaaccttgacaattattaggtagttaacaaagatgtatgatatcttgccatgaattatatctttctgtaagatgaagacacttgttcagcatccagcacaacttttaaatattctgtcccatactctgatagctaaaaattctgtttgcgatgaaatgagcctagaacctaagtccacttttctatcaaaataaaatatggaaatatgggcttttccataaatcgccatacatcagggtgcattagaatgaacactataatagatgcacagaccaaaggtaattcagttacgtgggacatgtaaatgaatgtcaactaaggtga

SEQ ID NO: 13395 - DNA, 1073 bp, Homo sapiens
gcacgggggcatgcgcctgtaatcccagctactcgggaggctgaggcaggagaatcgcttgtacccaggaggcagaggttgcagtgagctgagattgtgccattgcactccagcctgggtgacaaagcgagactccatctcaaaaaaaaaaaaaaaaaaaaaaggagaggaatgagatgggcagaaagatgatcattgttgaagctggttgatgagtctttagggagttcatagactattctgggttgtgtatagtttctgaatttccataataaagagattaaaagagagagagaaagagagttggccagcacagtgcctcgtgcctgtaatcccacactttgggatgctgaggtggatcacctgaggtcaggagtttgagaccagcctggacaacatggtaaaactccgtctctactaaaaaaaaaaaaaaaaaatacaaaaattagccgggtgtagtggtgcaggcctgtaatcccagctactcaggaggctgaggcacaagaatcgcttgaacccagaagatggaggttgcagtgggccaagattgtgccacagcactccagcctgggcaacagagtgagactctgtcaaaaaaaaaaaaagagagagagagagctgacttgaacatacacaggactgaagatatccagactgtgaatccattgtacatacggaacaatgtcagcggttgttactgctctcaatttttgtatattcaacagtaaattatacagagcacgtcattttcaaattgcaaacctgaacacaacctataggattttgactcaattccaggctacttagcttatgctcccatccaatattctattattattgcgctggaaatgacatctctaatctatccacatgaacaggcctgttaaaatgaggcttaatctttaaatctccttggtaagtgtgattgaatttgttaaacttttgtttgtaagccatatggacatcaaaataaggaaaatatccaaacccgaactttggcaagattcaaatgacagtgtaaagtgtttattatcaaatgcattacaaataacatttccatatcattcagtagt

SEQ ID NO: 13396 - DNA, 1048 bp, Homo sapiens
ctgggcatcacctgcacacctaaatggatttattgccaatgagtaatgctgtgccttcgctgcacagtctacacagaaaatgtcagaactcaataaaaacagtgcaacagtcttctgattgagtttgtattaaggtctctttattggattaatccggttcttttctcttcctttcctcatctgaatgaaacatattttaagggccattcattttagatgaagttgaggaaagtattttaaaaaaggaaaaaaataatggatttgcagttaggctcactcctttaatcccagcactttgggaggccaaggtaggtggatcacttgagcccaggaatttgagaccagcctgaacaacacagcgaaacagtatctctaccaaaaaaaaaaaaaaaaaaaattaaccaagtgttgtggtgtgtgcctgtcctgtagtcccagttactctgtaggctgagtggggaggatcacttcagcccaggaggtccaggctgcagtgacccatgatcacaccactgcactgtagcctgggcaacagagtgagaccctgtgtccagcaaacaaacaaaatatattgccttccttgttagaattttgcttaataccttggccgggagcggtggctcatgcctgtaatcccagcactttgagaggccaaggcgggcggatcatgaggtcaggagatcgagaacatcctggctaacactgtgaaaccgcgtctgtactaaaaatacaaaaaattatgagccgagatcatgacactgcactccagcctgggcgacagagcgagactccgcctccaaaaaaaaaaaaaaaagaattttgctcaatatccagcataaccctgttaattttgtgggaacataataaaagctactttgataacaaagcagaaaaatcagctgtttgtcttcttgcgcatgtcaaaccttaaatttggctgtgttttctgctctcttccccagtaacttcatttttaagcctctttcttatgtatttgaacaacaatcaagaaaaataacattgttgtgaaataccttaacctcacatg

SEQ ID NO: 13397 - DNA, 1056 bp, Homo sapiens
ataagtgaatggcatttaactgagaagatgcatccatttgagtgtgtctttcaagatgcatcttctaaactttgaagggattcagatactccctccaaagatgtactagttacctccacttaccaagtaataggctgcctacattttttattccacttttagaagtattcattgtggctttttgtaactatgagattaatattaaatcttattaactagggaaagataacgagtatatctctctttttaattgttatgttcaggcatgctctcggtcccacaaaacttttgattttgatgagcagagtacatgcccaacatgattttgattccttaatactgattatattgaactggtgagcaaatatctcccttggagatgtcaagctcaagagcaatagatgctgaggtagaagggaagagaaagacagaatttatgcgactgttctatacacataccatgaggaacaaagaggggagaaagttaaaggaaacagtcactggggcagaaaccacaaaaataaggcagtgaataaaagagaagatatccagagttgagagctgagctgtactgccatgaaaatctagctcggtgtgagacctctgcacatccttacaacaaatatctacaacttaaagtaacctgaggctgtctctgtctggcatactaaaagaagatgacccatccagtttaatcatatactacgattttaagacattgatttcatcagtatttctaaaactaatgattctcttcattaactgattattaccacctttagactagaatctgcttgctcctgtgtttctttgccttttcatgttttagttttatctatgcatcccagcctacttattggaggtagatagaggattggagagttgcaaagatagggaaaggaacttgtatcaagtccaggcataactgccactacctccagtcctgatgtgcatctacaaagaacgctttagcatatgggtagagcctaacacaagacttttttcaaagatcttaaggctagttttgtttgaaatattttgataccttcatttaca

SEQ ID NO: 13398 - DNA, 1046 bp, Homo sapiens
tatatggttttcattcttggttctgtttatgtggtgtgtcatattcattgatttgcaaatgttgagccatccttggtatgaatcccagttgatcctagtgaatgatgtttttaatgttctgctgaatttggtttgctagtattttgttgaggatttttgcttctatgttcatcaataatattggcctgcagttttcttttttgttgttgtgtccttgtctggttttggtatcagggtaatgctggcttcataaaataaatttggaagtattccctcctgttcaattttttttaaaaagagtttcagtagaataggtattagctctttattttggtagaattcagcagggaagccacagttcctgggcttttctttgatgagagacttttattaccctttcagtcttgttatttattattagtttgttgaaattttctatttcttcatattctgtcttggtagaatttacgtctaggaatttattcattttcttctcagttttcaaatttgttggcatatattgttcatagtagtctctaatgattctttgtatttctatgatctcagttcttatgtctcttattttcattttttattttatttgggtctttttttcttagtctagctgtaagtttgttgatttttgtttatcttttcaaaaaaactacatttgttttgttttttttttcctgcaatttttaagtctcagtttcatttatttctgctctgatctttattactttttttccttctccgagttttctgtttgactttttcttgctttaatgggttccttgaggttcatttttaggttatttatttgaaatctttctacttttttgatgtctgtgtttattgttataaacttccctctcagtactacttttactgtatcccacagattttgatgtattgtttttccattttcatttgtttccagaaattttaaaattttcttttgaaatcctcttatttacagcaaagttgatgaaacttgaggtcattattttaagtgaataagtgaataagtcaaacacagaacatat

SEQ ID NO: 13399 - DNA, 1035 bp, Homo sapiens
aaaaaaaaaaaaagccagtcatgatggcgggtgcctctaatcccagctgctcaggaggctgaggcgggagaatcacttgaacccaggaggtggaggttggagtgagctgagatcgtgccactgcactccagcctgggtgacagagcgagaccgtctcaataaaaaaaaaaaaaaaaaaaaaaagtgaaaaagttacattaccatattttttggacaagacttttgacaagatatttaactttttgctatttcaattttttgatctgtaaaataaaaggataatcatagggttaagaaggacagctatatcaatacatagattgatggaaatatagagatacatataacttaatacagagcccaacatatataagcacccagtaaatattacctattattagctattatcattagatcataggaagtcaagttccattttactttgtacttgtcaagtcaaatttaaaataggtcttgttccaagcagcttattttaaggggaatatcaataaaatggaatgtagaatgagtgcacggacaatggactccatttgaatctagttcctatcacaacatgtgctgactttcaatgaaaatttttatgtgggttaatggaaagaagacacatagacactaaggatttaagcagttcaaagtctatcatgtgaaagaccaaagaaagatggtttttgatagctcagatatacaggtaaggagggcaatcatatgttcacattttcctgggcagtcatcttttatgtctgtgtaatcatcaattagtttttaactgacaaaggtattcttgtttggacaagaaattatatggtttgcccacatctaggttaaatatgttgtagtgcagtagaggcacatttaagttaaccataggacagtgcacaaagtatttgaggtgtccagtgataaagtctgccctttgaagttatgagttgatgtgatgggaaatattcaatttaatacaaaatgataattcaatgcaaggaatgattcattcactggataggaagatcaactaga

SEQ ID NO: 13400 - DNA, 1045 bp, Homo sapiens
tttcatcagcttcagtatgttatgaagaaagcatgaaaggtgagatgttatcacattctaaggaaaatatttacttgccaagtaaaagagtttgcacctattttcacttaatctgcaagcctcagttaaagataaaacgtgttttcattacaactctgaaaatgtcagagaatgaatctggaaggtaagtagattggaactattttaatcactaaaatatgaatgaatattgtatttgtgatttttaagccattattttacttttggcttgtgtaagttattgtgcaatgagttcctcatatttagtattcattgtttaatatacttatttttattcattcatgaatttcaaagtttcctaattgagcatttggtgtgacagcatattcatgatttaacagacttcaaacaaatctcttcacagcctccatattttctctattgccttaggcagagtaggggggttcaaaactttacctcctggcctctaagagtctcagctgggcctgagaattaaattgacataagatagattaacaggagaaaagcacagatatttttacaagtacaagggagcccccacaggaaatgacccaaagaagtggccaaagctaaatgcttatataataggctgaacagaggtaggcaggtgtggaagtaactaaaatctatgggaaggataaaggaaagtaagagctattttaagaaagtctgtttgtacagatttttctgggtttcagctccccatctctagtgacaagaacatttcttctttcctggtaaggggaaagcatttttcacatgagagttttctcccatctctggtgataagaatgtctgtttatttgtcctcctatagggaggccagagttttccttttgtatctgctggttttttagtctttagctcaagattcttgttatgccaaagtggcatattttagggtgacgtattctgccatcctgcagcagcaatcctctgagagcaggttagccagccttctccttcttcaccctaaagccatgatgctttcccaggcattcag

SEQ ID NO: 13401 - DNA, 1022 bp, Homo sapiens
cccagatatatgaacacaaatgctttcattgccacatatacccttggccacagttagatgattgaattataactgagtcatgcctgtgctgagttttagcagagtattcctgcaggatccaacaaggataaaaattgatgtccctcttgaaacagagtggtacagatggtgcagctttatagctgtctccaaataccaaatgccaaactgctcctttgataaggcaaggcggtgtaaaggtttaaatatagcctcttggtggaatgtcagtgaatgatggatcccagttacaaacacaccaaaatattctctgtttaaacattttttacaaccatggttgtgaagattctatatcaaggaaattatgcatgggggaaagaacaggaaacttaccctgaaaaatctatgtgtatactaacaaatcagttaaatttggaggaggggagtgtggaaaagtacaatggcaactagtaaagtcaatttttctgctaacacctgccacaagtagaatctaaaaatgttacgttaaattcacaagacttacatataacaacaatgaaatagggaacttggctttcctaaattagcttggttatcgttttacagcacagttttcaccaaaatgtcaaatgatggtcttgtagtaggagaatggcatacatatatagaatggttaacttgatcattttatatgtatgcgtatatgaatttattcttttgataaaatatatttttaaagtattgctaatattcatatccatcttcataatttgtactagggagatgaacagcaagaagtaaaattttaaagtacctgagaccttgtcaattttttgttaaaactggttaaagagccataaggaaaactggaattatagcaaacagtaggttcatgttttagaacctttaaaaattagctagtgaattagttaaaattatttcagctaattttgaaataattgtgaagatatacaaaaagaaacatattggataatgtaaacggtgtcagcaagtaaatcaag

SEQ ID NO: 13402 - DNA, 1048 bp, Homo sapiens
tagaggtcttcctgacttctttgagttctgttctcagatgttcctggaaataagtacatagaaaaatagatctttctactattaattttgttttttcaagtaataacattcctagaaaagacaaaagtatttttgaaaattgagtatagaaaaggtttactgaaaataaacgtgaagatgtagcacatagactgaaaagttagtagtgagtctgaggagttggatggcagttaggtggagaaaccaaccaacccaacaggcaagaaggaggaggcagagcatgagtcccagtgccagtggatcattaaccaggaggcagacctcagggtcctgctctctatggcaaaatgcaaggagagtgggagagtttgaattccaagttattcctccactatgttgtggtcagttatttatttcatgaatgtatcttttaatttttaaacttgaaatcacagagaatgaagaatttaaaaaggtttaaattctggccaacatgtaattccaacattttgggaggccaaggtgggaggatcgctggagactggaaggtcaaagctacagtgagttgagatagtgccactgcactgcagcctggacgacaagagtatatatatatggctttaaaaggggtctgttcatgttccttctgggattatataacgttgccttgcccctggaccaggaagtgacttaatgatcacctaaagtcctttgcatcttaccattattattattctttcctcaggtaaagtgaaaattcattaaatacaggatacttttttgtatgttaaaattcaaccacaatggttgtggtcatagtagaaaaaatgttccccaagttatctataaacagaatatggaaagatataacaaaacatttagaagtttcttttgactttttccaaatgacgtgtatttggcttttcaatttttatttttatgagaactttgtttgcctcacacatgagagatttgattacatcatggactgggcaatactggagaacactgaatccaaaaccatgttttatgtaagcatttatgttat

SEQ ID NO: 13403 - DNA, 1024 bp, Homo sapiens
ctgtttaatactacttaatgtaaacttcatgtaactacagcagtttatgatatttttatatcagcaacacttattctacatatttggtaacgaaggtggtatctcaggctagcagctctaacagcacctgggagagcattaaaaaggcaggatctcatgcagaagaatgaaattggacccatacctttcaccatatacaaaaattaactcaagatggattaaatatttaagtgtaagacctcaaactataagaaccctagaagaaaacccaggaaacaccattctgttcatcagccttgagaaagaatttatgactaagtcctcaaaagcaattgcaacagaaaagcaaaaattgacaagtgggacctaattaaactgtcgagcttctacatagcaaaagaaaccatcaacagagtaaacagacaaccaacagaatgggagaaaatattcacaaactattcattcaacaaaaatctaacatccagaatctataaggaacttaaacaattgagcaaatgaaaaacaaccccattagaaaaatgagcaaaacacatgaacagacacttttcaaaagaagacataatcagccaacaaacctatgaaaaaatgcccatcatcactagtcatcagagtactgcacatcaaaaccacaatgagataccatctcacaccagtcagaatggctattattaaacagtcaaaagacaacagatgctggcatggctgcagagaaaaaggaatgcttatacactgttgctgggaatataaattagtttggccactgtggaaagcagtttggaaatttatcaaagaaattaaaagagagctaccatttgacccagtgttcccattcctgggtataaatccaaaggacaaaaatcatactgatgctgggcagacccttggtccttgagggggtcatgggagatgggttcttgattttgtacaagaaggaattcaggagcaaatcacaaggagaaagccaaagtaaagtttattggagtgcttctccacagatggagca

SEQ ID NO: 13404 - DNA, 1052 bp, Homo sapiens
ttccaattatgtggtcaattttagaataagtgctatgtgatgctaagaaaaatgtatattctgttgatttaggatggagagttctgtagatgtctattaggtccgctaggtccagagcttgaattcaagttctgaatatccttgctaattttctgtctcattgatctgtctaatattgacagtgggttgttaaagtatcccactattattgtgtgggagtctaagtctctttgtaggtctttaagaacttgctttatgaatctgggtgctcctgtattgggtggatagttagctcttcttgttgaattgatccctttaccattatgtaatgcccttctttggcttttttgatcttgttggtttaaagtctgaaaacaactattattattaaaaggaacaactttatttgcttttagagtagctgattaaagtaaaactaagagaagggatgaattgttagaattttgattacttcagacttgtttcttcttatccataagtgtggcaaaatgcaaacacaaatttgctgatgagattgatgaaataaagagtctccagtactaattaaaattaaaaaggatgaacagatggtcttaacacagctggaagtattaggatgaaattctgcccgtgtgtttagtcagacagcacagttgcaagaaagccacacctgtttacttttctaagagcaaaaatattattaaatgtggttttgatttactgctattttggctattaaatcattccttagtccttatgtgtctgtggtatcgagagataatcagctttaagtaacttaatagtatacatgtatgtctgtgtttctttctgtctaataatattgatcatgacatccacatattaaggcaatcttttgctacttatgcgatttttgtggccacatagtcaaaacaccgatggaaagggtgaaaaagaaaaataataaatattagaatatgcatttgctttgaaaaattctaagtaatgttttcagatttttaatatttaagataatcctctaagccttactcattattcagtgtcttggaatt

SEQ ID NO: 13405 - DNA, 1123 bp, Homo sapiens
ggggagatgtgctgtgctacaagagtttgtgataaagaattaattttcttactatattttgcaagaatcaatattattatctttaaagcaaaattaggaatgcctttgttttcaagacatctggatatcaagacaatcccaagtctaggtctgttcaacaaacattatcaatttgttccctcaactgctaggaatagcttttggagaatgcagcccagttccagagtccctcgttttcctagccctcactcaacacctctgacaaaactgcaccaaaatgtgtcatatatgtagaaactcatcttctacaagctatacaaagcaatcccttatctgttagaaagtaaggactaaacaaattaacaaaaggactaggatgattgaaaagatattggtgccttattatgaatgtttgccaagacacttataaataagatagagatgttaaaagaaaaaacaatgtaaattctattgcctaatgtgtacttccatttcaaatatctagttcacatattagtaggtatcattcatcttaattgggttcaagaaggctcttcactgctaatggcaaatcaatcaccatctctgaacactgcagtatgtactcatgacctgtagattgtgttggaattttaatacatggggaagtattttgaaaagttaggaatttgagttggaaaggcatccagaaaattgattttgatttttcttaagggttaaggctgggtgtggtggcacacgcctgtagtccaggtcacttgagaccaggagttcaagaccagcctgggcaacgtagggagaccccgtctccgagaaaagaaaaaaaaaaaaagccaaaagcagctgagtatggtggcgtgtgcctgtagtcccagctaattgggaggctgaggtgggaggatcactttcctctgggaggtcaaggttgcagtatgccatgattgcaccactgcactccagcctgggtgacacagtgagaccctgttgaaaaaaaaaggtaaaaaatcaagggactttgttaaaaagattgtaatctcatattagcagtctagtaattggattttttcatttaacagaggaaaaagaactgtattttaatgagagtatatttttaaaaagcaat

SEQ ID NO: 13406 - DNA, 1033 bp, Homo sapiens
aaatataataggccagacagaccacattttaagtgttaacttcaggtgagagaccatgaatttaaactgagatcagtccacaaggctgtgttttttatctgtagtcacagcagagtgactgtttcgaacatgtgaaatgttctgggtctctatttccagtgggttttaacaaaggttacaattttgttagtttgcacaagagttggttttaacaagggtaataggccctggaattgggtcaggtaaggaggagagtgaggttctgagggacggaagcacaggaaaggcagtagaataatgaattgtactttatgttggtttgtacttccctgaaggattgttgagatgggagttacaaggggcaagctagagtgtggaaggcttgaaaatggggttatggaaggtaacttagtaatggcaaggtctagggtgtgactacctaagtcacataatgtcacatctctgctccaggtattatggcgatgatgaaggtgtgaaaaagagaaactgaactgacaactttaaagttgtattttctaattgggactagatttaatactggcataggtcttctgtgaaccaagttacttgacttgttgaacatgtataaatgacatgaagtatttgatgggaagtttcagccaaacaggtgataagaagttgaattttaaaccctgtaaaattaggtcagtctaccatataaaaacaagatttaataagcggcagatgatattttgtccaattcagttagattttgcagtgccaaataattataggcagtgcaaatcatgcatttgctgtgctatgaagggttatgtgaattctccgctacagacatgctataccttccctgaaaaaagcacatatggctatcagtaagaaggtcattttgaatgtgcacctacaatagtgacaacaggctgggcgcgttagctcacacctgtaatcccagcactttgggaggctgaggcaggcagatcacctgaggtcagaagttcgagatcagcctggctaacatggtgaaaacccatct

SEQ ID NO: 13407 - DNA, 1036 bp, Homo sapiens
tacattgctaccttcaataatcttcattcttcctgttaatgttctgaatcttcttcatgctgcaaatgaatgaatgaactaataaataagatgtttctcttttaattgtttcaataggtagtatactaaatttccccctttgagtaggtatttaagagattaagtttaaaagttcccagtagttttatttttactttaatttttactattaattatgacagttgttttttcactgtaagtagataatataaaagagaaatcaaagggacatacttttatcattatacagtttatgccttgtcttttatcttctgtcatcttgttccaaaatatggcaatttttttcctgtattccctttctctgtattttgttttgctttgttctgtaataactggagatacttggatatggatactcaactgttatttttgctatcactcagacacttccccttcccgaataaaatcctacatctaattgtcaaaataaagcacacacaaaaaaagtactttttttttttttaagagacagagtttcagtgtgtcacccagaagtacagtggcacaatcataacacactgcaacctcaaattcctgagctgaagccattcttccacctcagcctcccaagtagctaggattaaaggtgtataaccaccaatcctggctaaggtgtttgtttgtttttttgtagagacaggggtctcactacattgcccaagttggtcttgaactcctgggctcaagtgatcttcctgcctcagcctctccagaattacagttgtgagccaccatgctggggctgaaaataaccttttacagaagaaagaaaagtgatggcatgaaaaatggtatgtctcttggacagagttcagtaatatgacctatgaaaaataaatatatttgaagcagactagagaaacacctgagagagaaataattcctaggataatagaagaaagcttattgttctgattttttaatataagtttgtcaattaagagttttctctactccagactaaacttttatcatc

SEQ ID NO: 13408 - DNA, 1076 bp, Homo sapiens
aaggacattttaggcagaggcagtaacagagcagaagtgcagaggtgtgaaactgaatgatgtgtgcagggagctacaagcatgttatccttgagccataaagtacaaagcaatgatttgcaggagacaaggatagagaccttaactgaacccttgaatgaaaaccatctatttcactaatggttttgtttgtctattctgcctgcataatttaaaacagtttctgtggatagaagcattccagtactttcaagagacagacatgggctgagcacctactatgtgccaggcacttctctataagaaacagagggaaaaacaatgaatggcattgtccttgagggattcacagtctatcacgaagagagacattatgaaaagtccaagtgtagtgtaattaatcagggtgacagacgtatggataaaatactatatgaaccaatggaaatacatgtttccctttaccttgggaaacgggagcagacatcttagagtagggaatcatcagatgtggacttaaagaatgaatagcatctcacagagggaaaaaagaggtatggctttcttgccaagggcccagcatgtgcaaaggcataaatcatgaaatgttatggttgtttggaaatgaggccgggaagtagatttgaaccatatcatttgggcatattatttttaagttaaggaatttgaagagcatcacgtgagctgtggaccaccagctaagattttttaaaagacaaatatataattggttattttttcacttaagaaagatgggcagggagctgataaactggctgaaaggagacacactgatggcaggtgctgggatgggaagctgttgcaattaaccagacaaggggtgatgagacctgagtcaaagcagcatggagcagattggggagcacatctggaaagaccgcagagaccctccagctcaacagccacgatgcatagtttagggccctgtccccagagtcagggatggaactgtttgggaacagttgtctgcctgctgactgatttgaatatcaccaacatataaatgtttgttggcaaaggatagcaacatttat

SEQ ID NO: 13409 - DNA, 1028 bp, Homo sapiens
aaacaaaatttctcagtttcatccttcaactatgagtgtgagatagctgatgaaattcgtgtcctaaatctctcttcattttgccggactatctgtatgatttaagcacttgcttgttttttttaagtgacttaagaatcttcagcattcaaataaaaattattaatccattaactctcagacctaaagagaatgaatggcttcatgaatcataattcagtcttctagtttggggcacataaaaaaagccaaacattcagttggcctcttccatatctagctgatttgctttagtgattcatttttcattttcctcacaattagactcaaatttctgggctgactttctaattttgagtctctaaagttgtaaattctgtagccatagaacaaaaatgacatagaaacacaaggtaacacaattgtatctttgaatgaaaacatacatatgttgtcttgaccccgttaccattttacaactcttacataaagaaatcaccagatgtttaaaaaatagaacgctgatgaatcttttgttcttccctaacctttatgtttttctgctgcagttttatctcagtaagagttatgctcatagcttacttattcaaaagtattatgcttattttcctcacaaagattttgttaacagaaggtttctttacatagtatttggaaaaatttggatactctatgaagaagaatgcagtagaggtatgagtacagaaaataatcatgagcaaataaagatgatgtgtgaaaaaataaataaaaaattttaaaaattcactgtaagctggattgcagttagcaaagcatcagagaagaatttctgtggagaaattgtaaatattattttaagggaagaaagttccgtatgacacagttgttttctgttagatgaggcccagctgttctatccagttcttggtcacagctaatggaaaaaactcattctgatcattttctaaaattcctactctaaatatgtactcacgaaagtaaagaaatatactttcctgaaatag

SEQ ID NO: 13410 - DNA, 1025 bp, Homo sapiens
ggtgggcggatcacaagctcaggagttcgagactagcctggccaatacggtgaaaccctgtctctactaaaaatagaaaaattagccaggtgtggtggcacatgcctgtaaccccagctactcgggaggctgaggcagaaaaatcacttgaacccgggaggcagaggttgcggtgagctgagatcatgccactggacttcatcctgggtgacatagagagactccgtcaaaaaaaaaaaaaaatcacatctaactcatgatgtacttggagatcgacaagatgactttagtatagctgataggccatcataagttcataggatggtggtgggtattttgtcttattttttatcagtgtattttcagcacctaatatgtagcatgacttcaagatttatttatcaaatattttaaaggacttaagattacccttgactgacccatgtgccaggcaatcttctattattattgggaatattcaagcactattttgttcaggatttgattagtttcttagggatgagcaaagagggcagttttaaagctccttcagagctaactcaaagtcgctgctagcaattaaaagaaggttaaaaaaaaaaagtgggacatggatcctctttattctcctggacattaaaacgtgcctcgacttgtattctccaatgtcccacattaaagtttagctgataagagagttccagtgctaaaacacagtttggaagttactcatctcatacacatccatgttgtaccaaccgatggccctctcagaaacaacaccatcagtttttggatgtctgtagtgttcagctctgtcaacagggcttaggaagggactctagcccctgcgaacatctggagaatctggacaccatctccattaacctgatccagcagatgttcccaccacacatatctatttcaagatcttcattgggagaggtaccatctttcaactgctccaagttatggtccatttcccaccaattagtaaaagaaagtgtctgtcttcatgaatcctg

SEQ ID NO: 13411 - DNA, 1035 bp, Homo sapiens
cccaggctaacaagtcaaagggcaatggagttaaaaatgaatgctaggcactcagtgctcactctatgatgagagtatgctgcagagccctgagatgaaatccataggcatggttaactgacctttaggaagtttgatggctcagtgggaggtcttgcatggtattcctgtattcatttcaaagaacagctgaaatgtcattattacatgggacagaaataatgcaaaattaaatgcattttctgcaactgacaatattaaatagtgctgtgattttactgttctcatattttctaacaccgctctataaattccttaacattcatgtacagaatatgataggtagaacctctgaattttgactatctagcaaaggttagtgcttcacttgactcagaaaaccaaaattatagtcctggttccaatgtttaccaggcccctagccttgggcaaatgacctaatcttattacaccccaccatctttctctgtataattaagtaatgatgtgtagcatcttgagatctgattaatttattcattcagtatctactgagtgcccattagaagacaggcactgttaggaatgagaatgagctaggctgagtatccttcagtcttccagacagcctgaattactcactcaagtaacacttccatctctgtgaatcagcaaagagttaaacaaagttgaatgcttgagatatttcattaggtcttttgaagcatagttccctgttatttcttaacctttttatttgctcttaatcttatttcctacacatgatcgagtttggtttctcagatggtgctcagtgaattaaaatagacagtataaattaattttgtgaataaaattttatgagacactacatcaaatacttcagtaaaatcaagatatattttatacccattgtagatattcatggtctaatcttgtaattatgttttttaaaattggatttgtacagccttattatccaattattcaccccatgctgttcataggtacagctatattccttaatgttagttc

SEQ ID NO: 13412 - DNA, 1031 bp, Homo sapiens
aatataagtattaattctctttcagagaaagctccctgagagagatgcttgatacttttaattcagttccacttggcaaccttgcatggaatacaactgggtagttttaatattttctatgaatatgtgttggtgcatctttgcgatcaccaaaacattacattttttaactttcaaggtatttttgaactgttatgtaaattaaggcataagcacttttaggtaataagtaagtttaggtcactagaccttctttgcgactaatgaggaatacactacataattgtcagattcttcttaattgaaaaatacctactcaaattccaaagttatcagggactgaactcaatattagggtaaatatggaatatataataactgattatgtatcagattgaagcttgaataacttattcatacatcataaaattgtggattagaagtttaactcagtcctttgttttactgctgaggaaaaggagatctacagaagcaaagatatttgatcaagatacgtgaaagaattgaagctagaatccacatctcccattccacatctgatattctttttattatgccgtattctgctacaaaaattaaggatggtcatgaaacataggcctctctctgtctgtctgtctctctctctctctctctctctctgtgtctatgtatagagatgcaatatggggtgtgcttaatattcactggagtccatgagagatagatagatagattatagatagatagatagatagatagatagatagatagatagatagacagacagacagacagatagacaggaaagagggagaaaagagatatttgtgtttgtatccatatattctggcaatcattagaatatgaagcaaataatatgtgtgtggctaaaaaatgtgagtagagagtatgtttatatgtttgcaacagcagatatgaatcagtaccaccttagtggtcaaatggatagggtggaagcagaactcatacaatcctctggttttctagccttagcaaaagataaggat

SEQ ID NO: 13413 - DNA, 1029 bp, Homo sapiens
aatgtgataccaccttactcctgcaagaatggccataataaaaaaaattttaaaaaatagatgttggcatggatgcagtgaaaagggaacaatgtacactgcttgtgggaatgtaaactagtacagccactatggaaaacagtgtggacattccttaaataactaaaagtagaactaccatttgatccagcaatctcacttctgggtatctacccagaagaaaataagtcattatttacaaaagatacttaaacatgcatgtttatagtagcacaattcgcaactgcaaaaatgtggaaccagcccaaattcccatgaatcaacaagtggatgaagaaactgtggtatatatgtataatggaatactactcagccataaaaaaggaatgaattaatagcattcacagcaacctggatgagattggagactattatcctaagtgaagaaactcaggaatggaaaaccaaacattgtatgttctcactcataaataggagccaaactatgaggattcaagggcataagaatggactttggggactcagggaaaaagggtgggaaggggacgagggttaaaagattaccaattacgttcttgtatgctgcttaggtgacgggtgcaccgaaatctcacaaatcaccactaaggaacttactcatgtaaccaaatgccacctattccccaaaaacctatggaaataagaaatttttaaaaaatacattaggtaccaggtgcagtggctgacgcttttaatcccagcactttgggaggccaaggcgggtggatcaactgaggtcaggagttcaagaccagcctggccaacatggtgaaaccctgtctctactaaaaatataaaaaattagctgggcatggtggtccatgcctgtaatcccagccactcaggaggctgagacagaagaatcactcgaacctgggaggtggaggttgcagtgagccaagatggcagcattgcactccagcctgagcaacaagagcgagactccgtctcaaaaaaaaaaacaaaaaa

SEQ ID NO: 13414 - DNA, 1032 bp, Homo sapiens
ttgctgataaaaatgagcatctttttcatatgtttaatagtaattcagagtccctgttctctaaatatcctattcatattctttgcccattttttctattatattttgttttttctcgttgttattgtaggtgttctttatagaatatgatgctactcttttgcaagtatgtttttcccatctgtctcttttaatttcacatatgttcctctgtttctgaaatgtaaatctgattatattgcctaggtaagggagggagagcattaggacaaacacctaatgcaagcaaggcttaaaacctagatgatgggctgacacgtgcagcaaaccaccatggcacatgtattactatgtaacaaacctgcacgttcagcacatgtattccagaacttaaagtaaatataataataataataataataataataataataataataaacttcttaatttaaaaaaactctatttactcatggacattttatcctacaagattcacctgatatgtcagtgctcctgtgaattattctctgatttcttatgtgaaagatctgtctttcctttcttcttccttatgtactttgtactccataatatagaatcattatagcacttctgacaattgatcgtattggtttatttacatgacagtctagattgtaaactccttgatggttttcttcaccttagtactcccagaagctggcccagggtccaggatagaatgggtattcagtaattgctttttgatgtgaattccctttgaaaaaggaagataccatttacacttacttctgagagattttcacctttttgaagccgtggaccctgtctctctcactcatactcatattccactatgatgtcaatcctcacataagagatgctgaattaacataaccatgatctccagctaatcaacacacttgaaccactgtttttctttactcttcccaagaaaagtaaacatcgtaaagaaaataattttcatctatacatctttaaaattgtcattaaaaggtaaatatattc

SEQ ID NO: 13415 - DNA, 1051 bp, Homo sapiens
agacagaacttgggtccaaagcattctctcagtgtgatggtgttcacatatgccttgtgtgcctttagaacataacttaagtgcgatagtatgaactgctacagtccaaaccttgtagagcattgaacatccatgcagaacagttagaagaagagggacttctggtgaaacagagcccacaatgagggtcagaatgtcatgagtaagttatcatatttggaatcgtgatgtttcctaataagaggaccaagccctgtaagtctgagcctcgatttttactcagaatcctagagaaaaatgcttagtcagaggctaacaaggtcttagcctccttgacccacagagaagaaatacaggaagggttaatacatcccagttggccaaacctgcagaagcagtcaccccctcccagtgtaccttgtagtttgaccatggcacttcacacacttcgcacgttctatctcctgtttgacttttttgagggtgttttctgtccacactagactgaatctctgagactggaatggtatcttcaccatttttctggtgtcgcatcactcagcatgctgccctgttcccagtcacctcaggaaaaaaggtataggccaggataacaggaagcacatggagtttggagtcccaaacactctgtatcatgaacttccttcccaatcctcccaaccaagcccttcttggtgccccttatctcagagaacagtgccatctgcctctaagttgctcaagtattaaaggcggatgcatccaggtgccctcttcccttcctacacaaatccagccaatcacttccagtcaatcatgtttccttagcatctctggaactggtccacttaattctatttgcctaatttaccccaccatcatttcttgcctgtattattgcagcaaggactgatatccttttccccccttgtccttctagcccactcttcaatttgcagccagcgtgagcatttgctgtcacaaatctgaccatctttctctttagttagctttgaagtctcagctttttagtgtgtcttccaaacccctt

SEQ ID NO: 13416 - DNA, 1048 bp, Homo sapiens
cccgcttttcctccattcagtgtggaaggataagcactgaacagagccatactagagcaatctacagggacttgtttcaaattcaaaaattgggtgacccaaggttctaaagtctgtcagatgaatttgaataatgcaggtattggcactctatggcagccacaaatgtggcagaggtaatgagttttggaagctcccctgagcctcaggcagaattacaatgtcaatcaagtttatttccttccaaacctccttttctttacccagggatggatttgctttagttggatgtccaaagttcttgacttactataaagaagtaaaaagtggattggatttggagacatataacatgagtttgaacccaatccagtcaatcattgcttgggtgatcttgggtaattcacttaaatttgctgcttctcaatctcccaacctatagattaaaaagtcactcatttattcatcaaacaaatagttctgaaaacttagtacatgtcaggtattagaactgtattttttatgattttttaaaaacatcatttaccccaagagtaagtaggtaaaatgtaaagtataataggaagagcattactgagatcaagttaagtgagataaagtatccagtacttgcttacttcacagttaacacttacggcatattgctacatcctcaagcctactttaaaaaaaaaaatcattgtattccccttgtaagaattaaacctcccatctcttcagtgctgcaactctcattaaggtatcaatctgattacctaagtgaagaacagtaatttacccttaggggaatttatgctcccataaataatttactatttttaaacgggagctttttaactctaatggaagtcagctcaaggcaaccaataactactaagcacctactatgttttaagtcatgtggagatgtaatccccaccttcatgagttttgaaatctataagatttgtaaaaataatatatcaacccattaaaatttaaaaagctaaattttgaaagcaacaaaagttttaaatgattgatatta

SEQ ID NO: 13417 - DNA, 1061 bp, Homo sapiens
tgaaggcttgagcaagtttacctttttgacaagcttatttactacaggataggaaacaacgtttgcaatatcacttttaaaagaaaagcaacagctttcaagaaatgatttcctctgttgatgcagttgcaataattttcaatatctcatttgtggtgcagaaaaatgaaatacctcagccttggaaaatgaacgcagagtgagatcacaaattgatcttggcaggaaagaggcaggcaaaggattttaaatactttaaagtactctgcacctccaaaacactgtcactctgaaagtacagtaatcaggggtggtatttagaatgccgaaagatatacaagagatggagaaagccaatactaaaatcttaaaatactagaactcagagggttagagggttaacttctggaagattaaaaggacagttattgtgtctctgtgaatacttaataaggccagaaaacataccgagccagaaataaacagatgcaaagagcatagagatgtgactgactcttccacaacaaattacaaaggcatattagaaagcactgctacaaaggaatgaatcctttgtatcccttgcgggatcctgagaaacatgccattgggagagtggttgattgggctaagggtcctggtttttgaatcagattcacactccctggagatccacagagaacgtcacagagagaacacgtggctgcaggagccttatgtgctgagcccactttgatgttgctggagagtcctactccagcatcttcctattttctcagttccagagaaaatgaaaaaaaatgaacttttgctttagagtgaagggaagttggatgagaagtgaagactggaagttgggcaggcgggacctctggggatgaactttcacctgtcacagtttcaacttattttgtggcacagagttgattaaaagagctttcctttggcactgctactgttggaggcaagaaaaggaaatgctaatttctggaaactagaattgctgcccctaaaagcacaagaaataatgagtgctctgaaagaaaacacagacaggcacg

SEQ ID NO: 13418 - DNA, 1065 bp, Homo sapiens
agtgagaagtaggttttaaagccaaccaaggttctactattgacatccttctaagatgcatcttcttcaggtgtcaaatgacgctgcatttgtctgtacaccatctcctcagaaatctcttatgtcttattggcatttactttgagatagagagggtggatggaaaggtgaaatctaaaagggcatgagcttacccatgatcaaatagctcctaggtagcaggaataaaaatgtacccagtttcctgactcaggggttcctgattgcctgctttatgtttttttcaatgattctccatcactgtttgtatacgtgtaatttttaaaaatttgtttaacttagttcatgtttttctaggagatgctagtctctgatagatctccaaaagttaaaaaaaaataaaagtgatacatactctaattcctacctattcattgaaaataaatggaaagtgaatttaactgctgttcacaagctttttgacaggctttctctaaaagtgactatttctgtagttagctgagaaagcacaacaggaggaaaattttgcttttgattacaactctttcctgggaggtaataccactatgaaattctctttttttctatgtatttttcttaccttctaaccaggtcactacttttggggtaataatgtgtctgcaggaaaatggaaaatgtgagcagaaggtgaaattatttcactcaatagatatttacaggaacctatcatgttgctattcgtattcaaagaaaaaaatgcctgatcccaaggtgcttaccatcctaataggaaggcatgtaaactcaatagtgagatgagtgagcaggtaccattgtgtgcaggatttggtagaggcacagggggaggaggatgtggacatacctacaggatgggactccctacccgaaggctggaaagggagtagagagggtacaaggtaggagataacactgcagaggcctcattgaaaagagtattattagaaagataagggagaaccacggagggctttacacagacacatcctatgaccgtgacattggaagtagttcttagttcct

SEQ ID NO: 13419 - DNA, 1050 bp, Homo sapiens
aacacacttacaactctctgaacatcgacaaggctgacaaaaacaagcaatggagaaaggactccctattaaataaatggtgctgtgatagttggctagccatatgcagaagaatgaaacggtttcattctgcatatggctggccaacaacctttacctttcaccatatacagaaatgaacccaagatggattaaagatttaagtgtaagacctcaaactctaaaaatcgtagaagaaaacctaggaaatatccttctcaacatcaaccttagctaagaatttttggctaaatctcccaaagcaattgcaacagaaacaaaaattgacaagggggacctaattaaaccatagagcttttgcacagcaaaaaacaaagaaaaaaaaaacctactagagtaaatagacaacctacagaatgggagaaaatattctcaaactatgcatccaacaaaggtctaacatccagaatctagaaggagcttaaacaaatcaataagcaaaaaacaaataaccccattaaaaaaatggacaaaggacataacagatacttctcaaaagaagacgtacacacaaccaacaaacttatgaaaaaatgctcatcatcactaatcatcagagaaatgcagatcaaaaccacaatgagatagcatctcacaccagtcaggaatggccattattaaaaagccaaaaaacaacagatgccgattgggctgcagagaaaaggaagcacttatacactgtcggtgggaatgtaaattgtttccgcctttgtggaaagcagtttggagttttcccaaaaaaatttaaaacagaactaccatttgacccagcaattcaattactgggtatacatgccaagtgaaatagatcattgtatcaaaaaaatgcatacactcatatgtccattgctgcactattcataatagcaaatacatagaatcaacctacgtgctcatcagtgatggactggataaagaaggtgtggtacatatataccatgaaatattatgcaaccataaaaaagaatgaaatcatgtcctttgcagcaa

SEQ ID NO: 13420 - DNA, 1021 bp, Homo sapiens
attcttggtgccttgggcaacgtgtgtatcctccctcaaaagaaggcttggagcaaaatgaacacttacaggaaactgaggctcgtatgttttatgcagtgaatcaccggcataattggaattctaacctcgaaattttatttccaaatttgactggctccactccttatacatcaaattgatcaaagcagaaattacagattcaaatttatggtaaagctaagaaaaagaaagcagaacgatgagtcagaaggtaagaggccacgtaacccaatatttttttagcataaagcattcacgaattttactggcacctcaactaaaatgatgttcttttaaaatcgtgtcacttgattataaacatcttgttttaaaaatggaacatataatccaacatcccccaaatttctagactaattcaaacataagagttgatcttaatatggatttaggtattcaacaaatacttatagagtgtccactatcgggcaaacattgttctaggtgctggagttacaacagtgaacaaataggcaaaacctttaccctcatgaggcttagagtccagtggaaaggaaaagaccaaaaataagataagaaaactttatggaaatatataaacatacataggtatgtctatataatacactgtgatatacctagtaagatatatatagttttgagagaaaaacatggctaacttgtttgtgccttaccttgtcatacagaattagaatattatccatactgaattcctgggcccagccctggccagtgtctctgccattttatggggtacattatctctgctgagctaagtaattgctaaatccacactggaggctgtgtgagtagagaagtgacacaccagttaacagggtgagaaattaatgcaaattaattctccaccctcccagcagacactgctcccactttcttgcccttctccatccccctgccagttcacagagaaaagtatgaatattacaaatgatactcacttcatgtctcagtgacctag

SEQ ID NO: 13421 - DNA, 1017 bp, Homo sapiens
ttatattggctaatttgtttctggatttagtcagatgcatggtaatatgtcctatcaatgatggaataaatatctctgctggaataaatatatttgttggcttctaccattctataacaaatgatgtcaaaatgtgggttttttttaacacattgataccattctctttgggcctcatgtatgaatctacagggagaaaggaaattactaaggctgctaggactgtagggaagatggaatggggtgaaagaatagagagatttggggccagttccatggaatactgtcatctctgagaaactctacagtattgagaaaatcccccctcatctgtaaatttgctagggctcctccacacacccagaccttagtcaaaagctgcatactttaacataacctccactccctgccaagcatcatcaagttctcacctttaagaaggggagctataacggtattagcctgctagggctgctataacaaaataccacaaactgggtgtcttaaacaacagacatttattataattctagagaccagaagtccaagatcaaggttctggccaattcagtttctgggaagggttctccacctgacttgcaaacagcagtcttctctctgtgtcctcacgtggcagagagagagtgagctctctggtgtctcttcttataacagtgccagctctattgaattaggaacccacccttatgatctcatataactttaattgcctccctgaaggccctatctccaaatacagtcagattgaggattagagcttcaacatgtgcctctttagggggatacaattcagcccgtaacaataactaagaacaaaagatagtatctgtattttggcaacttactattatgcatctagtctgtaaatgtttttctgtcacccacaacaaatatacatttagcatcaaaataatgaataaacaattttaccaagaaacgtaacactttagcagtgttaaaaaaagctctatgccctgaaggccaaatatttgtagc

SEQ ID NO: 13422 - DNA, 1021 bp, Homo sapiens
aaatgtatcgagtcatattcttaaagtgcctttggcatgtactggcctttcttcctgagctgtaggtaatagctatagcatccaacaaaaaattgccaaaaagcctatgaccttccatttgcagtgatacttccaagtaagtaaggactttatgaagttattttcaaagtacttcattgaagaaatgtttccctagtcatctggattgagattttgtttgcctctacctttgatatatcataccctgttgaattattcagtgtgggtcaaagtaacattaagcttcttacaaatgcaatattccaaacatatcccagcattttactttatcaccatccatagaataaaccacacgcaccttatctgtgctacaaacatacttaatataatgataataataaaaataataaaagtgtaataaccttaagaaacagttgattgatgtcattgatcactttagaatgattgggagtaacggaaacataatgctgaatttaaaaactgctatacaaagccactgaatgttttactaaagaaaaaaaaacatgtaatttgaatctttcaaaaaaatctcttttttggcccagaaagtacaaaattcttagctcaaattttaaaatgaaatacagtgtagtcaaatatgtaatatattaaatatgggttccaaactctgctcatcagtgattttcagagtaacattttaaccttctgtagtctcctcatctgcaacataagcttaccctgaatcatcacaaaagctccttatgctctaagtttttacatataaatattaggaaatcatttagaacatctggaaagcatttgaaacaaagagatgttatcaaaggagtcaacagtaattttcatcaatgtttaagaagcccaaaaaattcctattccacttgaaaatttagtgctatgcagaacaggtagtaaatgttaccagttcaagtcagaaattattttattagcagttgttagaatcccagccatgtccaagctggaaaatagggaagcaatt

SEQ ID NO: 13423 - DNA, 1026 bp, Homo sapiens
atagtgatttcctttctctactaactgctgccttaaagtctctttctttccaatattaatgtagttacaccaaatttttaaaaatatttaactgaaatatcttttttcattttactttcaacatttctgaacccttatgttttaaatgtgtctcttataaacatcacatagctagatttattttaaaatccagaataacaatctttttatttcaattggaacacttagttcacctaaatgtactagaaatattgatatttatttcttccatctcattttgtgatttctatttgtctcatctttttagtcttctttttcttcttctttcttgtgggtcaattgaggatattttcttacttcactctttttcttttagtgtttggaacctaatactgtagtttttattcttctaataattacccttgaaattttaacatgcatcctaacttatcaaagtccaagtttaattaatacatcaatacctttccctcttttgtaacaatacaagaggaccttagaacaccttaattctgataattctcctcccaacttatatgctgttattatgggataatttcgttctgtcttatgttgtgtgtgttttacacaaaacaaaagttaagattgttattaccattttatactggaacttttaatatacaatcaaccacattttaccactttctttggttatcattccttttgcgtaaaaccatccatcagagtgacttccttggtctggaatacacattataagttttcctttactgagagttttatttgaaaatgtctttttgccctcattcttgaaagacatttgtgctgaactgtaattctaggtcaacagttattttctccaggtgcactgatgcttatatttcactatctcctggtttccactgctgctgttgagaagtttgctatcagttctcccttttaagtaatctgtattttctttcaagctgcttttagggtctcctttgttgttatataatttcgtcataatgtgtaggtatagatttcttt

SEQ ID NO: 13424 - DNA, 1001 bp, Homo sapiens
ggtggcaggagagagaagtacaagtaaagggggaagaggcccttataaaagcaccacatctcatgagaactcactcactatcatgagaacagcatgagggaaaccacccccttgatccaaggtcctgttctcaacacatagggattatggggattgcaattcaagatgggaattggtggggacacagagccaaaccataccaattgctaatgacattattaaccataccaggaagagtttagcaaggtgaaagcaagatacctacacaaagagctctaaccatttcaaaatgctcaaaatatcaatatcaaatcatagatcatgagaaggaaattagttatgatattaacaacatgccactaaaaaatatttagcattttaccagtgtctggctttttagctaggagacctttggccagaaaattcagctatgaattaacagcttctagtgtgtattttcccgatgactgtacagaaagacactgtgaagaatggccagatggcctaatgaataaaatgcttggttttttgagcttctctgtttcccatctgtgtttacctttaagccttggctaacataaagcctgggttttgaactgctattcccacagattgtcacacaggttgctgatattagtccatatgcaatttcttacaaaaggaaatatttttttaaaaaaaggccatgggcgaagttaggggaagagactaaacactaccaagaatatgaatggggaatataaagaccactgaagttagagctggaggagatcaggatggcagacaagttcctcattgtgcagattaagaactcagacagggtaaacaattagtccactgttacccaatgaacaagggtgaaagctgggaatctcccaaatcctagcccagtattttttttatggcaataccctacctcttaagcaaacaacagctaaatactgtcctccccaagttaggagaacaaatgagacagatcctaagtgctataaaagcttcag

SEQ ID NO: 13425 - DNA, 1034 bp, Homo sapiens
tgctcatctaagtgttgcacatatgtgtaaaaggtcatgtccttcagttcccaattcctctggcgtctaaactgaactcaccatcttccccatccagacctggtcctcttctgatgttccctgttttaagaattggcaccaccatccatccagtaaacagttgagaaaccaaggtgtcttctaatactcccctctttgacctttctaccccctcatacatcagttaagtcttgaggttttacttttaaatatctcttgaattcatcttgcctttgctatttcgacagtctcctacgtggttattttatagccatgctggtcccccttctgtaactagatctttctaaatagcagatttggtcatgttacattcacttctttaccacacccttaaaataaatggtttcccttaacctgaccgggcctccttaacctgaccagcaaagccattgtagactggctgctgcttacctctccgtttcatctcagggcattgccccactcactgcattttatttcagtgctactctgagcctttgcataggctttttcctcttcagcctcccctctggctcctccgtcgattaagttaacacctaagtttttatagcctcttgctttcctgcatagcacttactatagttaccactttacattttatttatttgttataaaatcagtcaatgagagcagtagggctcttctggtgtgttcattcactgagcgcttccactgtttcatgtactgctaggtactgttgatagatcagtgaccaaaatgtccttaaggctggtggaggtgaccagaatgaatcagatgaatgtgaataaatgtaaaattgcaattttgataagtactatgaatgctaattatatggcactatgagaatgagaattgatgataccccggtgcttagttaagtttttactaagtatttgtagaatgaatagtcgtagaccttcatgcttaagggcttgttgtttggctggttgttagctttttgtgtttggcatctcaaagactttttctatctc

SEQ ID NO: 13426 - DNA, 1115 bp, Homo sapiens
gcctcctgagtagctgggactacaggcacccaccactacacctggctaatttttgtatttttagtagagacgaggttccaccatgttggccagaactcctgacctcaggtgatctgcctgccttggtctcccaaagtgctgggattacaggcgtgagccaccgcacacagccttcaggtcctttttaactgtaagacttcattatttcatatgacccttatttttaggactggtcaaggctcactaggaagtaatgttctgctgcagttgttgcatgtgcaaaccctgctgcctctagtggagtacagatcaattagcacttcctctcctgccttccaggctgtagtcctttggctcaaaaggtggttttatgtattgagtagatccatgagacttttctggatcctgatatgcttttacttgcctccttatccaggcttccatttttggtctttttcttcatcaccaatttggcatgtaaacttttatcccaggctataaagtgatcacatttgtgccctgtgccatgcttggacctctgaatcccagtcataccttgccttgtcctgaaccttgcctatgtcttccagtgttttcctcaacatcttgagttgtggctagcttttctttatgatgcatactaaccgttatgattcagttcttagttttgtctccttctgacctaccttttcctgatttttgtgactgattttgattttatgcttactcttgtgtctaaaagctgtctttcttatactacaatggggaagttacattgagtatgtcagcaacaatgtttaaacaaggggcaaaacctcactataatcgtatgtattttcattaagcatgacattctatgcaaggcttaccttcggggattaatcattagaaagtgccagaagtatccaaaagcgtccagccttgttatgtggcttcctctaaacatcacatcattttattgattaaaatgcttaaaagcttttgtgaataactctacattgaagtatcaatgagtggttcttaacccatcactgtatgcatctggtttaaggttatgagggttaaaacaaaaattcagatattcacacccagagactcagatagatttggtttgg

SEQ ID NO: 13427 - DNA, 1046 bp, Homo sapiens
ggggtcaagcgattctcctgtttcagtctctggcatgtgctaccacacctggctaatttctgcattttcagtagagatggggtttctccatgttggtcaggctgttctggaactcccgacctcaggtgatccgcccgcctcggcctcccaaaatgttgggattacaggcatgagccaccgcgcctagcctcttgttttgctttatgcttaaagcagtgcaaaatttaaagtatttcatgttttaatttaactttctaaataggatcaaacatctaaaagtatttaaggagtagcaaaaagttattctcacctcctcacacaattgctattagttcttaatttatccttctggagttttaagtatatatgcctatatatatttcctttcatttttatacaaatagtaacatactaaacatttttctatatcttgtttttttctccctatatctttaatgtaccaaacatttcaacagctatttattaacttattttttatttcaaatttaattttggaaaagagaatacattactaggttcaaggaagaatagaaaaatatttgaaaagtataaacagttacccattcttacctgcccagctccccctcctctgttctaaccctcaaacaggtaacgactattaatgttttttgtgtatttttacaggatttctttgtgtatcagcatgcaaatatgaatgtacattcttttttcttttacaggaatattacacatttgtgccttgcttttgtcacttaataatttgttacttatattaataatttgtagtgtatcaaaatgtgtatgcaacagatttataaacataagattataaatactccaaaaatactcatttggttagaaacaaaatattaatgtcacagcaacagtaaatttatttctacattttattgcaggctgtactctaaaggcctgttgaggttaatcagaacctaaaaatgctagtaacatttttttgtctggtacatgctgaaaaaaagctacacagttctacttatttcactttttcctttgtttcagggctg

SEQ ID NO: 13428 - DNA, 1035 bp, Homo sapiens
attatgttattgggaaattacagttttgcttattttgtcatggaaaggacccagtgggaagtaatttaatcacgggggaaaatacagttttacttatttttgtcatgggagggacccagtgggagttaatttaatcatgggggtggttacccccatgctgttctcatgaaagtgaatgagttctcataagatctgatggttttataagggacttttcccccttttgctctgcacttccccttcctgccatcatgtgaagaggatgtgtctgctgccccttctgccatgattgtaaatttcctgagggaaatttactcatgccgaactgtgagtcaattaagcctctttcctttataaattacccagtctccggtatgtctttattagcagtgtgagaacgaactaatacaattgcccagcccctgtaatttggcaagaaatagggcataaagattgagaaaggaagaaataaaactgtcattcacagaggacttgatacacaaataatctgcagactatcataactgaaatgaatttagcaaggccactcactagataacaaattcaacatacttttgtagcaacagagtctctctatattagcaataaacaaatataaaaaacacctaagaagaaatctaatgaaagatgtgcaagaacactttgctgaaaaccacaaaaatagttataagaaacttaagaaagacttaaatgaagagatataccatgttcatgaataggaagattcaatattgtaaagttgtcaagtggcccccaaattggtctacagattcaatgaaatctaatcaaattctagcactttatttcattgaaattgactcgctgattctaaaatgtcttatggaaatgcaaaggacttcttcatgagttgccttgtggacgagatttaagacaacccaagccagctctctttggtctgtgagaagcatacatgtattctttgccttgaccatgtctgtagacagaggacagtccaaatagcaaccccttcttccttcttatgagagcagagag

SEQ ID NO: 13429 - DNA, 1032 bp, Homo sapiens
ttaaaatacctaattccttttttaaaaaatacattttttttttctgactggttcatgtttttacttttttattgtggtaaaatgtatgaaaatttaccattttaaccatttgtaagtgtacaattcagtggcattgtgttcacattgttgtgcagtcatcactatccatttccagaactttttcattatcccaaactgaaactctgcatccattaaacattagggccctattcctaaccctttacaccagcccctggcaaccactattctaccttctgtctctattatttgaatatgttaggtacctcatattagtgaaatcatacagtattttccttttgtgtctttgcttatttcacttagcataatgtttttaaggttcatccatgttgtagcatgcctaggagtttcatttctctgtaaggctgaatgaataacctgctgtatgtatggtatatcccaccttttgtttatccattcatccactgatggacttcggggttgtttctgcctttggactattgtgaataatactgctgtgaacatgtgtgtttgaatgcatatttgacccttctttttatttctttggggtatatacacaggagtagaattgctggcccacattgtaattttacattaaattttttgagaaatcatcttacggttttccacagtgccataccatcttacatcccaccaacagcgcacaggtgttccagtttctccacaccttgcgaacatttgttattttatctttttatttttcataatagccatcctaatgggtgtgaattggtatctcaatgtgtgtgtttttttttttttggttttgcttttttagtttttattagtatttttgttcccccatgcagatcaatgtggttttgatttgcattttcctaaaaacttgtgatggtgagcatcttttcatgtgctctttggccatttgtatgtcttctttcatgtttggttgtatagcctaatctctttttctgacccaccttcccctggcattttcaatgccattaacaa

SEQ ID NO: 13430 - DNA, 1059 bp, Homo sapiens
tgtaatcctagcactttgggaagctgaggtaggaggattgctggagcccaggagttcaagaccagcttaggcaacatggtgagactctctacaaaaaattaaaaaaaaaaaaaaattagccagccgtggtggaatacgcctgttgtctcagcttctcagaaggctgaggtggcgaatacgcctgttgtcccagcttctcagaaggctgaggtggcaggattgcttgagcgtgggaggtcaaggctgcagagggccatgatcatgccactgcgctccaacctgggtgacagacaccttgtccgccccccccccccccccccccccccgccgaaaaaggttataagttgaatatagttaatattctagaccaggggtttgcgaactttttttctaaagggctagacaagtagtttcggctttgcggccacagtcttatgtttttcttttgttctttcttttttttgggcaacttttaagaaatgtaaaaaacattcttaattgaagtctgtaggtcggatgtggcttgggctgtactttgctgacccctattctaggtctatttgcactgatcttgctaggcaacatgactcttttttgatgatgagattcttttcttaatgtccatcttagtagagttgcaagtgctgatactgtccaggtgatttgtttttttttaaatttttatttttgaataaatgactaagaggtaatattattttaattttcagatggtgaccctgataactatattgcttattatcggagggctactgtctttttagctatgggcaaatcaaaagctgcacttcctgatttaactaaagtgattcaattgaagatggacttcactgcagtaagtatatctcaactttctttaaaggggaacttaacagaacttggggagagataatttgtttcataaggtgaggactggcatgctagacatagctggaagagatcaaagctacagtgatgttgtggactgaggaacaagagaaattcaaagtccctagaatcaaagatctgtgtgaaagagaacagcgggtacattagatgttt

SEQ ID NO: 13431 - DNA, 1027 bp, Homo sapiens
ctgtctccactaaaaacacaaaaattagctgggcatgttggcacacgcctgtaatcccagctactcaggaagctgaggcaggagaattgcttgaacctgggagggaaaggttgcagtgagctgagattgcaccactatactccagcctgggtgacagagccagactccgtctcaaaacaaacaaacaaacaaacaaaaaaacccaaagttttaaaagaatactcaaagtattgtgaactgagaataaaggagaatggtacttttaagtcataaagtcattttggttataatttaaagatagcactttatgctatgattcagataactgttctggtttttattggttcagatttaatactggatcacatactgtaattcaccaactgtaaggagctatcaattataagacaaattattttatgtactactagaagaataaatgctgccaattaaagccatcttataacaatatttttaatttatgcttatggaaagaactgtttgagacttagatatgcatttttgttatatcatactgctgtattcattgccttcctgcatacattaatttcttgaagattttaagtggaatttaaactcagcatgtgtagtaagtaccaaaaatgcccataacacaaatgaagtgtgctagaccattcttgtgtatgtatgatcatgctgactggctgatggtaagactccatcaatttttagattcatccctctttgagagagattcaaatgtgttttcttatcagcttgctgagatatgggccaaagggaaagaggaaggggtgagcctaaaagatgccagcagtaaaatggagtaagactctattacatcaggaaaagagggaactactgacttttaggattcatggcttaaatgataaagtagagccattgattgaagagattgatggggagggatagcaatgggttgaagatgggaaacagaattccactttgtccctgttactgagatgccatttaggtgatggattggagacatctaaatgtgaagtag

SEQ ID NO: 13432 - DNA, 1206 bp, Homo sapiens
ccctgctgcatccagtcatcagacaagccagtttttccagtatctctttaccctttttacccaatgaacttaagtatttggaatggtttacccttgtgtatattacaggtatcagatttaagagattaaaaactctgcttagttttttattttccttatagctcaaatctaatccaagtgaaaatgaagaaaaggaagcacagtctcaacttataaaatctgatgaaatgcagcgtttgcgttcacaagcacttaacgcttttggaagtggagattatactgctgctatagccttccttgataagattttagaggtaagtttcttagatactgcagttgaccagcctgacacttattgtaaggcacatttatatacttcgacatgtcacataccacaaagacctagacaggagaaaatcaggttggtccttgggcttttgcctcttaagtataaaatagtgttcctagacaacaaaatttggactgaagttttcagtaaatgtactgaatgtgctgtggcatgagagttaaatatgtttataaattgcttgctttgctattttagttgattttgtatttttttgggaagaaaactctagcggttagataatgggataaaagatgaaaaagatggttggagtaaaaggaaaaatgatgttcgggaggaaagaggaatgtttagagaaaaatttctagagaataaggcagataaagagttgatagtatgtgcctgtagtcctagttacttgggagctgaggctggaggatcacttgagcccaagaatttgtcgctgcagtgagctgtgattgctccactgtaccccagcctgggcgacagaatgggaccctgcctctaaaaatattaataattggctgggtgtggtggctcatgcctgtaatcccagcactttgggaggtcgaggtgggtggatcacttgaggccaggagtttgagactagcctggccaacatggcaaaatcctgtgtctaaaaaaaaaaaaaagaaaattagctgggtgtggtgtgcatgcttgtgatcccagctactcgggaggctgaggcgctcgaacctgagaagcagaggttgcagtgagccactacactgtagcctgggccacagagtgagactccgtctcaaaaaaaaaaaaaaaagttaataataataatggttgataggatccagagagttctagctagggaaacctga

SEQ ID NO: 13433 - DNA, 1035 bp, Homo sapiens
tagccaggatggtctcgatctcctgacctcgtgatctgcccactgcggcctcccaaagtgctgggattacaggcatgagccatcgcgcccggcctaatattttcaattatatagttaagaatattgacattgttagcaacatagctctagaacatttttatttttgtgaaagtaatatgcaatacacatgaatctcaggcttttaaaactctctatttccatttccttttgttagatccttcatttttatcttctcccttgtcctctttcttgttttgtcttcatgtctatgatagttttgatttgttcttatttttcttgagtcctgattgctcacatttttacctcctcgtcatctggtctctttcctgagttctgattctgccttgtgattactcttaatggaagtgattggattaagttacataatttgtctatgatgcttgcccagaatttcctctggttttgtttttctgatggctattcagaaaatagtatgctttggctatgtttttctgatgaacattcattagataagttttacatgttcttttcctgatttttaaaatatctttgaagtgatattgtgccagttaaaaaaaaattattactcatcataaaatgagttggagttcactgccctagctatttgtggggctagtcctctggatgtcagttttgtttttttgttttctgcatgtaaggcgtgctggggccagggcagccttctgtagttaacagtcgcagtactctctgcttcactgtttccacagacattctgcttcccgctaaaatgattttgctgtatagccctgccctctctacttctctgcaccaaaccatggccaggaggtcatctgccaccagccccacttgcccctgtaccccattcctttgctacaccaaaggggtgtgtgttttgcacttcaggatgagcatagagttgctgttctctgggatctgccgcacaggctgtttcactgttccctctcactgtattctcttctttacctctgtcttgccccagtaagccct

SEQ ID NO: 13434 - DNA, 1042 bp, Homo sapiens
taggaagatacattgcaagggtgcaatgggcagcatagcagaaaaggggctgtctgcaaagaggcaggggctggagggaagtccatagggtcgtgctgctggggctccatgcacataaggtgtgcagataaggttgtgctgctggggttatgtacggtatttgggaacaggatgttgggccagcgggttgtctgtgattggctatctcttggaacaattgtactccccaatctgcgactctttcatcactgttgtttatttatcttattagggctccacaaccctgttggaggaaaccacgcaaatgttcagcctgttgccatgacatcatcaaggggtcctggctcatctgggcctctatgccttcagtttttcacctctctctttagtcttctccttcacctcctttcctctacccccagctctcattctcagtagatggcctttgtttgctgctgcatcaagaaaactgggcctataaaggtgatccctacttcttctgacttccacctgaaaatttagctaccatttcggccatctttattgttttttccaatcaaagacaatgaagtgtttggcactctatttcatacctgtaatggactgaatgtttatgtccccacaaaattcatctgttgaagccctaccaaacaatgtgatagtattaggagatgaggtcatgggggtggagcctcatatgctaatgttggctactatgctaattccaatggatacttgccattcttctatgtcagtggttcccaacatttttggtactagggatgggttttgtggtgtttccatggaccgggagtggttggaggtcgggggatggttttgggattaaactgccccacctcaaatcatcaggcattagattttcataatgagcatctaaccttgatttcttgcatgtgcagtttacaatagggtttgtgctcctatgagaatctaatgctgctgctgatctggcaggaggcagagctcaggtggtgttgctcgcttgcctgccactcacctcctgctgtgccacctggttcct

SEQ ID NO: 13435 - DNA, 1033 bp, Homo sapiens
gttatttagatatatgtccttagttctgctcttattctaggtacggtacttgcaggatctcacacatttctgtaatttcatctaccccttgtgtgctcattggttgcttaggaatcagagtgaagtcatctagaactgtaacattctggttatttgaactgcttaaatattagaatgtagagaagtaggaagaggtaacagctagcatattcccaaaggttttgaaataagatccccatacccactgcaacagaatcacttaagtatatatacccaaccctatccctgaatttctgagtcagtgtgattggaatggggcttgggaatctgtattgtcaaaggcttcgtgaattgcttctgttgtacacttatcgagtgattactgtatgttaagtactgggctaagttagaaagccagtgttttgttatggaaatttaaaacccttatctgttttctccagttattaagtttcctgactgcaggatgacctacgggtgggatcaaaactttcttctaaaagcagctctgaatgtgcttataactaatagagttgacgtagtgtttggttctgtcctgtgaggcatagcagtgtggtggcccagaatatttagaaggcaaagatttgccgattgtttgtcccatggatatcctctctggacagctgctgacattgagctgtgctgtgtcaggatgggtccagcatgggttggctttaaagtgcattccaagataactaagtggaagaagttgcaagctggatgtcggctgaggctctcctccttagttggctcctcaggaaggtgctgcatggttttgccctactttggtgcaaagctcatctcccttcaagttcccagggcctccattttcatctgttagtttactggagatttggggctcatgcgggaattgcatttgatatctgcagtctctctgcatctcctggttcacccctttcctggcttttctgtcttctttctcttcccctcaatcacattctctctcttccaaaaactagacaccttcccttct

SEQ ID NO: 13436 - DNA, 1024 bp, Homo sapiens
caccaccactgtgactgtgtcactcactgatgacccaaaaattgggtaaataattatcttccttgtctgtattaatctttcttaaatgtatgtatagctcacatttatttcagtgtttagtattagaagtgttttggttctttatttagaaatttggtgttgtttttgtgaccataaacataccatagcaacttaactcttgtttatataataactagtctatggtaaaattggttttgttacacagcgttttgcttaaagtcacagtttccaagaacctactgatgacattgaggacttactgttaagtgcatattggacaaagctatatattcaatgagagattaaatatatctcacagtcaattaattcaaaggtgggagagtatatcctgaacatggtcaggcagaaatacctgtgaatagggtctgtggagagagacaaaaatagagacagagcaaaaagggaggtgagattgtgctagtatttagctacttctgacttcggacctgcagactagagctatttattaagtgaacacttaagttaattaagaaaatgcacttaaagattgatgtttacacaaagactaccaaagaagtggaaacagcaacctaaagataatgaattttaggaaagtcaactttagtaatttaaatataagaaaatgacctgtaagtggaaggacccatgaaaattagattatttcttaaagcaacaatagttataaggatggcaagaggatgaagagaacaggatgaaacccaggtagctacacagagctgcacattggaaatgtccaagagtaaagattcggaattagagtaagcattaaaccagaaataaggcatatcaatgatggcatgaaaagataaaaccaggaaacatatggtgactgcaaggtgaaatacactaagggacaaaatagtctttatgtatgagaggaaaacaagactgagaaaacacatcctgtttattagatgcaaaggaaaagaggattggttccaaaacaaaattcagttgt

SEQ ID NO: 13437 - DNA, 1033 bp, Homo sapiens
ttataaacaaaaacaaacgtttacaaaataagaatggacatttatgaagaacctacttaaagatcttggaaataaaaaataaaattattaaaatgaaaaacatagctgataggctgtatcacagcctgggaacagcttaatagtacaccagtgatttgggagatcaaggaattttcccagaatacagcacagaagtaaggatataaaaatgtattttaaaaaatttaagtgacgtggtagacggattcataagctccaatatccatctaatgaaatgaaagagcagaaggtgaaaaagagaaagtagaataaggggaatgtagaagaaagagctgaatatgtgagacatttggaatacttgtcaaatatctagatatcaagtgtgaaaatgggagctgaagaggatccagagagactaaataggtaggcgacagcgccactgaatactggaagaaaaaaatttgtgggcaaagcgtttatttgttttgggacctttgggtttggaggtgctggagaaacatccctgtggacatttttatccagtactagaaactttaagtctggaagctcagaagggaggtagggaagagaaaacacagaggcgatacttgaaggatttcaagtgtatgatagaatggaaaatgtgataaaaggtggtgtgaagaattctatttgatatacaattgttgtactatgtggtttaactttattaaatcaaagtcaactgtgatacaatgaggtctgccccattaaaaatttatcacagttaagatgaaaggcaacacattttatgttatctaggagttctttttcatgttttgtgttttgtgtttggattatgtagtttggtttatatttgatatgttaattaactattgtgtttggttattatgaatgtttttccttgtaaacagtaatgtggtttagtttttttttgttgttgttctaccatccccttcccaaaatcaatgactaaattatgatggctactaaatgatgcacgtaagaggttcccccaaataatctgataaca

SEQ ID NO: 13438 - DNA, 1290 bp, Homo sapiens
atgaagaggagtattgattttattttagtttaattatactacatttgatgttgtatctgctgcagattaaaaataactatattgtcgttactttgccttttcttcttgttcagtacctgttatgaacaaaggcatagcattctttgcaattggcagcagacatagcatcaaatgtaatatacctgttgtgaataagcaaataaaatccttaacaaaattccttgtactaatacttagttgcaaaatgatgtcctggtctcaccttcttatttctgaagcctctcttctgaactaaagacctctgtgagattaggaatcaagtgaaataaaatatcagaaaaatagcctagtcactcacatctaaactgttagcttccttttcaaagtcttctgcaatttctttctttgtccaagtatttggagattaaggatttccattttgtggaggacagctattgtcagtagcctcctcctgggtgaattaaagaagtgatagaaattgtttgagagctgattctagatggcagtagaaactaacatgggacatggccctgttgtttttctgttaccaaatgttgtggataataacaatcattttcataacctccattttcttggaaaaatgactgaattgaaaatataagcttggaaattacagagtgctatgttaaagcttttttttggcgggggggaagtctcgtataaaagttgatttttcttctcctttactgttatctaagaggtataccttcatgtttggtaagagaggctgaactgaattgaaacgttgatttccactagggtcccacacctggagagacttagatgctcgaggtggaagaaagtttgggatgatcttcattttgttcagtgtgccttaggggaaattgctgtgggcacctggagatgtttttcaactcttctttccagtacttaagagttataaattatcccccacccccttctaattataaccctatcataaaacatctactctttccctttcaatttgaggcccagatagatgttgttgtgggttccattactctgtccatgaccacatcataaaaaatatctccttctaaaggaagttcttacctgtgctacagtatggatgaaccttgagcacattatgctgaatgaaataagccagttacaaaaagacagataccgaatgattccacttgtatgaggtacctggaatagtcaaattcatggagacagaaaacagtggtttccaggacccgggggaagggagaatggggagttagtgtttaacgggtatgaagt

SEQ ID NO: 13439 - DNA, 1056 bp, Homo sapiens
aaaatgccagaaggtggggcatgcttgaagagggccagtggggctgagtgacacaaggctagatgggattggagaggtggccaggacccagacatgataggctatgaaggccgcaatcaatgtggttcaagtgtgatgagaagctgttcgtgtggctccatcatcaagccagaagcctggtcatcattcttggttcctgtttcttcgccattcttatgtctaattaatctgtgactttctgtttccaaaaacttctcagttttacccacctctctacattatcactgctacttcctcagtccatgccatcaccattcatggcagcttctgactgttttttctgcctctagacttgcctgcttccaacctggtctctacctcactgccagaatgacctttctaaaatgcaactttgatcaagtccattccagcgtaaagacattcagtgcttccaattcccttgtgctccaacctctctcatctttgctgcgtatacacacaagaacacagtcctactgtgctacagtccttgtagttctttgaatgtatcacagtctctctcacttttatgactaggagtgcttaatttttgtgcattctgtttcttctccattcctgcacctggataacttcaattactccttcaaggcctagacacaagtagtgtttttcttccctagcaacccagtctgagttaattgcctctcttatgtgcacttactgcctctcgtgttgttccttcctattttaacatcactccatattttacttatctgtctttcccatcacggtgtgagctgtttgtcttatttactctcctatctgaaaggcctgaaacggtgccctagtactagtggatgtttaaaaatttttgtcaatcaaatgaatatatacatgtaattcaaatggccaaagatgtgaagaaagaggatctttttctctatgagtcaaccagtgctttgtaaataaaatatgctgtataaaagctagctgaattaagtaaagtggcaggatataatataagctgtttcttgaaacctaagtagagtcaggcat

SEQ ID NO: 13440 - DNA, 1030 bp, Homo sapiens
tttgataatatttgaatgtacattgcataaacgtgcagggcatttagaaagaggagtagtgaagtttcttatgggatttcattaagcccctttctagccatctttttattttgtaaattgaatcaactctttcaggccaccagagctaattaatactttgggtaatctgctacttcattaactggaattccttgaggaacccaggaagcttccagatgtgcattctaggaagaattctgctgcttttcagtaataataacaacagacatgagttattggacgtttacaatgggctaagcgtttgtgatctgagctttgtggaattctcttttaatctgcacagtaatcctgtgagtagacattttcccctgcccattctcaaagccctcgtctcccttatttgccgccattccacatattgcagctgtttttctggcatcctcatttcattgtatatacaatattgggaaaccaggaggatacaaaaatctgcttgtaggaaatgcattgtgtctgcctaaacctgattgccaggaagctaaaccaaagagccatatgtgaaatagagtgcatttgaagatatttagctctggcctctgaatttttaaacataatccctttagataaattatcgtcaattataaattcagggaagtatggaggtctctattttctagacttatcttggtacccagaaaattcatttttttttaattaaaaaaattattttctcccagctttattggagtgtaattgacaaaattatatatgtttaagatatatgatgtgatatcttgatatacatctacattgtgaggtgattatcatcatcaaactaattaacacatctgccacctcacatagttactattttttgtgtgtggagtagagggtactttagcaaatttcaagtatacattactactaattatagttaccatactgtacatttgatctccagaacttattcatcttgtaactgaaagtttgtattctttgaccaaatcccacctcccccacaagcccccgc

SEQ ID NO: 13441 - DNA, 1027 bp, Homo sapiens
aaatgtcacactgggtccgcacatcaactgctttctctctgccaccggctgaggcagccaccgctggtagcccgtaggattcctggcgtccaccttctaccctcctactcaaatctatcttcttatctggtctctgccatccttgttgcttcagtttcgtagctggtctgatcctcttggcctcgcctacttggattgtaacccatgtgtatagtctgttgggattttgacgggcatctcctaagtgtctcccccgagaatgtctcctctgctctctactttttgaaaggtaaatcagacaggaggggaaaggtactgtgttgacagaaatccccacaacagccctataccgtgggtattgagtcttcttttggacagttgatacaaaacagcatagagagaatgagtaacttctcaaggccatgggaccagtgaatgctttgctgtgctttgaggagcatgctgatgatgactgtgactttggtaactgtttctgtagctcagagcaggggcttaagaagacatgggtgtgcagagctcacctgcagcatgctgatgtcactggagggagagctgtgctaggtgggcagcagcaaccacggagggacctttctgaagagactcaccagtgacatagttggtttctgtccttctctttctttgttacaagaccccactatttagctactgatattgccatagggcagagagatttattcagctgcagctgcatccatggcatctgctgatccactcacagcctttgtttttcagagttaggaagtgccttccttactccaaaatgcaactttcttaccagtgtttctgcaccatcctgtggtttatatttctggctctgccattctttctctgtgtgacctctagatggatctatgtgattcacagaggactggctcattgtcaatgacatgacaagtgattgaaatgtatttgatagttagatgatagaaatttctttagcttttagggccaaagtacatctgtattagtccattttcatgctgct

SEQ ID NO: 13442 - DNA, 1033 bp, Homo sapiens
gtaacatactttattttaaattttgacttgaattgtacaagataggcctaccaagaaacaacccttttacaattttattcattttttggctagagaaaagcctaggaatgcctcttagctagtgtcatagtcaaaggatgtgcagattctggctcatatttttttttttatatagctttctagcaggccaaatgagaataagattaaaattaaacttcctcagagtagccaccagccttggtagccgacttctagactcttttcaggagcggaaaaatatttctgacactgaaaatgaattacatccatgtttcgagtctccaaatagaatgtcttcaagaactataggccatacttagttctaaacaaacacttaaaatgaacttcccttacgataaagtatcagaactgaaatttgcaaagatcattcagctgtgtgccccaatatttcaaaaatgtctggcatagttggaggtggaaccaaaaagtgggcttaaccattggaattctaatagtcaactctgcaatggctgcccatttcactcacagtaaaatctcataccctgcaatggctctcgaggcccacatgattcaactcccttattttttggaacttatctcttatcactctcccctactttcttgacttgatcatctttcctattttgacaggcctggcattctcctgccttaggactttgcactggcagttccctctgcctggaaggctcctctcttaggtattttacatggttaattcccttaagtcctctttgtgctccaatattgcactcttataaagcataccttggctatactatctaaagttgcaacttggccatctttcctcttctctccccagaccatggcatacctagtcctccttactctgctgtagtatttcattttggcacattttataactatattattttttcccatttgttatatctgttgcttttggatatcttcccccaaactacttgagggcaagaatttttgttttgctcgctaatgtatctcaggtacctag

SEQ ID NO: 13443 - DNA, 1036 bp, Homo sapiens
gtttatccgaaacacaatattagacagtgttaaatagtagcagtcctcttctttgatattatttacataacacactttgatatcctcaattaaaagggtacgaggtgaaagagaatttttgttttttgtttaccctcatttattttgggaatagttgttaatacttcagataacaaggcagatttttcccatgtataaatatcttcttggaaatatggaatattggggaaaattagcaggcacctttttttgggaagagaaatactgtttttaacattactgcttcactgagcccattaactgcatgagtttgtgcacactccaaagttatgtaacagataatttcggattttgaatttggcttgggatacagaactaccatagacttgtcaattgtaaataagttttgaatgcggatttgactagtaggagatacagagtgtagacatcaatatagtaatatagatggaaagatggattgtctatgtaattccttgatcttacaagggagagaattgagaaaatgagccattgagcaacttacagaagttgtgggttagcggtagcggggatcatattagaacaaggtgtctcaactcctacaccagtgctcttgccacctactatgctggattttgtggagaaggtctgaggtcatggagtgaatgctatacaagggtaccacagtgtaacagatggttggtgctccccagcttttttctggtttcctgtgagaaaaaaaatcttcgttattgttggcctctagactttctcaagctcattatctgttatgaacaaggagtcatgagaataggtggatgtaaaaatagtgggtctgatagtagtaaaagtagctgatacctttttgggagaatttctagtcaaaaaaataacatttggctatagcagtgtcagcaggaccttctacaggttgcccatgtggtgacccctgccacctgccccacctctcatgccacccacccatccaggcttttatttcctcaaatatttcaaccttagtccagcctagggggat

SEQ ID NO: 13444 - DNA, 1025 bp, Homo sapiens
tgaggttctggagaaattggaactcttgttccctgttggtgggaaggtaaaatgatacagctacaatggaaagcagtatagtgattcctaaaagatttagaaatagaattaccatagaatccaacagtctcacctctggattgcttcttttcaattctaaaaaaattgaaatcactatctccaaaagatatcggcactcccatattcattgcagtatttttcacagtagccaagagatggaaagaacctgaatgaccatccacagataaatagataaagaaaatgtggtatacacataccatgtatgtaattttaatttttcttatttacaaaaaaagaaagagttgaaattgactttaatatatttttaactcagtacatccaaaatattgccactttaacatgtgatcgatacaaacaaattgagatacttgatgttctgtttattttgcgctgtcttcaaaatccagtgtgaatttacacatgtagtacatctcaatttggactaaacacctttgaagtgctgcgagtcatgtatagctagtggcttccatattgggcaatgcaaatctatatggcaaatattagtgctaagattttattttcatttgctagttgtttcttgagcattctttgttttcttagcagaccttaagcttcttaagggcaggaatcatatttttaaactcctttgatactcttaaggtattcagagtaatgcccagcctagtaagatagcttgatacatcccatttgttgaattattttgactaatgaaactttttgttaaaccaccttgataatgctagtctgctgactagtcctttggaaactggattgctctttttggaacaacaaagttgtcagagttgtaaataattgacaaggctgctaatagctgctgtgtgtgtcattagacaatcatttaaattcgtgagcatcctgggggtgggactgaggtggcttttcagctgctttcagtcacaacagcttttattttaagtatgaacatctttacatgcaaa

SEQ ID NO: 13445 - DNA, 1049 bp, Homo sapiens
tggaaagcagtgtgtgtgtgtgtatgtgtgtgtctgtgtgtttgtgtgtccgtgtatgtgtgcatgggtgtccttgcacttgtgcacaggctggaggacccggggtgaaaactcaggtggtggcaaatcatgaaaggcctttcaagacatgataaggcacctaaaccttatcttaaagacattggaacctgtggaggattttatgcaagtactgacaggcacagacctagaaagctcccctgactgtcataggagatgactgtggtccaggtgagaacaagaggatgtggaagcacaaagtggctctgggaagagcaatgggataggtcaaaaatgctaggatacaagaatgacaggactttggggctgattggatgtaaaatctagacaaatccaaccccagtttgagttgactcagcagcaattcttcaatatttgaagagccgtggaaaacattttgtattttcttgtgattttctaattttactataaagatagcattttaacatgtgaaagccacaaccccaacctgtcatcttttaaatttttctttgattctgtctgcctcatgtctttatagacatttaacttcaatcattgagttttggatttttctatccattttaccttctcctttttctacctgttgttgtttaactggaaaacaaaataactattgattagcatctctgtcagagaaagagtagtcacagataaagaggagaggtgaaatttttgtttcttgtttatttgttcaaattatatttctattataaagtttaaactgttggctgcattaaaccatgatttgggtatgtagcaatatttttcataaaatattattttcttggtggtgccctcacttgagtgatgattatattgtttccttctgaattctgtagaaacacaaaatgagtcaataatcagagccttctatgtatcttcttttgttgctactgtcaaaaataatgaaagcatccaatacaacttctaaatgtgaatattcttcgatatccttgcttgaatcatttgatcactactttgcaagg

SEQ ID NO: 13446 - DNA, 1111 bp, Homo sapiens
cacttagaactgaatctttgttcctttaagctactgaggcttggagttgtttgttgctgatgcataacctctttagactgataactggagtcactgccagaactgaaggtgacattctctttctggattgcttttcattgagtgtgcaagtatcggttaggtttcaaataacagaaactcaactgaaattagttgaggcaaaaccaaaggaagttagcagcacctggagtctaacaaagagttaaaaagtaagacaatgagaaggcatggaaagagctgagcctcaggaacaatgattttgggaaccaaaccctgccaggcccttcctttctaccttctgactctatgtctttctgtgtggcttccctcccttccttccttcttccctccctccctccctccctcccttccttccttcctccctccctccctcccctcctcctcccccctcccttctccttctctctctctctttctctttctctcttttcttttctttatttgattctttctttctttcagacagggttttgctctgtcccccaggctgtagtgcagtggcatgatcatggctcgctgcaacctcaaactcccgctctttcttattaaggccaacttttttgcacagtggtataaaatatggccactagcagctcctgaattccaaagttctgactgtttccatcatcaaagaaggacagacttacacatgttctctgaatccagtttcagaactcccaggcagagatttctgttgggcataagcttggaaaaatgtcaaccttttaaccaaccagctgaggccaggaggttgagccctgtaggaccaaggcagtttccctaggagctgcattagactagggagaggatcaccttcaagaagaaggtgagtggggtgctaggaagacaagaaccataggtagttactccatgtgtgtctataatgtgtgcagacaccattaataaggtagttgggtggaacttttcttgagttattgctggaatttggaaacatgtataacattctttcctctatattttctttggtgatttcttttggataaaagtctcacatttggaaacagctagctggaaaatgatgagttgtggg

SEQ ID NO: 13447 - DNA, 1096 bp, Homo sapiens
acaaccagatctcctgacccactcaatagcaggcaaacagcaagggggaaattcatggctatgatccagtcgcctcccaccaggtccctcctccaacactggggattacaattaaatctgagctttgggcggtgatacagagccaaaccatatcagaagtcttactacagaggtaaatttaccagaacattttatcagtagaagagaatattctttctttcatgaaaaaaagtttagagaagatgaatatttattaatcatttatctggcttttaaaaatcaagtcactctatgggtttttcttttaatatcaagaatcaaaggtagactttatgtctttttatattaaaaatatatagcttaatatgttcataaaatatgtttgctctgttaggttgcaaattaaaaaattgataaaaatgtatagtttaatttactttgaaagatgtttaataatagtaacaacttaatgacctcaagagaaatatttttaagaatgttaattggacaacattttgcgtaacatcaaaaaataccagaagtaccattagaaggaagacattgaagtctagagttctggaagagagaggcatttgccttatctgggcaatgattctcgtctgtgattagctttctctttcaaatgaaacaatgtctgactgacagaggatgcctttaactattatgctgcacaagagatgtatgctgagttagtccctgtgcaaaccaagatgtatggtcatctctgtgaacaacccacattgcattggaaataattgtcaatatatattttgatatatttcttattcacaatgttaacttctaatcctcctcctatatacagttaaacaaaacaaaacataaaacatttcaccataatatttgccaatcttatataccttggtctgaaacactttggcaagaagagagaacaatgggaaaagaaagtttattgattatctcgcacttaaagccaaagtaataagatgaactaggaacattctttgaggcctatcagactgatccaaatgttcaggttgtaaaggggaatgtaggggtggcaaagtgcaatgggaagaaagctttgctctatcag

SEQ ID NO: 13448 - DNA, 1864 bp, Homo sapiens
ttggcatatttcctctatatttgtacaaaatatttacatagacttcaactgtggaaaaacaattttaaatattttctaagtgaatttgagatcaaatacacacttggcatagtttgcaaatatttattttcctcaaattttattctaatattgttataggttgtgtaccgggatcccatggtacttgcatctactcttagtgtttaccaccttctggtttttattatttgtttttctcacttagccatacatttttgaagaaggagggggtggcatttactttagcatctgcttggtttcatgctaagcatagcgcataggcatagagagtgttcaataggtactgtctaattgaatggtgataatcaacatcaatgatgataaaaatgacttggtttctgactgtgataaaaatttaaatgtaacattttaggaggatggtgctagcttatttatttgaaatatttaattgaattcctgtcccaagtagttagtttacttagtggaaaaattttcacatataacaaggctacttaaatcaagttctatagtctgctggggctccatagataggtttaacattaatgcaaactctgaaataatttgcaaaatgttgcttgcatgtgcatttttccagagagagagaatcaaagcttttaatagattctcaaagagctctgtgacttaaataagatttaatgactgagtagttgttttggcaaaaagtccagattttgtcagttgtcatatgttctctctattcttatcatttaaattaaactttgataaaaatgtaataagatcgtatgttcctattcaacactgtattcaatttttttaaaatttaaaaacacatcagtgtccttatttttaactataataggaaactttacatgagaagaatattgttagagaaaatcaatagctaatagtggggaaagaagctataaaacttaggtatagtggatatatagtttataattcaacacattttacataaatgaaatacatttataaatgcatagaataaagacaagaaagatgtccttgaattgtctacaatgattattcctaggtgagtcttacaagattttattttcttcttttggctattacaatctgtattttaaaatctactcttcaagaattttatatgtgtatagtgagtattgctcaaaaattttttcttagttctttgcatttttgtcatgctgattatttttcttcaagcatttaaatatcaacacatgcatatacatgttcacatatgcatacacagatatatgtatatagaatcaaacagagagcaatctgcttcaatgacattagaataacttaaacattattgaaatgaaatttatttatcattgtgttgtgggacttaatgcttccatggccaataaatctatcctttgcttaagagtcttgggtttgcagaaggtggaagggttgtctcagctttttggatacaggtagaaagtttgagagattctaaaaatgggctggaaaaaaaacaagttaaatctaacaaccagtactgaaaagaatgggagatgcccatattatccatacaattagaaaagacgaggaaggagatttgagatatgctctctctctttctatctctgtctccctccctccctgcctccctccctatctccctccctccctccttctctatgtccctccctccctccctgcctatctccctccctccctatctccttcccttcccactctgtggcacacgtaaaaacgtatgcgtgcatcacaacatactgcatccacgtactcctttattgtatgtggcatttttttgggttcttctctttttcagtgctacccttaatattcatttaactac

SEQ ID NO: 13449 - DNA, 1026 bp, Homo sapiens
ttttggaacattttcttcagccaaaaaagaaaccctgtgcctgttagcagttgctccccatttttctctaacatcccttagtccctggcaatcaccagtctactttctgtatctatggatttgcctattctggacattttctataaacagaatttgaaaaaagtggtcttctataaattgctttaacttatctttaacttatcacaatatttaacttatcacagtatttatcacaatgttttcaaggttcatccatgctctagcttataacggcacttcattttattgtggaataatattcctctctatggatagaccacattttgcttatccattcatcagctcatggacatttgggttgtttgaatgttttggctcttatgaataatgttgccataaacattcatgtatgagtctttgggcatattttttaaaatttctcttggatatataccttggaatcgaattattgggtcatagggtaactctatatttaactctttgaaagactgcaagacttttccccaaagtggctgcatcattttccattcccatcagcagtgtgtgagagttccaattgctccatgtcctaggcttttaattgaatttttgatgttgagccacactagaataaaagtctatacttagctgcaacattacaatgttaacactagaagcaatatttaacaagcttgttatgacttttgcaggtgcattttaggatttcgttttaaagcaggtgcatttcaggatttcgttttaaagcacttgagaacaatctttctatagctctttgctgggagtcagaaagttttccaatactagagctctctgaatactgggaaaacaagattgctgccccagaaattacttttctttgttctctgtggacatcagatatgagtctgtggtttgggcttctgattagtttgttcgtacgtgattcaatggtggtgagtttttcggtttactcctcaaatgacttttttttctttctgcatgctggtggaaaagggaagatgaaaa

SEQ ID NO: 13450 - DNA, 1674 bp, Homo sapiens
ggtcttgatctcctgacctcgtgatccgcctgtctcggcctcccaaagtcctgggattacaggcgtgagccaccgcgcccagccagtttggatttttttcttaaggaaatttcttctggatattgctgtcagctccatcttggagtgtcaccctgagaagggttcgtgggatgtgaaatgttctattcctacagttgttttcattgtttccagtttccagcattgctgttgagatacctgaggccactctcacttctgaccctttgttgtgacttcacctgcaccttctctacttggaacattgtagttctcagtgctctgatatttcactgtgatctacatcagggaaggtattttttcatctctatagctgagaatttggtgggctccctcatttaagaaattcatcttctagaatctgaaccattaaaagaaaatattttaattttataatttctctccctctattttctctgtttttttcttttgggggcaactgttatttggaagtaggaccacctagattgattcctgaattttcttataatttatcccctagagtctaactttttaacccagtttctagaagatttcctcctttatcttccagtcctttaagtcatttttccatttgtgtaatcatattttaatttttaaaaattctttttgttttggacatcagaacacaggtggcacttgtttcctgaataatttatagcctcctttttctatttttagatgtgatactttcttatctctctgaggatatttaaaatataatttaaaagattttttttttctctattgtctttgccatgtttaggttcttgtttcattttgactactttggtcctcagattttctagaggcttttctccaatgtttggtggcctctggctgcagttgctatgtaagggtgagtcacacaaaggctacttgaaactccacaaatggccggtgagccacgttgctaagatcaccaactttcagatgtggaggtgtttctcttgggtctcagtgcaccggggaaaggtgtacttggctgcagtattcggggagctactaagggaaggggaccctggggctcacacttctctctgcagattttcacttatccctggtgtactgtacatctctgagctcagaatccttctttctttctgtctccaaggtaatcttgccattctctgctggagcatgagaggggcagtcacctggccaagaagagttagagagagcatctggagacctcagtgcttctttcaacagacattaccaatatctgtcagttgttcgtatgctgccctacttccagagactcccggtgcctcgaattcctggggttttgggttacggaatctctagcttcaggacttcctcctgccagctttggtgtcagccctcccctcttgtgtcagttataccagtctctttgcttctgtctctctccttctctctctttatagttgtagggcttcacctttggtgcccctttctcgtcatttggtgggatacaggaggcagcggcagtacctacatcaattccatccatcagatttctggaggaactaacttacactgaaattctctttcaaaaaaacaagactctttgcttttgagatcttgaacagtcgagggtaggaagtggtgctttctttctgggttcaaaaattg

SEQ ID NO: 13451 - DNA, 1035 bp, Homo sapiens
gtgccaggtactatgagcgtgtctcacagttcatagatgctgccattttattggttaatccacattcttcaggggctgggttcattctctctgcttttgctgctaaattcacccattctgcagacagtgacactctttctacagcaactaaaaagactctcagttctctcagccaactttggaaaggttagcatcttacgttacttcaaaatttgttctggtaaggaacatctaccagtttttttagggattagctgtagggctgttgtataataccactctgtgttgtaagcacatctacctccctcaccctgacctggtcctatagttgggggcatatctttcaagtcccccttagtaatttgagtactttgccttgccaggcatcctatctctctctccttccttgcagaaatgtagccccagtgtctgcggatagacaatcagttccaaagtatcttcaccgtttctaagagggcaattttattttttgaagaatggcctgtactgagaccctaatacatatttgagggtatctatctgagtttgaactcctccaggacttttaaactcaaattaaaattgatttgagtcttcttatatattaacaggaagtactgtagcttccttttgggatctttcctctcttaaaatttccttgaaacctgagagcttgctcactccaaatgggggttgagaggtcttaatttctgttataagagaagagagactgaattctcatcagtttgctaatgctgttgcttgcttgctgctgccaagttgggtggctgttgacaaaatcatgctctctgctccgacagatgccgctaattcacatcttcacactggccaagggcactctgccaatgttgacttttgagcgaggacaactttaatttctcagaaccacgcttagaaaaagttgcccttcacttggcttcccaaggtcatgtttcttgctgtttagctcatttagtcctttttcagaaccagatccactgttccctgtctgttcctgaagacatacacctagag

SEQ ID NO: 13452 - DNA, 1736 bp, Homo sapiens
aagtgtgagttgctgtccttgggcaagttatgtagctgtgctgtgtcctgcgccctcacctgtaaatggagataatagtaacctacttcatagggcagttgtgaggatccatcagtaaaaaacatttagaacagagccgggcccttagcaactgctccaggaacaaatatttgaacaaagttctgccacagagcctgggttcctttcttctaccctgaatgctgccttttcccaaaatgagaccaatatgttgcatgtgagctattgatcttctaatttacctattacattctgatatgctaaaaattcctgatgaatgtaggaactggaagtcctataaaacatcaaatgaatccagttaaatttgttggttgtttagggctttagcaaacttgtaaacttgtcctttgacatatacataccacaaaacttttgttagctagcatacaattgtaatgctgaatgaagaaaatttcaaaaacaatgagtcttaattcatgttgctcctccactctgacttttattctatcagtttcttctctctttagacctatagccaaacatatgggccataaattgtatctttgttaaggccttgtatgacaggtagatctaactttccacctttaagaaaagatggcataataactaacaatgttctagtgacctgcaggtaccctaaccttactgtgtaggtggcactgttcagttgtcttactgttcctgaccagattggagatttatcttgggtgatatctgaaatgccagtttctgatatctggtagtttcatggtctggacacctagcaggcaatcagtaagtattaattgacggatttgatttctacagctttctggttagtaaagcaccagcatgttgctaccctgtgcctgtgtctataagtctcttcacgggctttttttttttttttcatctggcagttttgaacactttaaatgggaacagatcacaagttctgatatggagagggaaatgggtcaaagtactcctgtcatgttctcacaagtgagcttttctgctacagttatttaaagaatgtatttattatcaagcagggacaaagcagacacacaacctctgtgtaaatttgatgaagtcccagtctcttagatgctataatcatggcctttcaaggaagattcactggagtcagatatacaatatcccgaagtaagaattccgtacaagtttatgtaggtggctgtatgcaactggtggtcttctaatgcccatgtctgggacgggaacatgcaccatctctcatgtgcaggtaggttataggcatcagtagtttttatactttgtttattcaagggtgtgagtgtaacttacctatctaaaatattttagccaagccatatatcttgaataccaatgagaacccaattccaacatccttagtgtggaagaacaaaccatgatttgaccaagaaaaacctaatagaatcttctctatagggtggtcacactggtgtgcgcttccatctgtcaagtgggaattcctgatcaggtcaattaactacaactggagtgtaacttcaataaatcatacacagcagattcactgtctatgctcactaaaaagagtttttcttcttaaatgaaaatttagtgagcttcattttgtgcatatgtggtttttttttgtgtgttaagatctgaacccctcctgtattattgcttgttttctaagtgcataaactaaatgaaataga

SEQ ID NO: 13453 - DNA, 1033 bp, Homo sapiens
tttgtcttataaaattacttgacactattttttcccctttgtggtgaactgctataatctgtcttggaaagtacttttaaaataccaaagatgaagttctgtttccttcacagatcattgggtgctttgctttagcaccttgcataatgaatgtctcattggcacactgcttaagcatcatttaatcacaaaacctgaagaaattccctatttgactaggagtgactcttaaaaccatagcaatatatacatgaaaatataaataaaaaagaagcacaaggtcatgtaagaattaatgtgggatactttctccacgaaatgacctgggcaaatctaaacaaagagctccttaattaaattagcagaaatggcacatgatctcgctacactgattcttccctcatctctagttttaaacaagatattcctcatgaccctaaataaatacacaattgaccactggaatagtcctcaaatagaggaatactggaataaacagaaaacccaagtaatttaaaacactcgtagtaactaaatttcctactaaatccatgagagactatctattttccatatgcatttgcagaataaaagcattctctttcacctgtgtctttgatgagagaagaaattagaagtgctatggcaggtggaatgctagaggaacaagatcagagaccatggtgacattacagctgcagctacagtacataaacttgcatatgtgagagtgaggaagatctcaaacatggagagctcgggacttctgcttgacatagtgaattggccacacacatttatctctctccccttctaaaacccttctcaaaatgagagtaaaggaattaatggggcattaacccacaggaacctagataacaggagaggaggcaatagctgagaagacacttgaacaaactttggaagaaattgagtggagaagtggtagttaatttagcagagaagtgcatatttaaacttatataaagtaacagaaggggatactaatgaggagtgatccagtttgctccac

SEQ ID NO: 13454 - DNA, 1030 bp, Homo sapiens
gatgccacatcagggttggatgaggggattacaagttattcaagacttctggatggagacccccatcaagatcagaagccttttggatggagttgcagatctcattgcttggcaagccatggatattttcattttcatcccactcttagttgggttttctggcactcttcctgcaccgagcctcctgattactgaatagacatcagtggcatagcctgctgaagaatggaatgaagatacccatgggaaggtgtgatgtcaccactgcacacaggtgtgaaaggagaggcctcctccctaccacttgtctaccttgctcacctactggtagcagtgcctatagttggacctatgttctcagaaacatagatgggcaaataagcagttgagttaggctttaggaggacacatcataggagagtgagcatgcagggtctctgagctggttttcttttcaggcagacatcttgagggaccagtaagcaggggagtccttttttctagtttgcctgtagaagtaggaagactgttgatgtttcagtcctttcaggactttacaacatagctgtgtaatttcacaaggcagatctttagcttgcctaacaggtttggaatcttcaccccaccagggcaaatttccaaatagcttgttttaatctaggcaattccaactttcatgtgacgtatttcccctttttattgttgctgatttccatgtttctgtcagcaagttttcttctcgccttgcttgttcttcacttgtttggtggcaaagttcgtagaactagggaacttggaagatgctttgaaaacattgtcacaaaggcactgctaaatgatgcacagaagtggccagtgggaagaagtgatcccaaggacctgacactggttttcaacaacatctcagaaaactcgtcaagtggattgggtgccacgccagtgaacacaatgttttgatttaattatttttaaaagttgatgtggtgatggtgtggcttcccgaaatgggcagatattcaagtcagaagag

SEQ ID NO: 13455 - DNA, 1169 bp, Homo sapiens
ttatgtttaaacaatagcaagttgtatggacaatgtaacaatattaatttttctaagctatgaacacaggatatcgtttcatttgtttgtactatcttcaatttctttcatcaatgttttacagttttcagtatggagatattttacctgcttggttaaatttatttctaattgttttatgttttgatgctattttgaatgggattattttcttgatttcttttttagatagtttgctcttagtcaatagaaaatgtttatttttgtttgctgattttatatgctactaccttactgaatttgcttattatttctaacagtttttatgtgtattgtgtgtgtgtagagtctgcaaacagggacaatttaccttttttttttttccactttagacacctttttttttcttgcttaactactctagctagctagaatgtccaatactatgttgaatggagtgaagagagtgagcatccttgtcttgctctgaatctttgagtaaaagctttcaaagtgttcctattgagtataatgttagctttgggtttgtcatctatggcctatattgtgttgaggtacattttttccatacctaatctgttgagaatttgtgtcatgaaagcatattgaattttgtcaaatgctttttctgcatctgttgaaatgattatatggtttttgccctacattctgtcaatgtgatgtgccacatttgctgatttacataagttgaatcatccttgcatccctgggataaatttcatttgatcatggtgaatgatcttttgtaataatgctgttgaattcagttggctagtattttgttgataattcttgcatctatattcatcaagtgtattggtctgaatttttatttttgtagtatgtttgtgtttagtatcagggtgatgctagccttgtaatttttttttaaagtgtttcctctaggccaggcatggtggctcatgcctgtaattctggcactttgggaagccgaggcaagtggattgcttgatcccaggaattcgagaccagcctggccaacatagcaaaaccctgtctctactaaaagtacaaaaaattagccatgcatggtggcacatgcctgtattcccagctactccagaggctgaggcaggagaatcacttgaatctgggaggcggaggtt

SEQ ID NO: 13456 - DNA, 1047 bp, Homo sapiens
tcccctgtgtttaggctctcctttcttgtttctttgcatgttttgtaatttggggttgaaaaccacacattttagctaatataatgtggcaacactggaaatcagattctactcactccccaagatttgttgctatttattatttgtttgcttagtgacttttctgagtaaattctataaagtctgtgttctttttgtgtgtggctactaaagttcctgctaggtgaccttagtggtcagctaatgattggaaagagacttttttatatgcctgaaactgatgaatcttccaatttttgctgagcttggtgtgtgtacaggggaacacttttaatactcagctaggctgctcattcttagtcttcatttttttactcatacagaaccccaagtccagccagaggttagactttgttagatattccttagcatacacacagccttagctatatgcacacccctacacatgcacaagggcttccagattctcaggaatttgttgggtttctcaaagactcctgtggacatctcattacctatgttttccttttaagctttttgtttagtgttttgtgtcaactgttatccactgcttcaggtagtagttaaaatttaaacaattgcctctgatttgtgtgtgtgtgtgcacaaaaaggctttttaaagcctttttgtgaaagctcattgggtgagctttttgtaaagttgactgggtgagcttcatgtcacttcaagtaccaacagccctgtgagtggagtcttccagggaaacattagacagaccaaataatgaataattatatggaaatagagctttgaaggggttcttaccctattttaccccctccaaatggcttcccaggctgctggtgttaattatgattgtggcctgttggtttttaaggttacctcagaaatgagggaggaggtggatgggcatagggcaagttaaaataacatacaatgtgcttttcttaataaaatttagcttctttttaggaaaaatgaatgttctctgaattgctgcaagcctttgggttaatggct

SEQ ID NO: 13457 - DNA, 1050 bp, Homo sapiens
catgcattgaaatctccataagtgtgtttgaccttattataagcactttggctagaggattcatactgtctgaaaaaaatcaaacatatttaatagagagcagcacacagtatgagcactgtcttaagatatagcttgtattgaactataccattttattctataaataaacttaggaatgatggctcatcttaaatggttgttttgagggtagctctaattcaggcaagagaatttgaactctgtttatcagcttaaaggggaggaaatgccatggaaattgctaagggaagttctgggtttgttgtactgaaaatagtttataaacaatttggtagcatattttccctctagttctgtttacccagtggtctacttgggactaggagatctttcagatttctgaatctgtaattttcaattggatgctattacaaaaaaaaaaagttgctactaatagccaagatgaaattcaatagacttagaaagacaatttcctaacagataaaacttagaattttcaagtgtacaaaggaagaaacagacggaccagtaataaaagcctccatttagagggctaaaaaataaataatgtcgccatgttatgcattgtgattatgaactgctgaattggcgtttgcggtgacaagagtctccaatttattggatgcatgtcattggaatttgccctttctttttatgtgtctttccatgatgaatgccagtgctgggaaatgaagagctcttacccttttcatactttgctggatgctggtgaacttgccaattgatgcttctataatttttgcttcaaggtcacctgagtgaacagagtcatccaaacaaggtcactgaatacattgaatgtgaatcattctttcttgaaaagaaaagtcacagaaaaattaggacaccaggatataattactataagatggcaaatggattaagagaatattttgttataaaatataattcatttaaaataaaaagtgataaatagtgcttggacaactaaggtcatttggtgtgctctcagtaattcaatta

SEQ ID NO: 13458 - DNA, 1060 bp, Homo sapiens
cagtgtggcatgctgttcccacttctctcaatgctgatcccccataccctgctctactttttccatagcattttacatcttcaaacatattatataatttatacaaatatatgtcatacctattgtttaccatgtatatccccaactagctgttaagctgcagaagaacaggaatgccaatcgttttgttctttggtttatatcaagaatgaagagctgtgactggcactagcagacactataaatatctaagaatgaatgatttcctttgaaaggcaattcatccttgactttcatttctgtcttatatctatatcgaagtcattcctcttctacattctttcttggtgggtcacttctgagggactcaaggaataaggtacattctgaacgaatgagtcacttttggggtttttctctagaagctgaggctgggatgagggatttgtttatctgaaacaaccaagaacagaaagagtacaagaatgagtactgaatgtcaaattgaggaagtagaacttgatttaagtccaagaggtgtatggaaacttaaaacaggcagcagggtggaagactgaaatataagaatgatgtgggtgaatgcatggggaaccgagtgagtgtgaagttcacacaatggccacaggtaggcctgaaagtcttgtggtctatatgtattgtcctgcaaagttcttctatgtgtgggtggataagtctagtaaaactatataatacaagtagatagttcatactgccttccattcattctgtccattaaatttctactcctgtctaagtcccttttaactttagtctgtgatactacatcacagaaatagcctgttctttctgacatgccctctctaatccattctttttctcaacaccaggttcatcttccagatcatagtgttgacttgtcattattttctttccaaatcctttaatacctccctattggctactggaaaaagtcctgacttcttagtctagaattcaaggtttacttctaacctatattttgaaaattctttccttctaatttttctatcatcaatta

SEQ ID NO: 13459 - DNA, 1048 bp, Homo sapiens
ttaagggaagcctcattttatttctgtcacaaatcaaaagttcagatctagaagttattagatagtaaactcatgttccaagagatatgacagaaatccattgttggaactaattctgaccacatttcaaacttctgctcactctgaaagtagaataaaggccaggaaacaaaagagatgatgaaaacaaaatatgttgatgtggaagaaatgtgtttagggccaaggctttgggctcaaggtcagggtcactgtgaacttttctgcctctggacaatgtgcggctctgagctcttctgtagtagaatggaggaaggagtcgcaaaaacgatggcataggaatcctggtggaatccttcaatgaattggctattctgagaaaccaaggctgatgctcttgagctccaagctttaggcaagttctaaaccttacatttcatagcaaactgactggattgacggaattatatacaaaataatcttatgcttgctctaaagccatgtttggaatgtgtcacggccagatgcagtttgtcaaaacctgaatgtgttatggccagatggattactctggcttttcttttgtgtgtgtgtgtgtgtgtgtgtgtgtgtgtgtgtgtgtgtgtgagagagagagagagagagagagagaaagaatgagaatttacatgtgcacatgtgtcttaccctgccacacctgggatgtgcctcaaatggcaaagcaggaaataatcaaaggtagaacccaaccatccctaatatttattcagcaccaacagagatgtattctttcctaatttttgtttattgcaaagcaaaattatcaaaataatgaggagaaattttaaaaagaaaaaagatattgtcttaccaacctagaactcattcacttttacgatgctttaaggccaggcacagtggctcacacctataatctcagcactttaggagactgcagtgggaagatcacttgagcccaagagtttgagaccagcctgggcaatatagggaggtggcacatacctatggtcctagctacttgggaggc

SEQ ID NO: 13460 - DNA, 1046 bp, Homo sapiens
ttctgttgaggggaaacaattaaccatgtagacattcaagaaagactggaaactttgtccaataggtaggagacgagccatgatgtatcaaactgaaatatcattagcttcccttgaaaattctgttgacctaagttaaaatgtaagtgaagatttcaaaacataaaaaagaaacatgtcaatagcattttagtttcaacatgaaaagagcttaattttttgcttataaaaattacagtctcattgaaacattttcatacactatagagaatatagaattaaaattgcttattttcttccatacacagagaatcaatatctggctaatactcttttcaggcatctatctatgtttattttatctacatatttgcattaagagaatcacacttttttttaccctcatcatatgttttgaatatttattgaaacagtatttaaaataaaacatatagagatatgcttactgatgtggcttgaagggtgctcctcctcccagaatatgtccacttggaacttgtaactatgaccttatttggaaatagggtcatttcagaggtaattaagttaaagacattgaaatgagatcattccagactatctggatgagccctgtaaatccaattttgtcattataggataaaggcagaaagaaactagagagacccagagaagagggtggggtgaagatggaggcagagattggagtgatgcagccataagcccaggaatcctgagagccaccagaaactggaaagggagggacagaatctcacttagagcctttggagggagcgcaaactcaataccatctttacttcagacttctggccttcagaactgggagggaataaatttctgttgttttaagccaccaagtttgcagtaatttgttatggcagtcctagaaaaccaatatagacagacaggaatttatataaatgaatacatttttaaataaagcctggactcctaatgtgttccaagaaggcaggcatgtaactaattatagttaatgcaatgtttctcttcgatattctgtttaa

SEQ ID NO: 13461 - DNA, 1016 bp, Homo sapiens
ttcagtatttctgttagttgctttgtaaagtgaagccttagttaactgaaagggttgacgcacatctagagcaaattaactatgaatcagtttaatgttgactattcaattgcaggtgagattcatatattctcagattttgacagattctggaatgtccaagctttttataagctgatatatgccaagtctgtatcttcacctgggacaactgcctgttagatctcctcttttatggccttccccccgggaagacacgtcatagaagataagagcaaggcttctggatcagaaatattctgggttcaaagttttcctctgctcctaattagctgtgagaccttggccaagtgacttaaattctctgtggcttatttctaagcctctggaaagtggaaatgacaattttaatcacctggtgagaatcacttctgaagaatacgggagctgaagccctgaagcaatgaacaccatgcctgtgcaaatgcccagaaagatgctggttgctgttgtgacaattacatcacaaaccaaactctgtcttcccccatctttcctcctgaatgcctaattgagtcactgtcctcctgttacgggttaaatgctgtcccctaaaaattcatatcttgaatttctaacctccagtacctcaaaatgtggtcttatttggaaatacaattgttgtaggtaattagataaattaaggttataccagagtagggtgtgccccctactccagtataactggtgcctttatgaaagggggaaatgtggacacagacaagcacacagggagaatgccatatgaaacgaaggcagagattgggaagatgcaactacaagccaagaaacaccaacgattgccagcaaaatgccagaagttaggagggaggcctttatgaaacaaacaactaaggaaagagtatttgagatgattgtcataagaatttaactgaataaacaaggagatcaaagctgtagtgtgaagtgagcatctgtatcagtggcacagaaat

SEQ ID NO: 13462 - DNA, 1077 bp, Homo sapiens
ccaaaactcagaggaggcattcaaacacttctagcaggttgtctactccatccaactcaaaacctattcaatatgaaggccgagggaatgtgctcacaactccctattaagggaaatcaatataaacccgcccccaccaaccaaaaaaaaaaaaagaaagaaaactctccctttttaatgtcttcttccccaggctcctggtactttgtcagcaacatactgctttcattcttaaaggtttcattggctgttaaatgagtccctttgcatactcactggagagaggaaatgctttaagttgtcctaagataacatctgcacacagagagtttatctgattccttatcaaccatgatctctatctgaggtcctgtatagtgggatcatttagagatgggggttagggagagtaggagtaactctagagaaaattgtggctcctaaaggaggcagatctttccaaggtggaaaggtaatgaattaaatatatgacatgtaatactgaaaaaatagaaaaatgactaagatacagtctctgtcctctagaactagggcagcctggaaacatatggactataattattttagctatttaaaagaaatgaatgaagaggatcttgagacaggaccagagcattggaatggttgtagggactgaaagctgagttggaaggatcagatcaaagagaaagctgggttggacttacacaagaataccctgatctgatcgcagctgtgactccaaggttttcctttcccatagttgctgtgaccccattggtcaccagagcaactgcatgtcttcaggctgggtattagggctggctgggtctgatgattctacccattttgtgccatctgaggagcatgcgagggttctttctccaaggcactttcggccttccttcttctccccttccgccatctccactggacataagccaatgcctgctctcttctcaccacattcacctggacaaatctgaactaattccttgagacttcaaattagcccttctgagcaagtgggcaggttctgaaacctgtgtgttttgtagcctaatgaattgatggaat

SEQ ID NO: 13463 - DNA, 1665 bp, Homo sapiens
tggagcccagaagtctgatgtgcctacttgcatcctcacatccttggtgaattaggtccaggagctctgacacattcattccctaagatgtagatagcgccattctctcctcctcatctccaaagaatgtgaaggatagagaggaagggttatatgccattaacatcgcatttatttaaaaaatgctagttttaaagtcttgtaatagaaacgaagacattatgagaagagacagctgtctaacgaagtagcttaagtgaaatgcccaggcctgattgttgagtctcataccttgttataggtcatccatctcgtgcccctgtctgtcctccctcctttcagatgccttgttttcctgtgtgtcccacatgtggccccctctttcctagaaccaggagtcaagctaaactgatttagaggaagtgttccctacccagatgctcatttagtccacacacagatggccggtatttttatgcatttttaatttaccaataaccttttaggaatgaaacagaactaacatttattgaatttattgagcacttactatatggaaagtcctcctctgctgatagcttcctgtatatcaactcagttaaaccttttcatgaagaaaatgaagcttagagagaccaagttacttgccaaggttacagaataaggggtaaaactcaagatggtaggatggaaacatgcaacccttgtccaccagttcttacttggggattgcagcaaaaagggtttgctttagaaaaacttccccgacagttgtaagtactgttagtggagctcactaaatagttaaatagacataagcaattactggcatactgtgcaggcatgagttcagttttagccagaagtccctcctcacaaagggacttggtatattgccaaggatagctagggcatcatctccactatttgctgtgattatttgtcggcctttttcttactcttgacgctatgtgtgtgtgtgtgtgtgtgtgtgtgtgtgtgtgtgtgtgcgcacgtacactgaatgaacttaaacaacttgatggatctcaacatttagacaccttaaatagataccataggtaaaagctcgttatcaactgtaagacctattccaaagtgaaatgtttgtgctgttgtgattttgttgctctctatgagaattcttagagatcccttttttctttgacttcccttcctgtgcagtgccgttttctttgatgctctcgcttcaggctctttttcatatatatatatatatatatatatatatatatatatatatatatatatatctttttattatactttaagttctagggtacatgtgcacaacatgcaggtttgttacatatgtatacatgcgccatgttggtgtgctgcacctattaactcgtcatttacattaggtatatctcctaatgctatccctcccccctccccccaccccacaacaggccccgctgtgtgatgttccccttcctgtgtccaagtgttgagcaggctctctttttctagtgctctgcctgctcctgcgctagcccatggtctcttttctaatgtcctgttctctcttcgaagtctgtacctggcacccctactaaatggcacacacagacacctcatatttctggggttctagtcacacctgagtcttagctggtg

SEQ ID NO: 13464 - DNA, 1032 bp, Homo sapiens
aatgtcagcttgtgaatgaaccctttctgccaacttatttcaaatagtaatgctgccattgctgggatcccatttccttctcacctggctttactgctccccctaacacgagcatttgatatgagagatgcttacttgtttattggttgattatctgtctccctcctccactctgctagaacataagctctatgtggatagggactatgtctgttgtgatcactcttgtattcctagaacctagaacagtgtctcatacataacagatgctcaataaatatttgttgaattgcatgttctccatgttcatcaggaaagttttcaagcctctcagatagggctgctggatttgattgtacaggggtgcactgcactctaggggtgcctttctcatcacagtccatgtgattgacaccccctggagttgtgcagtggacaacctgtacagacatgtgctattgccctggtgtcagtatctcagtagatttcaaaatcagggagttctgtgtaggaatttcaagactctggaagtataatacaacattgacaaattttcaagtaaataatttgatttcctcttcagggtaattcaagcagcatatgatgcagaaactactttttttctaccctccttgtctgtctaaatttcaaagatgtcaagtgtaagttgctcatttacctatgggatgctgtctgtaatgtagctgatggcagtatgtaatttgccaagaccttaagttcatgttcttaaattgctgctgggctccttaatagcagtgaattctttgcagaaattgtttgagtattttctaagttattaattttggcctgatttgcaaatataatctcagacaaattgtttattatcaatagtaatcattgtagtaacatagagcctactatatgccaggtacttttcgtgcattatctattccaataactctgtcaggtaaacatgattaagtcacccttatagatgtggatacaggttcaaaaatttaagtaactcacttgtgactaccaaactcatga

SEQ ID NO: 13465 - DNA, 1013 bp, Homo sapiens
acctcttacattatattgcaatgatttgtagacatgatggagaggctgggactggaccaccagtgtgactgcctgggacataaatgggaaacttaccccttggtggtcctcatttcactttctccatctaagcaaggaacaaagaagcaaatacttccagaaaaacttgaagggcttcccagcaccagaaagagatgaggagaataggtgtcctacttatgagctcatttttcatgtggaggaaacctgcatgggaagtagacagcctttggacattggtctcctggggctcagtagagtctggtgttgttgccaggcaacaagaacaaggctcaaggactataagttcttgtctagttgggaagaaaatttggatggattctcaaaaggatttcaggaatgtgtggaggctctgccttggttggatcactcagtgttcatgaagtctcctgcatgcccagccctgtagacttttgatttttatcaatatagcatcttattccttattgttcaaggcatgttcctgttatctccctggttaaattgaaaacttttctgaaggagagaaagaaagtctaaatctcgtgggttccatctcccagcatccaacataaataaaaacgtcttcaataaaaccatgttgattgattggttgatgattgattatttgacctgccatcctagttggttgtcagaaatcctctccttatttttcttggtggacacaagtttagtgatacttgtagaggccaactttgcctttcaactttgaacttccattgatttttccactgtgtgtgccaaagccttaaattggttccagttgcttaaaagagatgtatatttttcttctacacattttatggaaaaaaaaaaacctggagcgtattttccctagactccaccaaaaccagatagtttttccagaaatgtatgaatgaacaacaaagtggttactttggaagccgacataccgttatattggatttcagaaaagtcaagtaatcccatat

SEQ ID NO: 13466 - DNA, 1031 bp, Homo sapiens
tggaggtacttcaattctacttgtgttttgacatgcatttgtggtagaaatatacttctgtgtaagtgattgcttgtaagatattaattcagtcttgcaaaacagccatgtaaacacacacacacaaactcacctaaaacccatgtattcataactctgtggtttgaagttaaggccaagtataaaggaaattagtctatggaaaagactagttttaacacaaaaatcagctgcatggaatatgcgtttaagggaaaaatattaaacaatcaatggaacagtgactcaatcatgatgcagcccatagagatggctccaggtcctgaaggcctcctcatgtcaaggtgtaatccttgcaagaccctggaaagttctggaaactggtggatcaggagcccagcaaccagggcagccgaggacactcagggacactggtgggagtaagtgggactacaactatttaccaattggtatgatcatatttcaatgtctcaagaacaagcatggctgctctagtgtgttctggcatattagttctgattgtgttgttgctaaacaggggaaattggaggatgagtaaatttagttttttgttttgtttggtttggttttgagacgtagtttcgctcttgttgcccaggctggagtgcaatggtgcaatcttggctcaccacaacctcctctgcccgggttcaagtgattctcctgcctcagcctcccaagtagctgggattataggcatgcgccaccacgcctggccaattttgtatttttagtagagacagggtttctccatgttggtcaggctggtctcgaactcccaacctcaggtgatccgccagcctcggcctcccaaagtgctgggattacaggcgtgagccaccgcgcccagcccgtaaatttagttattaattgagatattttctttaacttcaattgttctataacattcaagaaaacaagttcctatatataaaaaacatcgttcttaagttatgaatcaaaccaaacctcctgtactttgttgggta

SEQ ID NO: 13467 - DNA, 1054 bp, Homo sapiens
ccaaaaactgagcatctgtatatgaaaatgctacattataacatgattattcatccacatggatttttaaaatacattctacacatacctgcttcacaatgcgagatgaacaacatgttaatatgcacaccccgccctccaagacctcagtgtttactttaaaaggagagatctgcctctaataaagaaaactcccaccacagagtggtagaaagagatacacgtcactgtcctgctcactctagagatctcagtttttttacattcctagattattctaaattctatggaaattaagtttcatcacactaagacaggaagaagaagaatattaaccttccaggtgacaatcctaaagggaaatatttattatttttcattgtacttggagatttcattaaatgattctttgttaagtcaaaattttgttcatgaatatcagcctttagagacataatcgctcatctagttaacatgtcagaaaagatcaacccattagtggattcattctgtaaatacttaggactgcaaatgggaaggggaaaaattgagtccagaaagttaaggccaaaatgattttgagtttaacgatccagttcatgttctcaatgtgctctatgagaataggctttgtaaccttctttagctgatgcagattaattgaagctcaaaaaacaaaacaaaagaaaaccctgcactacttaacaatgcaaagctgtgcaaggatggaagattcgaaacaaaaatggcattatggaagttacatgatgtcaaagttacatgcaaggaaagaatatccagtacacagatgttttgtcagctcattgtttttaacgttcacaattgtactttcacaacattgatttcatgttattcgatgactccgatcaaaactaccttcccaaacattttcttctccattggccgttctaaatctcttctctgcctgtagtcctttctacttgatttctagtctcttcccctccatagctctccccttatcccctattatctccatactttttatcctgaattataaaacaataataaacat

SEQ ID NO: 13468 - DNA, 1049 bp, Homo sapiens
tagacatatcttatcgaattcttcatttctaggcctttccccctggtgctcttcatcctttaccaaagagacaagcacttgaaaaaagcaatggtaccagcgcggtctttaaccccagcgtcttgcactaccagcaggctctcaccagcgcacagttgcagcaacacgccgcgttcattccaacaggtatgtgcccttactgccctacgtcctgtgcccttctggtcatgtgctttcttctcatttctctaagctgtttggtggcatctagtttgcttttgaaggtataatacagtttgaaattcatcgttgtcctagctatctaaatgtatttaccttactttgaatgatagctaaagactgttaggattctaaagccaaatatttgatagattgaagagacagatttaacccatgagaaacagcagttagggcttttggtttcttgtatttgcacaagccctgtaaaattgtttatgtaaataagaccttttatgtgtgacaattgaaatttgtccttaactctgaatgacctaaaaatagcaattccagtaaatactaaccatttttttctatttctattcagagcactaaaacaatgaggctattcaaattaaagcaattctctactcatatttttatattcattctatctctttctccatccttctcaactttcaccaagttcacaagtatatagagctcttatcctcagtgtctaagccaatgcctgatactattacgtacgatgtgcattaactatgattccactaaaagatccattgtaatagtcatagaatcttagagtttaaaggactcttagtgatctcctcatccagctgattgttttacagatgagaaaactgaggccccctaaatgagaagtgactttccaaggtgccacaactaatgagaaaaagaactgagtttccctgtgaccaaacccatttacatcacattctaccacctgggcccgcctatatatacacattccacagagttctcctgaaaaaagaaaaaagcagataaaagtgaatttttaaataact

SEQ ID NO: 13469 - DNA, 1056 bp, Homo sapiens
ttaaatgaacagattttgatttttctataaatgttttacgtaaacataaatatgaaacaaaaatagcatttttgttttaaccattcatagttaaagcttttgatatgatactaaaattctcccattgacacaatgtgaatttggattttaggaattctgcctccaggttgcaaagatattaatataaaattttatgcaaaatatgagagtcttctcccaaactatgctaagataattattgccctgcttgatggcctagcacatttgccatgggtgggagttttctttttttttcttttttcattgggattattttaaccaagtagttagactttttcttttctatgttaggaaagtggcaaaaccacacacacttacaaaaatagcagcataataattcttggcatttctctgacaggtttattctaagttactgtaagtgttcttatagacattatctcattattcttcaagatgttgcagttctgttagtggcaggcacggttatttgcattttgcagatggaaaaactgaggctgtgtctacaccgcaaagtggaactacccagataattctggctcacagatacgacagctgaaatatttgtgcaactgaagcagaaaacatttgagaagtctttgttcatagaattggtgcctagtgaagtgcttcagctgatcagaacaaaggcaacccacagaagccttccttgatttatttcattatactggaagtacagaataagtagaacaggggacagtgcccagatacagcctaattatgagaaacgtgtaaatgttacatcagattatcacatgacttggtgaaagattgatcagtgtttagtggcatctgtatctgcataagcacaacaaaatttattccattcaattcattaaaacataccttgaacccgtggtatgttctgggttccagagccagtaatgagaatacaaaagagttcataaagaggtgaaaaccaaatattatacagaggatgaaggagtacctgagggtctgggcaaagctattcgagagtgaaggagaggagacaat

SEQ ID NO: 13470 - DNA, 1051 bp, Homo sapiens
gtgttgttgcatggaccagtagttaattctttttaatggaggtgcaggatgccccttgcatgaatataccaggatttcattaattgttctgtcgatggggcatctggatagtttctaggtaggggttatgaatgatgctactaagaacattctagtacatatcttttggtgaatgaatatgtgtatactttcttttggtgtagcattattggatcataagtacatgtgttcagtactaatgtatactgccaagtgatttttcaaagtagttgtaaacagcaagagtaacaattattccacatcctaaccaacatttgatcaagtcagtctttttaattttaatcaatccgataggattctaggaacctcagtgtgatttttatctttgttttcttggtgtataatgatgtggagtaccttttcatatgctttatgaccatttgggtattttctttggagaaatacccattcaggtcttttgtccattttaaaaattggattatctttttttataatttgtagaaattctttatacattctggacacaagttctttattagatgtatgtattgcacatacctttccccaatctttggcttaccttttcactcacttaatagtttccttgagtgagcataaattcttaattttattgaagtcaaattttaaattctttttatggttagttcctttttgtgtcctgtttaatatatctttttctacctcaaggttctgaggatccattctgcatatttacttctagaagtattataacctaactttagtttctatgatccatctctaatttgtacgggtggtgtgagatagggggtcaggggatttgtttgttttgttttgcatatggctattcagttgacccaacatcatttatataaaggaccatctccccagtaaattgtagccgtacctttgtcataaatcaggcaaatctatctgtgtgagtctgtttctaggctattttctcttttgcatttctcccttcttatgcctaaaccacaatcttaatttttgtaactttatagtaagtatt

SEQ ID NO: 13471 - DNA, 1028 bp, Homo sapiens
gttgatgtctgcgccctctgctaattacagagctttatttgctttgtccattgatgtaagtgtctagaatagtggctagcacttagtatataaatatgtgttgagtggatggataagtacatgatgtattgattgttcgattgttcattactagctatttatgccacatcaggcagttttcagtatagccttcagtattcacgtagttaaaaccatcccaaatatttgtgtttgaacaacgttgtctgtgaaatggaactgcctaggtcatgagtgcattttggagttctgctgttgagtcagagcatgctggcagtagtggctccgcttgtagaagtgaaacctcctgcttatgttttggccccatgagatctcataagatttcccccaacatttttggctttactcctgatgcacactttcatatctcttaaagatcagcctgttggacgttattcttagaacagtgctaagcactcagcaattaacctagtcaatgatatgtgttgactgtgggtgtgacccaccatgtctgttgtgatttttaacttcagagtatcttaggaattatccagtccagctcattttatacttcaagaaactcaggaaaccaagattaggttaatcttctaaattcacagtactagctagaggcagccccttctgggacaggagtcctagtctgtttggtttcttttttttttaaacccaccatattgctaaaacagatagcaacaccagcttcctcatgcagtgcagtcatctactgtcaacacaggtcttggcttctttcccttcagcgtctcacccatctttcttaaggaggatccagatttctccaaatgttaccttcatatgggaccctattctgtcaccccaatccagagccttcttagaatgcctttcccacaggggccagtatattctctcgagtgcccgctgtttgggaatgcttgcttttctgctttcctaggcccccatcaccatggatgttcagcacagggactctggagaagcacctggttagt

SEQ ID NO: 13472 - DNA, 1057 bp, Homo sapiens
taatttgggcttaaaagtgaacataaattatagagtggaaggtaagggacaaaagccttttacctttaattttcctggagaattatataaaggttttcttagaacaattttgccctgattactgaagcgtcaaataaagctggagtgaaaattttgttttgaaaaggtgctcaagctctgacatttttggttttcatagtcgtgaagtatttatcatttgcatgactaatggcacaggaaaaacctattcataagttttacaatcaagtatagaggggtcttcagctaacttagttatacataaatgctgaaaagattatcttgagctgggccttgggagaagaatttggccttcagaactgcaatatcactgagcctgcgatctatacaccaccccacattttgttggtttcacagtcttgtgcaagtaacctctggtcttacgtgtgtaactgagagaagagtgtgtgtttgtgtgtgcatgtgtgtttattgttcctaagaatttggcacaagtcagagataattgcctatactaagaatctatactgcagaatatagtgtatcaaaaacttttttcttttaaattattaaagtgtcttttatacttttatgaaatcattggtagccccccaagtgtttaataactggcattaagcttagagggtgaaaaaaaaaaaaaagattgatagtatttttcataatgaaaaaactgaagagatacgtgaatgaaaccaggccatagctgtcataaatctttgacttttgaatatttacattcttcagtataattttttataatcctcaattatgaaccaccttgtttataggacaaaaaaatttaaccaattttattgaaacgaatttcactgtgtaaaagttggtttgattcaaacatgtagagaagttgtagattcaagatatatgatttctctatggaaataaaaatatttgttagtgaattggttgagttttgattcctctaacttctcagaatgattctttagaattctataattcatagcaatttttgacaagtaagattgcaaaatagaaa

SEQ ID NO: 13473 - DNA, 1093 bp, Homo sapiens
tgaaggttgccgccaggctgtagggcctgcttgttctatatggggccctatgaaagttgacagatgctgttaattgtatacagccttcagctgctctgataaggagcccattcatttcctaagccaatttaaactatgccttttggttatgttgccttcaaactctgttgaaatcctctggcagcattccaccagttgagaagcttcattgttttagattataagaataatttgaatgaatataacagaggcactgtagatagaatcccagatatttaaaggaaaacatgcctatattttaggaatatcttctgaagaacttcataattttatttgaagtgtttgtaaattttttaataaattatttaaatgtatcaatagtggatagttggaagaacgtctttgaggctaaaaagtagtactctgaaattctctcaagttatattatttgtctgttagaggtccacgaatgaaaatatatgtagctaaaggagtaaggtgctgcccaatttggaacccaactgacctctaggatctatgaagcagagaatattaccacaaacttctgaaagaagctgttgacctcgtttcttaatttaaaatatgttgccacataaatactaataaaacatagttgctcttcatctcttaaatggatcattccaactggttttacatcgttgaatattatctagtatttttaataaatattttcataaatagtttttgtggtttttttgtttgtttttgagacagtctcgctctgtcacccaggctggagtgcagtggtgtgatctttgctcactgcaagctccctcccgggttcacaccactctcctgcctcagcctcccaagtagctgggaccacaggtgcccatcaccatgcctggctaattttttgtattttttagtagagacggggtttcaccatgttagccaggatggtctcgatctcctgaccttgtgatcctcccaccttggcctcccaaagtgctgggatcacaggcgtgagccaccatgcctggcctataaatagtttttagataatattcaacatccccaacatcgaggtattgagttttaaaagatttgc

SEQ ID NO: 13474 - DNA, 1028 bp, Homo sapiens
caatcatttatgcaataaattcatattgcctattatgttctggcgctaggcatacagcagtgaacaaaacatgcaaatctcagtctccattaagcttatgtttactgcctttgaaagacatttttagtctcttacaatatttatagttataaaatttttctgtaatgtaaatgttgtaagcaattatatgcttattgttgaatttatggtcatgtagattatttccattaaatcaaccaaataacctgtgagatttaatgcccattttacataaggagaaactactcttaattacagggtgtgtaatagtttgtattataatgtaagtttatggttaattcacattatcgttaaggatgttaatttttaagaatactttctgctttaatcagaaagcaaaataagatgagacaagatagagcatatattcagggcaacttgaatctatgctcctggggaaaaaaattttatattaattaaaatttaaaagattggacaagttagtggttcccaaccttgtcagactccaaactccttttttatggcaatcttttagtaatttttcatgtactcttctaaaaatgaaatgcataagtaatgtaatatatatgcataattttttagaatattaatatatggccttaatacaaaaaagaaatgcaaagaaacgtataataaaatggcttgcttctccttatgtaaatggtcagacaagactacactggaagacataatagactaggtggcttccaagtgatctgtacaaatgcaatagctaaaactggactaatagcaaagatattggcaagtcaaacaccacagttcccattagaattggtgataagatttcctaaaatagtaaggttctgaacaaagcaaagtagaggttgagtgtctcttattcagaatgcttgggagtagaagtgtttcggatctcaaaatcttttcaaattttgaaacactgtatttgtgttatacttaccagttgagcatctcaagtcagaaatccgaaatactcaaatgcgcat

SEQ ID NO: 13475 - DNA, 1050 bp, Homo sapiens
agacagtgggtagtatgtttatataatggaatgctattaaataaactgaaatccttatgtgttgagaaaaaagcaaattgccgaggtacatatattatgaaaccatttattatataaaaaatcaaatcttgaaatagtactataattttgtatagagatatggaaatctgtagttcaagtgtgaaaaaacaattgcggaatgagaaacatttgtgatgttgcttcttacctctggtgatggggagaatgtaatcggatttgggaatttcataggagggtttgacttaatgaatgttgctttttaaagaaacgataaaagcaaatataacaaggttaaaatttaacaaaccaggttttgggggcacagacaaataattgttttgtcttgttctcttacaggcaaagtaaaatcttaaaattcttgtttataaatagtgatatggataagataaagtcacagtcttcgggtatgaaataattgtttactttagttcctcagatgttagcaatgatggttgatttggaagaagatgaggactgggcaaatgcagatgaactagaagatgatgattttgacaggtaatcaaacattgtgtccagggtggcagtgaaagccctagggctccacggtccatctcttcactattgcaccctgtaacctgaaggtaaacttttaagcctggaatatggggcactttgccttgctgttgtatttattgctgtgtcacatgttataagtagtattttctttagttttcatgtataatttatattaataaaatttatgtttcttggaagttcataaaaatattttaatagttaatacataaagttgtattttataatcaggaactgaaagatacctacaacaacaaacaaggaagtttttcttttttaaaaaaaagtatgacatgaaaacagcaaataaagtagctatgttttttgtttggttttgagacggagtctcgctgtgtcgcccaggctggagtgcagtggcgcgatctcggctcaccgcaagctccgcctccggggttcacgccattctcctgc

SEQ ID NO: 13476 - DNA, 1260 bp, Homo sapiens
agaagtacctttatactgtagttccctgcccttcagtggaaaatatatttttctagaaagtgaactaaatctgtcacaatatagatgagaatttttcaatatgatagtttatctatgaaagttatgacctatgtgggcaatgtagtcgattttttggcaaagctttgctaattacacaagaaacaaaattcggtatcaacaagtgtgtctctacatattttcctctagttcatgcaggatgcatcagatgtgatgcagcttttgttaaagacccagacagacttcaatgatatggaagatgatgatcctcaggtaagtggtcttaatgcatttgctttgatccgctaatgagttgtggacagcacatggttcaatatatttaaaacaaaaggagtgataggtttcttgacatactatcaacccctgctagcagagacattcttcactgattttccttctgtttctcaagctactttttctcagtctgttgtaggttgctcttgctttctgtgactctcactcaagttttggtgtttgtgggttctatccaaggctctcttctcactcctgtggagcagtgtcactcacagacatggcttccggtttcctctgtgtgcttgcaactttcagatcttcagaattgaagattcatttatccaacatgtaatagacatctccatttgggtgtctcctagccctttgaaggctgcatgatctccctcccctggcagaaaatacagaacccaagaatctcaggacacactgcttgcctctccgccaacgaacagacaaaggcatttcattaggaggaacccctgcctctcgacacacacgcacatacacacataggtatacatacccagctaacgcttgctcacagttctcatcctttacaagattttcctgatctgctcagtctcaatggtgggcagttccaacactgttatagtaacatcataaatgtttgtcatatcttgatggtattcccaatgcctaacatataacaaggcactcaataaataattgttgaattaaattttgactttacattgccacactgtaatagtttaaataggaaaacataccattttgcaaagaaagcatgttttgttgttgtttgctttctttgcaaaatgatatgcaaatatacatgtatgttttgtatgtacagagataacaggcaggagggatacttagcagactgctgacagtagggagactgaggggactgtaagctgtagggaggggtggtaaggacga

SEQ ID NO: 13477 - DNA, 2081 bp, Homo sapiens
agtttctcagcatctttatatgtccttatttacactcctgtaattcagaattgcttctgattttccaaagacagcatgcttccatacctttgcctatattttatttcttctacctctaatgcccttccttcagtgttcttgtatgttgtgtgtacggagtatggatatagcaattgtgttccttaggagctggttgtgtgtgtgtgtgtgtgtgtgtgtgtgttttccatctttgaatcctcagtaccaagcatgatgcctggcacctaggtatgctcagtagtgttcaaaagaaaatatttttttctaactccaatctctaaaatgctgtcattctaacaaatacaagctaagcatatgtaaataatcttccaggatactgaactgtgttcatttttccatatgattcttagtggagtttaactttggactccaaacaccccaaatcttatggattgctttctttcctcaacctcattagtgcattgaagtaatgggagatggatgccttaataatgaacactttgaagaactgggaggtatattgaaagcaaagcttgaagaacattttaaaaatcaagaattacgacaaggtaagttttccatgcttttatttctgaatataatccttgaccatcttggcaatcatttaaaacatttatttgggtgtgttttagttaaaagacaagatgaagactatgatgaacaggtcgaagagtcactacaagatgaggtaagttattccctttggaacttacttacgtgaccacttgcatctgaaagacttgtaaatgcctcaatttctgatttatgtgacttgtcattctgatgtaattatcagtctttagcagaggagtcagatatatttcctctcttaatttatgaataagtaatttgaaattaaactgatatgtctttcggtgctatgtgcattttgttgtaatacctcactcaacaaaacaccttgaggtttacctagttcatttacatactgctcacaacaaccatttgtattttgtggtgctttcactatattaaagatgagtaacctaaaattccagtgttaaatgattgcctagagtcacactgttgacggtctggggcctttttcaccatgttacttagttctctcatcaaaccacctaggactgtcaagcatacttcattgtgtgtttagagtccagcatctcatatgtggccacttggtgggccagtgctaccgtgtaggtagtaccagcttcctgaaggtgcccacatgcttgtaggcccaaattgccactaacagcgagaccccattctccccaccatccaccccgaaatgaggattattctgctgaaaacaaagtaaaaatagtgaaaacacctttgtttcagaatgtagaaattagagataatttttcaacccatctattttaagtatgttccaaggaaaatctttgcaataaatacagttcttgccacacacctttgtctttcgaggtaagactggcctttgattagtaagagacatgataacccacacttgagggttactccggtctctagactcttgatttacccttaaaacaggaatgagaaattgattttctgcattttttaaggtttttataaatgttactattgataatagaaaatatactttttaatccatatgagtgtttatgtgtatgttttttttaggatgataatgatgtttatattctgaccaaagtgtcagatattttacactcaatattcagtagctacaaagaaaaggtgttaccatggtttgaacagctgcttccattaattgtcaacctcattgtaagtgttacctctcttaatagttgttttgcgtagtttacctggaattcttttcactgcaacgtaaaatctaatgcttgaagttaaaatgggtctcagaaatgattgtttccattgtacatctttgattttatcaagttgactgcattaccctggatattttctcattcattatatgcttgaagattcctaacttggttttccataggccaattcagttctaacacatctgaaagatatataagtgattttttttattatttcagattatctgtgcc

SEQ ID NO: 13478 - DNA, 1036 bp, Homo sapiens
agacccaaaagttgaaaaaaactgatgacagacaacaagcatgaagatggcatatttgatgtcactttggttctttttcccagaaggcttatacagtgactcagtcgggaagctttccagcttccagcccttgaatgtgaagtgtcattggcatgtctggcagtagtctctcattcactcctcaataaacaacattgaatacaaaagaggcttgtgtaaaaactcagtactgtctggcttggattcatttcatgtttttaatataagaatgatctaatatttttttaaagtaatagctatcagtaatagctgagtgttttttcccctaatattttccttgtgcaattcagacttaagcatcgagtttttaccatcttccactttaagctaagttatgatacctattccattcacaattggtgttctttttaaggtttgcaaatttcagccaattttgtagctaagattgttctgatcagctcaaaaagatttggcttagtgttttcattgcaaattataattgctgtagagccacacacaacttttgaacttttaattataagtgttatggctaaagttatttactgaaaatttcagtaaaatgtgtgaatgtttctttatgtattaacctcatagcagtaaatgacttgctgttgtttaatttttctaaggcatcttaatagacttctgttgaaaacttcagtgttaacatttttatagtttgtactaaatttaaccgtgatataaaaatgaattttatgcatagatcagaattttaaattaaaggttttttctttaaatgatttgtattactttattaaaactaaatctgaaatggaatagaaaatagaatggattacatacagatggtttccttgttagcagatgcccttcaaatatattttacgtttgcagcacaacaccattgcccggaggcttccgaatctagcaaagcagcatattaaatgactccacctgcgcagtccttgtgttcagtggatgaatacctgtgggctcttgtaatgtgtggtaatat

SEQ ID NO: 13479 - DNA, 1022 bp, Homo sapiens
ttcatactctcacacatttgttgttactaggtccctagcagcacaggcttctcatttagcaaaaattttcccagaaggctccagcatctgggaggtctttgaagaggattctggggaatgtttgtgtgcacttaaaaggagacccaaagactagatgtgatgcctggaatcacagcagccatgtttttactagacctgaagcaggcaagagggtgacagagctgaaagtggaaccagagtccataaatgcatcattgagtcatttagatcttgcgcacctggagcttagcatgccaaatactaatctgttctaggataccagataatatgtgaattcactttctcgtcgtacttgagttggggttttcggttattgccatctaaagcatcatgactgatatattaattgggagattttatctttcatctgctatttaatattatctatgagaaaactgatttctacctgttaattatgtggaaagtgacttaaagtcatatcaaatcactgttagagatgatctctttataaggactttagatgtttgataatgtgtgcaagtcgtgcaactgagtctacatgaatttcgcgtccttttaagctggccttgcagggcatctgcttggaatctaccatctggcagtttgggttacagaacatacttgagagtattgcttcatttcttcaagaaaaaaatgatggaaatgccagccatttctgtcaacctagaatatcatctatctgcacatttaatattgttaggaactttgtgaggaacttattaatcaggggtttgtgatcttcctttgtaatcttaactggagtgtttggttctctaacatcaggtgctagcaggggccaagatggatccaagtggagtgagctgtttggaaatatcaggatatggggaaaccagcgattttctaaatgagacaaacatgttagtgaatctgtgaagaaaagttaagtgatgtaataataacctttatatatatataaaatatatataaatatatttata

SEQ ID NO: 13480 - DNA, 1054 bp, Homo sapiens
tactgtaatcccggtactttgggaggctgaggtgggaggatcccttgagcccaggagttcgagatgagcctaggctgtatagcaagacccctccctctctagaaataatttaaaaacttagccatggctgggcactgtgggccatgcctgtaatcccagcattttggaaggctgaggagggcggatcacttaaggccaggagttagaaaccagcctggccaacacagtgaaaccctgtctctactaaaaatagaaaagattagctgggcacggtggcacatgcctgtaatcccaggtactaaggaggccaaggcatgagaattgcttgaacccaggaggccaagattgcagtgagctgagattgcaccactgcactccagcctaggtgacagagccagactccatctcaatctcaaccctccctgctccgctccccctccccctttccccctccccccacaaacttaggtatggtggtgtgcacctatagtcccagctactcgggagtctgaggctggaggattactgagcccaagaatttgaggcagctgtgcactatttcaggcagaccaaaagctgcctctcacctgcgtatttaattttcttttctctattttcgcacttctattagtcggatccgctattggcacacctttcagtacatggtggatgcttagtaaataccactggatgcacaaacgtgagtcctacccacaccatgccatctgccatcactgctatttaagaaccttttttcagggactagttgatgtctcagttcctcagtgaggtggcatccttatttctgaggcttttaaaattcgtttaatacctattgtcagaagtaaacatgttgccttgaacagtcatctctgagttacctgttctcttgcctgatagattatgcatctcataaagacaaaacgatattgtgccacattattactttgtgtcctatagggtgtgaaatgtagttgctgaaacataataggccctcataaatgtttgttaatggtgatgatctcgattatggtgacacttgaatgatagtata

SEQ ID NO: 13481 - DNA, 1058 bp, Homo sapiens
taatatgtgtatctacattatctgtgtctttcactaataagacaaggttcaacatctgtcttcagattgcattttctgtgggaagaacttaggttgtaggcatttagctcagagaaaggggaaaaggtactttcactgctcactttttgctatttctgccccaagacctactgttcattctccagacttgctgtattttatgtcgaaaggttttactgtttccatgaggaactgtggttcattttccccaggcttataatcagtaagtagtgattttcttttcagtgttacttactgtgatactgtaaaatcaaactaacaataaggtgccacaacgccataaaaaattaataatattgggaagatgttgattcccaaactaagatttgggctttggttttgaactgttaatttgttcattcattttaatatttcctttgactgtctcagatataccaaagcgtggtgcattgtggaatgtgtgccagtctcaatgcatgtagctctgtaggatggaaagtcagttatgaagagagacttctttttcttctgtgtcctgttgattaagaagaatctgtatggccgggcacggtggctcacgcctgtaatcccagcactttggaaggctgaggggggtggatcacgaggtcaggagttcaagatgaacttggccaagatagtgaaaccctgtctctactaaaaataaaaaaaaaaattagccgggcgtggtggtgggcgcctgtaatctcagctacttgggaggctgagacagagaattgcttgaacccaggaggcggaggttgcagtgagcctagatcgtgccactgcgctccagcctgggcgacagagagagactccatctcaaaaaaaaaaaaaaaaaaaaaatctgtataacttgcattgccctttcaggtaattaatcaccctttttttccagcagggttaaagattgtagtattgactatcagttattttgtaacaaaaactggacctaaagttcaattcactgttgactttttcaagaggagtattaaatttttactccctgctgtacatgt

SEQ ID NO: 13482 - DNA, 1028 bp, Homo sapiens
cctaatgaaatctagagtttggaagagagaacacatctacaaaccagcacacggtgacgacttttttccaaggacccacttggcgtcatttgctaaatgctcctcttaacggtggtgagtcttatctcctcttacattgacagtactgacaagtatacatatatatatttttaaattttactttaagttctgggatacatgtgtagaacgtgcaggtttgttacataggtatacatgtgccatggtggtttgctgcacccatcaacccgtcatctaggttttaagccccacatgcattaggtatttgtcctaatgctgtccctgccctttctccccacccctcgacaggccccagtatgtgatattcccctccctgggtccatgtgttctcattgttcagctcccacttatgagtgagaacgtgtggtgtttggttttctgttcctgtgttagtttgctgagaatgatggtttccagcttcatccatgtccctgcaaagggcatgaactcattctcttttaaggctgcatagtatttatggtgtatatgtgccacattttctttatctaatctatcactgatttgatagactgtatatcagtatatcactgatttgggttgcttccaaatctttgctattgtaaatagtgctgcaataaatgtacgtgtgcatgcttccttatcatagaatgatttataatcctttgggtttatacccagtaatggaattgctgggtcaaatggtatttctagttctagatccttgaggaatcgccatactgtctcaaaatacatttttttttctttttctttttgaggtgtagtctcgctctgtctcccaggctagagtgcagtggtgcgatcttggctcactgcaacctgtacctcctgggttcaagtgattctcctgcctcagcctcccaagtacctgggattataggcgcctcccaccacgccagtctagtttttgtatttttagtagagatggagtttcaccatgttggccaggcttgccttgaactcctgag

SEQ ID NO: 13483 - DNA, 1055 bp, Homo sapiens
tgtggcccagggaaaccaaaagattgttggtcaacacttggataaccaatgccaccaccttccttctatgtataaatgtctttaaatgaccaagatgatacatatccataacttgcccttcctatgccctgccccatccctgccctcacctcacggtacctaggcaacaaacaaagctaaatccctgagaagtgttcccccaacccgagagctagacatttgatccccaagaactaagtggctaaactggcttcagcagacacatagatatttgggaaaaaaaatagcagtctcattacggaattagatgaatgaacccattgctctttttcttcttctgattacattaaggatatctagacttttccaaatgcccagtctcaagtatctgagttactgactccctttgtccctcaatgttttttcctgattatatttgcaagtgaagtttgtttctactctcagtgagttgagaaaattaatttctaatattcagaggatctcagtctgcctcagagtaatttgagtgaagtgttggattaaaaccaggctctggaatcgttcttcctgtgccagctgctagctattgactctccttgagctgaggcacacttcttgctagttctctgtgtacgcatttcctattagacagatgggaaaatgtcactcctgttaacagaggtgggcccccttggacctgaaagccacacagagtctgtctaatttatggtctggccctagatccgactttggaatgaaagattttgaaacctgcttccatgttgctacttttccaaaaggtgcgagtattattattcagtagctaaaaggtaatgctgcagtgctcatggaaatgcattccattcaatcaagcaggcagtctagattgtaacaatgtgcatgtccccttattggacttaacaaagcttttttattttgaagggaaaaaatgtaacatgtacacattaaaaaattttaaaatatggaatccctccccaccccccataacctggaggcattcttacttataagaagtttaaaaaattgaaataaaa

SEQ ID NO: 13484 - DNA, 1045 bp, Homo sapiens
cctttaaatagattctgaggcccttgggcccagaaatgcggttttctgtcattttatccttagtgtctgtcttaacatctgataggtgctggaggagtctcatggttagtggtgcctacagacggatcattgttttgatggcggtaacagcacctgggttccacaagtgtttgaacgaatacacacacccctgctggatatccagtgaatgagatttcagctttgggcgagatgctggcctatgtggtgtttaaatgttttgaaagttatcactgctttttttctattacataattatttatttttaccaagctctcaaatgtcttaattgtgccagtcatatgttatgaattctatttctgggtattgtaggaacagcagttcctatggcttttttttttttttttctgtgtatgagcaattcgactcagtgggatgatattttcttttataactcattaatgtttgcgataccgtgtactcaaatattcaatgtcagctgtcagctaccattgggatccatcccacagaccatcaaaatgtacttttgggctgaattagtcctatgccaagacttgtgggtggatccagcagcagttgggaaccacgtgccaggcctggtgtatgtgctcacggacacattaatccgatcatacctttcttcccttaaagaaacaattaatgttaatgttattgtactttggctaatgcagagtctcaaagttaaattaagcacaacataggaaattctaagtggttacccgtaaaatggaagaccgtttcattcccgctgagtgcaaatctggtgtctccgtatactcaacatgaatggccgtaatacttaatgctttaaaaaatgcatctatttccaatgatagatgaaaagcatttatttgagccatccgcatgcagtgaacaatctgtaaaatatttggttatcttcagctgggcagcattcttccagctcgtattgagcttgactacgtctagatctcatgcaaggcatccgggccagccatgaaggaggatgaggtccctgctctca

SEQ ID NO: 13485 - DNA, 1045 bp, Homo sapiens
tccacagccctttcagtgtatcttacatgctgtggataatttaaaaagtacccatttattttacaagttggagggagtgtaagacccactgaattcaatacatagcatccacatttttaaccagaaatctgaagtgttaatttgcttcccgtttgtccagtgaacttgactcttaacattttcttaaattaggggaatgggagctgtaagttacagtagatgccaagtacttggtaaaaatgaaatgttggtgggggaaagccatggggaaaatgtatttgtcaaaacactttaggctaaataacttaataataaatgtagtatctcatggccaggcagtgcaacattcaatacagtagtcacttgccacatgtggctatttaaatttaaattaaataaaattgaaaacacagttgcactagccatactcaagggctcattagccatctgtggccagtggctactgaattagcacagatatagaacattccctccctggtagaacattgtattgggcagtactgatggagaacatagtataggaaccatctatgataaattatcatacatgtcactcattgttgtccagcccaaagcctgagggtaggagatgctaagagacttgaagaaaatcttgttctacagtggcatgatcttggtggtgtaggatgggaagctcaagttttgtacccttcagttgaaacatttatcctgctggtaactctggtctaggacagtaacagtgtactgagctacacgatcctgtgtagataacgtgctttgttctaagacacttacatagaaaatataacctattttaataagaaaataatggagtcatttcaactcatggggtaaataaaatgtaggaaagaaagggggaagcagaggtggagtgaattttgaaagtcccccgtttgtgtcggtgggtatgtgatctgactttgaataaaagagaatcagatggacgaatcttttcttaactcaatggtggatgactgacattgccctattttccagttacatttaaatggaatcaattgtt

SEQ ID NO: 13486 - DNA, 1061 bp, Homo sapiens
acaggtgctcgctaagcgttgtgaacccagctcacctcagcgacaggagtgactttgtgtgaaggctgtggctttattcccaggtttggccaccttcatgcccagtgttttaacaaaggaacagagatggaagttcttaaaggaatgaagcacagaatattcagtggtcataaattagtggttatccagtgaatcggccagaatggaggttttgattcgagtagttccccatttaagagatttctcctggctttaacagtcaatgggtagcaaactgcagaaagcagtaatatacagatgggtgcttcttaccccgtctaaggaaagaaaggggaagcagtaaggcccgggcagccccgtgttcctgaaatgccaagaacctcgcaggaaagccctggctcctcccagtgcatttggctgcatgtgacttctggagaaaactgcagacactcgtcattgatctttccacccgtaagtgcatcgtcttcttctttccagtggtttcagagcacagtgagcaaagaggacgccatgccggaagcactgaaaagtctcatattcccgaattttgaacctttgcacaaatttcatactaattttctcaaggaaattgagcaacgacttgccctgtggtgagtacatttctacttcccagctacgttcctccctccgtcttgcttgtgttatttttatgtcgtccctgggtaggcagcaggcaggaacaaagatgaaaggcaggaaactggcttacaacaagtcagccttcaaatgattttcagttaaatcctacatgcgttcagatctcatttgcagtttctttcctctggtttgcagttcttcaagatggatttttttccctctcttatgatgattatatgattatcacaaaataaagacagtcgttacttctggaggggcaatagggattataaagagtaggggcttaggaaggctttgaggggtgctggtaatattttactggtgcttgctttaagtcttttatgaagtacatacatgccttgtgcagttttctgtattctattccagtgtttaaaacatgc

SEQ ID NO: 13487 - DNA, 1046 bp, Homo sapiens
agtgggaagggtgtggttgaagatacagacaggaatgagtgataggactgagttgtgaggaggtgaggatccggggcccagggcaggtatgcttctcattgctgtaggagggaagaggaggggttactcttggtcacggagcggtggttgtcaaacgctgctcctgtcccagctgcaaaaaaatcaatcacggtgttttctgaatgtacaccttcctgggtctcctccccagagggtcagattcagaagagctagcatgagtgtcagaaacctgttattttttgttttaagaaatgtgtatttttaaagtctccacatccccccaccccaggacattttaatggacaaacagattgagatggaggcaggagggcagccacaggcagggcagagagaacggagtctggtgcgctgatgagagaagatagaagatagaaggattcttggatgtgagggcgatctggctgtgacatctgtcaccccattgatcgccagagttgattcggctgatctggctggctaggcgggtgtccccttcctccctcaccgttccatgtgcgtccctcccgaagctgcgtgctcggtcgaagaggacgaccatccccgatagaggaggaccggtctttggtcaagggtatacgagtagctgcgctcccctgctagaacctccaaacaagctctcaagatagaaggattctaaagatgtgtattctggtaggttgtgtcaataaagctgattggatctgcggcgagggaggagttgaagctgactctgctttactgcctgggcagctgggtggataggtaacgttcccagtcactagagagggaatgcagagaagcaggagctcatttcaggagaagatgagttcagctttggacctgtgcagtgttgaggggtttgcagagtccggtcagaggtactcgggacacttggggaaagaaatccagagctggactggattggacatgagtaggtgagagttaggttgtgggtgtgagtgaggactccagaggtggggggacagttggaagctgaggacaga

SEQ ID NO: 13488 - DNA, 1047 bp, Homo sapiens
caggcacgcaccaccatgcccagctaatttttgtatttttagtagagacagggtttcactatgttggccaggctggtcttgaactcctgacctcatgatctgctctcctcggtctcccaaagtgctgggattataggcatgagccactgcacccggcctcagatttggtttctaaagaccatttcccaacattccctaacagggatccttagagaaattctaggtcttgggcagggcgggtataggtgagcctaaagcaaggaagatgagtgggtaggtggagcagccagagcaggcgttgagggccctggttgaaaggccgcaggagctggtcagagggcttccacctggaccatctgaacgttggaaaaagaatgcaactgattgtgacacattgactaagtaaaaatccatgagtgtagagtgataccgagatacaaggagaatgaagacagaaggccagctaagaaatagaaaagtaatgacagaattatcaaaattatcattatgtaaaccctagtgtaagtcttaattgtaaactttttcacggtaaaaggatgggagaaaaaaaaaggcagtgtttttggttcccgatgaagcgtaagtatttcattatttgatggaaatctcagccatgtttttgtaaccaaatctgctggtaccacttgagttctcaagactagtcttttgatactatgaatattacagggttattattttattattattattattcttattttcagttgcaagatttaatagagtgaaaacagagctcccatacaaagggaggtacagggttattatataaagtaattatttccaaggaaagcatgttatttcagcggttttcctagattgagatgcactttatttttctgagtctccatcatgggccggacattgtgctagccgtttctttttttttttttttttttttttttttttgagatggagtctcactctgtcgcccaggctggagtgcagtggcacaatctcggctcactgcaaccaccaccttccaggttcaagcgattcaagtgattc

SEQ ID NO: 13489 - DNA, 1062 bp, Homo sapiens
aaaaacaatgtttaatctttttttaatgcccagtaggcatacttagctttgccaaaaccttgtctcaatttgaatatttgattagaggagctaggctctgtcagctgtatcagattatgaatttttgataacttttacagtggtggttaaacgaagtaagaaatttctcttgagtttctgctgtgggaaagagcagaagtgcttttcaaggtttctggactgatcttgttgaaaatgctagtactgggttcttgtctatgaattggagtgttcatgcaaattctggtatatgactgctaccctttctttgctaagcacttggttagcccattttaagcataataatccatttcttgaacactgacaccttttcttcatagtgatataattaataccattgctcagattggcttcaccaacttactgtgcaggtcttttagttatttatccgtattactgatttgtcagaagatagtgtagcttctgtattatttcagttgctataatgcagtccttctcaaccccggacacacattagaatcacctgaaaaaacttcaaagatctgtctccatatctatacttacgtgaaggtataatttatacctagatttatataaacacagtatctcgccccagaacaactgagtcacagagtctggtggtggcgcctgggcattgctgtacatttaaaaacaacccctaggggattctagtgtatggctggctttgaggaccactaatgtaagggcccccgggccttgggttgataccttcctaatttctggagttaatttggttcgtttggctaagcccactctgtgggcatctgtgctttaaaggtggtgacctgcttggatggaagaagaccactcttctgtccaggaatgggaatagccacatccagattaacacttaaaacacctaagaggctctcagtgtgtattcatgagagatatgggagttgcagttctgccttgggaaatctaaacacacgcatacacataagaacgtgatctgtaggtcacaggtgtacatgacatccttggggggtgatcaaggaa

SEQ ID NO: 13490 - DNA, 1048 bp, Homo sapiens
aacacttccatcaaacataaaacaaagccggtgtataggttataactttgtagacaacctgccgtggccaaccccactcagaatttgtatgctttcatattgcgttgatcttctttaaaaaaaacaaaaaccatgtattagtgtgtgaaataactagaatctaggagtagagttgacagaacgagactccatctcaaacaaacaaacaaaaaaacaggccgggcgcggtggctcatgccacctttgggaggccgaggtgggcggatcacgaggtcaggagttcaagaccagcctggtcaatatggtgaaaccccatctctactagaaatacaaaaattagttgggcgtggtggcacgtagtcccagctgctcaggaggctgaggcagaagaatcacttgaacccgggaggcagaggttgcagtgagcggagatcgctccactgcacttcagcctgggtgacagagtgagactccgcctcaaaaaacaaacaaaatacccccaaaaaaccatgtattagtgtgtgaaataattagaatctaggagcagagttgttagcacatgtaaatgacctccaagcatctgaatgaagtatctgagacactatttgggaaatgagatagtatgaaatatagataccagatatttaaaattctgtgtgtactatcttcagtctccttttaattttaaatatatgttttgagaactattaagctactgtatgtatcttgattcaaattcactttggatccctattttaaaattatagttagtgttctaatagctttcgtacctgcattgttaatgtttacagtgtagctgccttttgtgaattatagttggtgtgaatatccatgaatgttgacctttagctcttttaataatgtatgattctgaataatgtttgaatggaggcataaagttctgtgtcataattagcatgcagtttgaattccacaggtggtcattgtaattagactgagaagttaaagttgagtattctgttattggggaaaatagtgtagtcatcaggaatgattccacattgac

SEQ ID NO: 13491 - DNA, 1037 bp, Homo sapiens
acttagtcacaaattcttccccaaggccgatgtccagaatggtgtttcctaggttttcttctaggattcttatagtttgaagtcttacatttatatctttaatccatcttgaattaatttttgtatgtggtgcaaggtaggggtacagtttcattttctgcatatgactagccagctatcctagcaccatttattgaataaggaatcctttcaccactgtttagttttgtgaactttgttgaatatcagatggctgtagttatgaggctttatttctgggttctctattctgttccactggtctgtatgtctgtttttgtaccagtaccatgctgttttgcttactgtagccttataatctgaagtcaggtaatgtgatgcctctggctttgttttttccttttcttttttttcccttaggattgctttggctatttggggctctttttttggttctatatgaattttagaataattttttctaattctgtgaaaaatgacattgtggtttgctaggaatagccttaaatctgtagattgctttggtcagtatggccattttaatgatattgattgtttcagaccatgagaatggaatgctttttccatttgtttgtatcatctttgatttttttcttttttctttttttttgagacggagtctcactctgtcacccaggctggagtgaagtggtgtgatcttggctcactgcagcctccgcctcccaggttcaagcaattctcctgcctcagcctcccgagtagctgggattacaggcgcccaccaccatgcctggctactttcttttgtattttttagtagagacggggtttcactgcattagccaggatggtctcgatctcctgacctcgtgatcagcctgcctcggcctcccaaagtgctggctgggattataggcatgagccaccaagcctggccatctttgatttttttcagcagtgttttgtagttcttgtagagatcttttaccttcgtggttagatgtattcctaggtatctttttgtgtgtgttgtg

SEQ ID NO: 13492 - DNA, 1034 bp, Homo sapiens
ttgttgctattaattttgccttgtagtaagtaacagtaatgagttcaacataatttcttatataggaattctggaagtcagtgtttgggacataaagtattggatttataattccattcctagtgcaaattagacctaagggagctgcatctagatagaaaataatttaatcaaattattttgtatggtagctcgatttcccccctactgacttgattaacacacatgtgtcgcttgcacatagaaatgcaaaaagttaattatctgtgtgaacaaggcttgactaggaaagaaaaatcagatgcttttctctgaataattcacaaaaatgttttatataagtttttaaaatgaagataatgaatttattttttcaagagaaaagggacttgatagtattatacagaatatccattgacgccagagtagttagtgaagtgaattttgatgggattgaaatgaaagaaccttattattcataacatttcactgtttatattgcttagtgaccgtagactaccagatcggaaactttttctgcgcatgcttcgaaggtaattacggtatagcatgacactaatgactcgagcctgaaattgttttgaaacgatgtagtagagaatcacatccagacacgtgctgaggttcatgaggaaggtggtaaaggctccccagggattgtaactgttctcccccgttcccagcatcaggaaagcgaaacagatgtggaagggcataaagcagacgagcacctgcaccagcagcgtgatgatgatccttatggacttctccttgactttgggtttcagcttagacgtcctgccgtgaaggagattatgaataatgaccaagtagcacccaatcatgatgaacaaaggaatcaagaaaaaaaatgtcagtcgagtgaggttcagcacgttcacagcttttagatagatgatgtcagaaatcttgaggcaggtggcgggagtggagtctttatctgggtctttatagagcagtagcagaggggtggtcgtggtcagggtcattat

SEQ ID NO: 13493 - DNA, 1076 bp, Homo sapiens
cattcgaaagggtaaagtcattataaatatcaagtccactaatgccacattcatcatatagatggttaccgtggttctcttcttggtggtacaactgaaaacccataatgcagtgatgttaacaaataatccaattatgaagatacagctatagaagacaagggctgcaattttgtattcatctggatgtgagctgttaaaagggacaggttgatcttgattgttcagggtgatcattttacagcttgttggtaggcatgatacttagaaactgtaaaaatagttaagaaaaataagaataaaatcgttggttaaaaaataaatgcttaacattctcccactcagcttgactgccagtgaattttaagttcgagagcatttaatcaaggaacgattcaactggttaactactgaacattcacagtaattctcatttgagagagaatgggaacttttcctttgttacagctatagccccactgtctattgagcatgtaataggtactcaataaataaatatttactgaattgatgaataaatgaaggaacttttgatgagatgattcacagcaactctactttgctaaaaaactctagtttgtaattctctagtttgaaaatgaagacttgtgtagctggctattaaactttttgttttttttaaagtggaaacacttcataatatttattaccttatgttctctttaaattatcataggttgagaaacagcaatgttttgtgtcatggtcagcagatcaagaactagactgttagagcaatagatgagctgttttctagtgcacaattgggagtacgtaaagccaagtcttccaggttttgtgatttcagctgctctacttcagtggttcacagaaagcagcaccttgaaaaaagctagtgccgttagtaactttcatatcctcattccatctagattcagaagcttcaatattatttaaattttaacaattttcaaagtaaatccaaaaaaggagtatctaagacaagtagatattaataagaagtcattcagtaacttgatgtgtatgtagaaacttataaatttccatcacca

SEQ ID NO: 13494 - DNA, 1040 bp, Homo sapiens
ttagctcatttctctgatggtcactctccccaggggcagttgggtgaggccttctgtgaggggtcatccacttccggccttgtgtgatttgaaggcattcctctccccaactctttgcattgcagagagtattttacctttggtcttcctctgaatttctgtaggactgtggataggagccggcaggataggagcttggaggctgcatggaagcctgaatgcgtccaggatgcatttcctaagtcctcatcccagggaggaaaaccaagaatgtgtctgctgaagtttgggcctactctaaatgcaaagcactcagtcccctgatggggtcacattagttcctgatctttgccatcgctgtttttttttttttttttaattgttcttcagtgtgtatgttttttaccatattttaaatttatttttaagtcgacctcttggagacattataatcaacctttagaggaagacgtgttgtttttttcttggtaataaaactgcattgattttggttactcagacaaggtatttaccagaactctcccttgtatgcttataaaataaaactagtactccattcagttgaatatttgcagcaatgttatcttcttattgctaataccatttgtatgggtagactttatgagaagtttatgactttcagctcatacagcttcttgcgctcagcaagccacagtctaaagagagtcttaactgagaagggaaggaaggaggcaggcaggaccaccctgagacccacaggccagctgccgctgtgcttctttggaaaaaaggttctcagactgtgttggcttacatctttctgcctctggtgtaggatttgctcttctaacatgaatggaacatttgatttaggatcagtaattacaggttttagaactggagtttgaagtatctgtgacacatctctctttgacagtcatgtgggtactgatccctgattgcactttcaccccttttcttcttcttgttctcgttttgtgtgtgccttgtgaacaaggacctggcacgtgcgtctt

SEQ ID NO: 13495 - DNA, 1035 bp, Homo sapiens
tatatgagtgtcttagtaaactcgtgctgtcatagagtgggtggcttacacagaaatttattttctcacagttttggaggctagaagtccaagatcaggatgttggcatggtcaagttctggtgagggcctgccgtcttcctgacttgcagatggccaccctcttgctgtgtccttacatggctgagagagctcactttggtctctcttcctcctcttacaagggcactaatctcatcatgggggccccaccctcatgacctcacctaaacctaattgcctcccaaaggtcctacctccaaataccaccacattgggggctagtgcttcaacatatgaatttaggggtggggggagacaaagttcagtgcacagcagcatgtatattgtgtgtgtatgtgtacattgtgagtctgtgtgtgtatctgctttactctctattccattggtccgtgtgtctgttcatgctctagtatttttagccattttgtttttgtagtatgtattgatatctagtagaacaggttactctttttttttttttggttcatcttttcaagattaacctaactattcttctgtataaattttagagtaagttaatcagttatctttaaaaattcagctggaatttgagatattaatattttcttttatctcttctattagtatacctattaatatattttataacttgaggttcatcttttctaaaaatgttgctttcctagttggtaatattattcagtttgtttcttttttgttgcgactgtgttctaaggttgcctagtgattttggcctcttagctcatgtttccctgaaaggtgttaaaccactttggcagagtcagattaggttaagaggggcagtgagcacccaggatagagaatccacagccactgcaggacctttgtgatccactcctgtttggtgaggttccagaggtgtcttggctagtgagggattcatttttaaactctcagaaattagcagtattgagagtaagcggtttctttatatggtagtttgcctgtc

SEQ ID NO: 13496 - DNA, 1033 bp, Homo sapiens
ttaaaatttcatgacatgcaatttttaacagtttataattataatatggttacatatatgataacaggaagaacagaataaaatttgtgtttttactctcacaatttgctgactttggcaaagctctggcaaaggaaacagaaccatttaaatagggcaaacgcacttttgtgacagaagggaatgcactaaatttttaggcagaaattccccttcccttttttgaatcattgtctggttaagtaaagcaccccacatttcagacaggcattaagctttgcttttaaatttaatttcagttggatttttttttaaccaaatgcatatcactgccaggaaatgaaatcagtcaccacatttatgtagtgaaatatgaacttaccacagtgatctgatttgtgttaacctaaaagtctgagaaataggcttagtccatgttaggaactgaaagttagattttctttttaaaaagaagaagacgacgaccgcaacaaccatgactaaaatgacaaaaaaagaagaaagataaagaaaatgagagagaaaaagacttaagctacttcaaggggaaattattaaattttaaaactctatcaatctgcaagtactccatggatccatgcaatctatacttctacctttgcacatagtagcaagcatcacactttatattttgtttcttgctttattcaccaaacatcttcatgtcagtgcaatgtatatatttgtcgtgtatattttatataaacatttgatagatattctacagtcttccaatgtgtcaatgcataatttgcttagctactcccttgatgaacttttggattctttccaattcttttcttgttataaataatgttaaagcagaaattttaagtactaaattgaaaaatggaaaactcctacaataaagttctgtagatgagggtaaactttgattaaagcaggaagaacagagcaataaatcctgtgtgattatttttaaaagaaaaataattcctctgatagaactgtgtgtacataaatctcacct

SEQ ID NO: 13497 - DNA, 1062 bp, Homo sapiens
tgattgtcaggatgcttacaatgtgtactgccttactaggttcttgatgtgttctctatagtggtagaatacctggactgcctattttaaagatagggaggctgagtttcaggttgcatgaatgatgggtggtagaaccaggacaaaggccaggtgttctgctccaggcccagtgagtccagcaccttacactgcacatctcaaggctctcatccatgtctcttccagccacgagatgcacagacacagttattcttaaagtttcccttagccacaccactaggatgaggccccattcatcagcaatggagacatgattctggagggcaatcttgggtatgaagaggttttcaaagtccccagaggccctgaaaaacacaatcgacaactttttgcagccttctgtgtgctgaccaatagccaaggaaaattttttctcattagcagactctattttcttcgtaatatgaagaatgtggcctatagctatgctttctcttctaaaatcatcaagatatttaactggtcctctctccatgcttggttaaaaactcagcttaaacctcaccttcagcaaactcactgtcttgtatttcttgcattgtcatactcaatctgaagtaaagaaacattcagagaaaacttaaaggataatttaaagtatattaggctggtatagtagtgttactgaataaaggaaaaagaagtagagataaggaagaggttgccaagaaacacccgtacttttacattgtagagattactggtagattatcatgtccgttgcaggacagaacattttcccatgggtcttcacattgtctttttatcaggaaattaaaattttttcatcagttttgattatctctttaaactatatgtagttttggtttttggtttttctctctctctctgtgtgtgtgtgtgtgtgtttaagtgtccagtgtttgtcttcggggactgactgtgttgatattttccttctgtcttgatgatagcctctgggaagggactatggtaaaattaacatgtcgttttgaatttatttattatttataaaca

SEQ ID NO: 13498 - DNA, 1020 bp, Homo sapiens
gagcggatcaatatgatacttccttcccagtctatagatgtaactgcattgagagaaagctcttccaagcattatgatgattctgctccttctgtgtctgataactgtgtgttgatctctttttagggaggaatgatcaattggaatcgtctttttcctcctttacgtcagcgacaaaacgtaaactatcagggcggtcggcagtctgagccagcagcgccccctctagaagtttctgaggaacaggtaattaatcagtaatacctggtactcattctaaatccatgtttcagagttgaagcagtttcgatcaacaggactcaaaagtaatcaagcgtgtaaatacaaagatggtgacagcagtccatctgccaccatgatagagactttgggcttttttttggctattgtggttcttacgagtttaaggaaggcattattggttggggggcggcgggtgggaatgtattatggtagcttgttttagatgctcttacacttcatatatacaagaaactaatgagattggttctctgtgaaggatcggggacaaggaggtgggaggatggggagggagtgtgcctttggcatggtttcacttttgtatggttttgagtcatgttaatgttttacatattcaacaagcaaaccaaaaggacagggacaaatgtaaaactgaaaagaaacaaacaaatgctctaactgcatttcaaatgaataacataatcacattgaaggagggaaaatggatttcagtaacgtttgtaccggatataccctcagtctaatgaagaaacaaaaagaactgcaaacaaatcttaaacatttcttcaaggtttagttttcataaaggtatgagtatagcaattctaaaattatgctgtgtgtattatagatttgagcaaatgaggaactcggttgattttattgtggaagaaggaaaataaatatataaagcagggaaaggcaagggagaaccctgtggggttggaaaggaattatcactatcatcgtaaactc

SEQ ID NO: 13499 - DNA, 1046 bp, Homo sapiens
tacaaaacagaatgtgagctcccgccaggcagtactggaacagtgcattttgtaagaaggaaacagagcaatagaaaaataactgataggttaacattgagttacttcaggttgctttttttttaagggttaaagcagaggggagttccttattatgctgacttgtgtagtctgggatctcctatttttagaaaaagcaggtcttcttgttttgggatctgtctgcttccttaaagtttcaatttgattgtgtggcatttagcatgagtgactccatttagtttggtcttctggtttgttggagcccaaaacaatggcgtcccataattttggtcaattcacatgacacgtcgtgtggattctgtttatgtctctgagatatccattagcccaagtagagagaatggctttaaacccacaaggtgctttcactcttagctgataaatagcaaaatgtatttagtattagagaatctaaatcttaatgaggctgtctcctctcttctcatctcaggaatccttaccactgtctccagaaaacccaccgaaactcctaaaatgctcaccttctgaaagcagggctctaatatttattggttttgagacacatctcgtgcttctgctctgagtagccaagcatggcagcacattgggtattgggttagcctcccatggcgtctggtctccctgtggacagcgagcttcctgagggctggggccatgtctgccttgtttgctaccctatgaaaagcctgatacacacaggtgccccagcatcggtcggagaagggttgaacacgaaggtgtggccagtaaacttccctttcagaactcttgttttcacataaaaaatgtgctagagagtggtattatgccaggtttttccattgcttgctctagtagattggaaatacgttttctaacaagatcccaaagttagatgtgttacaatgaaatactagatggtactcaaatagtaaccaacttttgtggggtgtctcattctgctgggtgctctgagagatgtacacaaaggagctcagcca

SEQ ID NO: 13500 - DNA, 1048 bp, Homo sapiens
aaatacataaagtgtattttagaacaacacagtctttttgttagaatgttatgctcaccatttaaaaagattgttcctgtctttctgacttctttagggcccaccacacacctggccccgctgccctccataggagaatagtggtcctgagaggtcatgtttattgagcgctggtcatgtgcccgtcactgttctgggcttctcacatgcatccctctcatctcccaaactgcgaggaaacagagagtcagagcctggtcccctgcatgtggtcacacggggccaactccaaagctcgggtctccctgccaccctgcgctggagtcagacctaagacagcatgcagcttcccctgcatttttatttcacggaagcatgaacctggttttctgtccctacaagttgagtatcccttatccaaaatgcatgctgctctagtccttcagtaagcccatcacatattttctctgtgtcgtctgtagacactttttctgcagcgttagcatcatctccatcatcactgttgtcacagtcaccttgactcagaaccatctcagctatttcaccatgggtcagttaatgaacagctggagcccccttatcgatattaaaaacttcaatatctggctgggctcagtggctcatgcctgtaattccagcaagttgggaggccgaggtgggcagatcacttgaggtcaggagttcgagaccagcctggccaacatagtgaaaccccatctctactaaaaacacaaaaattagccaggcatggtggcacatgcctgtagtcccagctacttgggaggctgaggcaggagaatggcttgaacccaggaggtggaggttgcagtgagccgagatcacatcactgcactccaacctgggtgactgagcaagactctgtctcaaaaataaaataaaaaataaaaacttcaatatccacttcttctggcttactgacagactcgaaggtatattttttacctgttaggaggtcaggcatcattttatcctcatttgacatgtggaatccttcaaagtcaccacc

SEQ ID NO: 13501 - DNA, 1619 bp, Homo sapiens
acaattgaacacacaggttgactcacctaatgaagtgagcactggattgaggtgtcagatttgccattttggtgtaatattgtctctctgcttaacttattttaagtttggtgtctgtgcttctgatttcttagtgtgtatacttttttgtttttccattttccactttttaagaatgaatctttaaggttcatataaggtttaaaatatcaactagtggtacagatatggctgtattggaaatagcaatgcagacagaatgaaaacattggctgacaggtggcagcagtggactatgcttaaacattcacttagctgcttcactgcacctgctttagggatgttaataaatacatacatacaaaagagtgggctgcttagaagtgaaccatgccatttttttaatcaccttatgtaataaagtttgaatttattaaaagatggaattatggctggttgtatagctggtaaatttcagccttctggagtcatgtttagcctgattttagacatctgaatgtcacatgctctcttgttcactgctgaatctctatcacctgacacttaaggagggcacttaacatctgttgattatttgaacataaaaatttgtctgcttgttactagaaagccattaactccagaattcctaagacatgaccatgggatattactaggagagactaaagttccatttttgttctacatgggatttttttttctcttctagaacttatttacatttaaaaggtaagtcgattgaaattaccaaaaagaacgtatcaaaggaaaacttgatgacgagtctttagagaaacacagtaggattaaaatttaaatctgattgagctatgaggaatttaaaaatttatttattaccaatattaatgcacttaagtaatttaatgggaccagcacttttactctatttgtgatattggtatgaaaaacctggatattttttctgaatttgctttccacttccttttaatacagtttacgtttaataagaaggagacctgtaagcttgtttgtacaaaaacataccatacagagaaagctgaagacaaacaaaagttagaattcttgaaaaaaagcatgttattgaattatcaacatcactggtaaggcatgaatattttcgattttggggtttatcctttccatatgaaatctttgttgctttgactatataaattacttgattgtgtaaaatatagcaaattaattgatttccttttttttgttactagtggtcgtagcttgaagtagtgactcttagttaaagatgacaacatcatttaaagtatcatcttttaactgtgtttagattactgtaatatctggtacttcttttgatacatagatctggtacatagagtagttatttttattcacatacaggcataccttggggatactgaggttcagttccatgccactgcaataaagcaaataacacaataaagtgagtcacataaagtttttcttggtttcccagtgcatataaaagttatgtttatactacatatagtctattaagtgtgcaataacattatgtctaaaacaactctgtaagtaccttaattaaaaaatacattattgcttacaaaaaaaaa

SEQ ID NO: 13502 - DNA, 1021 bp, Homo sapiens
ttgcctcatctgacacacgcacctcctaggaaccacagttcctcctagaaaccacagtgctagaggaagagttggcctactgtggaagtgtaaatgtgttgcacatcaggcttgacggttcccagttttataacaaattctgaaactgactgcaagataagtgagaatcccgtgtgcccttcctgtgcctaggcccattgattgatactggctcaggatttaaggattcttttggttgtgaggggaaaagaagaactgatcttgatgacttgcctctgattctctagagcaggacttacctagggaatcccatcctgtatgtctcagatttggattatttaataaaggaatatcatattatatttgctagtaccattttctaggaatgagtactcattgctgtctgacagtttggcaaatatcagacttgtaatatggatatttggtttgctttaaagaaaatctgtatttatacaacttttgttttcttctatagcctttggaggtgagaagtggaaaacaaatgttttattaacatcatttctttgtcctgggtaagtgaatttttcaagaattactttcttaacatagttacatgttagtccccaaattttcagtcgttgagtctttaatcctccgtgtctctaaatcatgtacctaagaaagtaaatttaatttttgaaaaggggtaaaataaatattttataaacgtttgccaaatgattaccacatgtcttatctggggaaagtacctttagacatgagaaatgttttaattccttctcttcaaagtctttctgtttcttggtttttagtggtcagtctgacatgttgttctgtaggctgcatttaaagcttttgagccaggcacaggaaggaatcctgaagatagttcaggcaagcatatgttttcccatttttatccaaagcattgccattttttagagtttattccattaagtaaagtaatatacaccaaaaataaaaaataagcagccaccacaaatccaaaacaaaacaa

SEQ ID NO: 13503 - DNA, 1050 bp, Homo sapiens
aactaaatgtggtggtggccactagaagttgccattttatgcgggactccctgtgaggaagcccatagtgctggtagctgaaatttaggaatgcaggtttctaagaaggctcggaaaagcaagctgggctccttggggaggagctattagtacgtttaattaaattttttaacatataaaaagttgttaattataaaaacaacatttttttctaccctgagtgcagctggagctgtgttctgccgttacacaattcctcattaattccacacattgcttacgatcctgtgaagtttagaattttattaggcaataaataagaaatcaaggaaataatatttgtggtttcatatcggtcacttgggtatgaatttaaatccactgtaattcaaacaggtttagtttatttcatgttgctacttgaatgtgttatagcgtatcaattaaataactcacttgaatgatgcagacttgagattcattccctccttctttccttccttcctttctcaccccatcctccctaccataaaccaggtttagaatagctgttaatttagctgctttgattttttgttgttgtttattttgaaacggagtctcactctgtcgctcaggctggagtgcagtggcacaatctcagctcactgcaacctctgcctcctgggttcaagcgatcctcctgcctcagcctcctgagtagctggaattacaggtgcacaccaccacgcacagctaatttttttatttttattttttatttttagtagagatggggtttcaccatgttggtcaggctggtcttgaactcctggcctcgtgatctgcctgccttggtctcctgaagtgctgggattataggtgtgagccaccacgcctggcttttttttttttttttttttttttaagactggtgaagctatgttgcccagactggactgcagtggctattcgcaggtgttatcatagcttactgcagccttgacatcctgggcaccagtagcgcttcttcctcagtctctagtagctgggactgcaggcatgtgctac

SEQ ID NO: 13504 - DNA, 1086 bp, Homo sapiens
gatactctggggttcaagtccaatgctgacccgcagttggcccttgaccttgttcaaggcccttatctagattgtgccttatttttctcacccatcaaaaggaggatggacaagtttcttcctgccagttgacattccagagtctagaaaggaattattgccctcaagtaagacgaccttggggaattcagaaataaaaagtatatagctttttgagctctaagttattttggtccatttgagctcaatttgaccagagattgaagataaaagctctgcctcccccaaacttattggtacagcctgcactcaattggttttaccgccttctcctgacattaagggagatgtttttggttgtgtggtgttgaccctttaggtcctcagaaggggcggcaccctcatggtgtctctgcctgcagcagggagtgctaccaggcactttgttccagtgacttatgatggacacagcacagcgcctaggggttaggattctaaaataattcaggtgtatggagacgcagaacctaaaagaactcaggagaaagagaaggtagatatcctaaattttagtctgattttgactcagaagtggatacctgattttggcctacatttcacctctttcagtttttttctgctccatttgggttccctgctcacttggaaccctcaagctggcttgcaaatgcccagagccacagtgctctcatagggtctgcctgttctagggcccatcagccagcagtccagcagggatgaccagtgagcccaagaaaacaagcagtgctgatgtcagatgtgtagcccttctcaagtgctatacattttaagaaatgccttcactgggcatggtggctcatgcctgtaatcccagcactttgggaggccaagatgggcggatcacgaggtcaggagttggagaccaacctggcacaacatgataaaaccctgtctctactaaaaatacaaaaattagctgaacgtggtggtcacacacctctaatctcagctactcaggaggctgaggcaggagaatcgcttaaacccggaaggtggaggttgcagtgagctgagatcctgcca

SEQ ID NO: 13505 - DNA, 1038 bp, Homo sapiens
tacagacctgggtggcgttagcagtctctcttctgtgaaccagggggcgatttctgggcataatatcacctggatttaaaaaacttaataataaggccacacacgcatttttaaaaaaacttcccttgcctgtggagacagagaggagatagcgatgttattttcaggtgtttgagcttcttagagaaaaagaaacaaataccagactccttaggagctaggtgcgaatggaataaattgaggcactccagcgacacatccagcttgttttaaatgatgtgattaaaaaggacatctgagaacaaatttatgaagttgttatggcaactgaaatacttggattgaaatgtgtgtatctaaaacatgaaagattgcaggaagccggagaaacaagcaaagcattgtgtttgggaaaggcaattgaacagtggtagccaaatattattcctctgtcggtcatccttcagggtaactgcctcggtttccacttttaaaaacgtgtggtgattgatgctttcatggactctgttgccccaagtccccaagccttgtaccagcgtttgctcattggtcctttgacctgttgagaacacaatctctgtattgtgttcaatgcagggatgcatttagagttgcccctgcatctacccattaagtttatactcctgtgttctcatattaacgtctgtgtttgcgaatagtctctctagtctttgattcactaactcccccaattctaacccaccaatggccaccaacaaacagccacactcaaaggactcaacatatttaaatattccctagaattctttgctctgttctaaaagctatgtatcccgtctacataatttgattctattgtaatttctcatggttttaaaattttccttaccagtacttgtaagagtattgaataattgtttctttcaatcacaggcaaggatatttaaaattaacatgtggaaatgtgtgttgcagtgtgttgaaaaatcagtacttgaagtcacatctagaatgcttccgattttttccatcatt

SEQ ID NO: 13506 - DNA, 1049 bp, Homo sapiens
aaattttgcttggcaccgtagtccagtaatcagagttagggctagagactgacactggggactctaggttatcttatcttattaaaatctgttggaaaaagtttaaagattccaaataatctctgctcctatgttaattcccagaaactaaaatgtttttaatttagctgacatcagctgtaaggtttccatccacaatattaatcaaactgactttcttccatccttccagaaaaatgttttttgagatacaacgtgcataccattaattattttagtttcaaattatttggtaaaatgctttaggcaggataaatcatttccacatgatttgttttaaatttataaaggattttcttaaaagttaattccatttttatgtctttttttataataatggtgattccattaatatttgaaaattcttcattcagaactgaatttaatatgcttattaaagtaataggatttcaacagttcttttttatcaataaagaattttatatactgtaaaaattggatacttgaaaacatctcaagcaaataatcatctaatattgatatcaatagaaataattttatataaacacatatagcatacatgtttatacaacatataaacattcaagtatgtatgataacgtgtatttcctcaaatctatattatgagcttagtgctaaagtttttatctttccatattcatcactcttaggcaaaaatgacagctaaaggaaacagtcagttgcttttttaaaacagtcactaatcacaggaaatgttaatataggaatttactatttctttccaaatggagactctaacagaagaatgcgaaggaatagcacaatatattacgtgtgtcaaaattttaaagatactctgctagaatattcatattttgcagtatctggctacaaatatggctttgcttcattttcagttttccagacattctctttgattcatatcatggctgtacgtgctttgtttggttttggaaggattttgtttggctttttcaatatttctccttcgttatagcttcaca

SEQ ID NO: 13507 - DNA, 1050 bp, Homo sapiens
aatcgtgccagacgatttcctaaaagaaagccaaatgttttagcaacttcccccgtcaatatttactccgaagtggggatgcgccagcggcctattgttctcttccgggaagggagggagccgaggtgcgagacaagcttttaacaaggtttaaaatttgagaaatttatttgcatgaaatgctcgctttcgagtcctgtgtctgagcggatgtctttaagaaacaatttaggtgctaatggaatttaacgttaaacggtcccctttccaagtggaacgacgtttgagttctcgcacctctaaatgactccaagcatttggaattctggcaacaggatgcagagacagccagaaaattaaacggggaggttttgaaaggctttgctgactcccccaaccctcgcccaccagcttgtgcctctccgcagtcactagatgctgccttatctctaatatttaccttttcttcaacttatttttttaaagacgggaggtgagactagaattgtggttaattcaatttgcagaattttggatgaaaaatactggctcagtcactctccacagcccggcccccaaacaacacgtagcaactccaaatgtaattgcttactggccctggcgagaaaccgacagcagcccagcagcctgtgtgattttgataatgccccaaatattttgtcataataacagcttctccgtggcgagagcaacttgttagaagctgcaaatccaagaagccctctagaaaggcaggcagggctaggagcttccccacattcctgagaaatttgaggagatggacgtcagcctggaagaaagtaaaatacgaaataaatgagcaggactgtcgggcgggaaggcggttaatttgatcttagttctgccgcagaggggatcggactggtttgagggacccagccccctcaggtccttctccctcgccgcggcccagccccctcgcagcctgagtgggggctctgcaggctctgggtgtctgcagccagcgccgatgtttgccgtccacaggggagaagccgttccagtgtg

SEQ ID NO: 13508 - DNA, 1086 bp, Homo sapiens
gcagggattttttttagtagtaatgttatgaatgagtagaaaaaaatcccatggggaaagaatgtaaattattaaatctttatggcatgaaatataagtagttgaatactaatgcaagcattgtttctcattgtctcatactacttttgataatgggaccctttggtagggtccatcagttaatgacagggatatgttctgagaaatgcatcgttaggtgaattcaatattgtgtgaccatcacagaatgtacttacacaaaccttgatgatacagcctagtacacacctatatagtatagcctattcctcctgtgctacaaacctgtgcagcacgtgactgtactaaatactgtaggcaattgtaacacaatggtaagtatttgtgtatataagtgtatctaaacacagaaaaggtacagtaaaaatatagtataaaagataaaaaatggtacacttgtatagggcacttactgtgaatggagcttgcaggactggaagctggtctggatgagtcagggagtgatcaaaggcctaggacattaccgtcactactatagacttcataaacactgtatacttaggctacacgacatttatagaaaaatagttttctttcttcaataataaattaaccttagcataccataacttttttaaattataaacttttaaattttgtctttactctttgactctttcttttttttttttttttgagacagagtcttgctctgttggccaagctagagtgcagtggtgcagtcttggctcactgcaacctctgtctcccgggttcaagccattctcctgcctcatcctctccagtagctgggattacaggcatgtgtcaccacgctcggctaatttttgtatttttagtagagacggggtttcaccatgttggccaggctggtcttgaactcctgacctcaggtaatccacctgctttggcctcccaacgtgctgggattacaagcgtgagccaccacgcccggtttactctttgactctttcataataaaacagcataaaatgcaaacactgtataactgtacaaaaatgttttctttatatccttatttta

SEQ ID NO: 13509 - DNA, 1044 bp, Homo sapiens
ttaaaatgaaatttttaggacttacatgaggacttcttatttttgtatagggaaaccgatttttaaaaatgctcttttctgtacattttctattaaatcctaatataacaacataatggggggggattgacaaagagtaaatatgcaagaatagcctagataattctgaggaaaattgatggggagtagcctaacatattaaaatacattttaatacattgtaagtcagcaagaagacataggtctatggaatacatttgttagattttaggcagtgggatgatgtgggaggatttttgagttgttaaagagggtctcatgaatattatgtggatttagaagacaaggtaattctaggattgcttgcctctaatttactgagatttttaggtatctcagagaagataagaaatataaggaatgagaaatgtttaatggctttagtgactaggagtttctaaatggacacatgggcccatttcattagtttggtgaatagtgagagcaaagaatttgggaatttaagattgttgtacttctccaaatgaatgttttaagtataaagactagtatgtctttccacaaaaatggtaaaatatattgtcacatttatatcaaactgctaaaataagttttgatattttttaaaaaatgagatctcatcaggttaaatgaaaagagttgagaatcttcattcccaaagaggaaaatgattctgtatatcaacagaatcattcaacctttgactgtattctctatctacgttcctaaattgaacctatctatacatattttgttgctttgtctgtgtacagtcatgttggatttaaatgagaaatatctgattttaccacgttgaaacaagaacctaaaattagggaagtattcactgtgactcacatcttacccaggcagcctgctgttgaaaggatgatccctggtgcgcactgtagtctcagcctcaggattctataatgagattgagtggggtttcctgtgagcactctggggtgattgacagtaaggtgagggcagtcatcactt

SEQ ID NO: 13510 - DNA, 1053 bp, Homo sapiens
gtgatttgtagtatagtcacagagttatgtaaccatcactgctatgcaatgtcagtaaaatccattaacatttaataaatgatcaaggtggttggatttatgtctagcattttattatttgttttctctcagtctcccctttttttccttctgttttccttttctgacttggattattttagtaatttttgaaattccattaaaatttatctattggatctatctatttttcagtgttttttctaggattgcaatatccatcctaacatttcatattctagttagagctaatatgataccatttcaagtaaaatgtagaaattttgcgatcatatagtccatcctccttctcttcccatcactatcctctatgttatagttgtcatatgtatttcatctgcatgtattataaattctatgtgaaaatgttataattttgttataaacatgttgaggtgagttaggacatttctttaaattgatctgtcaaatttaaaatatagagacaaatctctagattaaatattttatttgagaatcacagaattggaatttgagacatacacatggggtcttcagtatatccaaggaacaaagagaaggttgaaggttttattagatagaaaaaaaatgttactgattattttgaaagaaagttcattggtacttgaaaagctttgggagctggcaggctcggataggagagtggcagtggtagtttaaaaactagtcttagagtgatagcaggttgtttcagcagttactaggtaaagctggtcttagggttacagcaggctgtttcagcaactgggcctctggatagttcagttcttggagcctgtgctatgtgccctgagtgcttttttcccctgactccttgactcttatgtagttgggtatacaagaatgacccaattcatgtaatcaactttcacagatccaaatatcattcagttgaaattaagactcattttattttggtccatttaaaaaatgttgtcttttaaaattacatatgtatttttattgtggtaaagcagacataacataaaa

SEQ ID NO: 13511 - DNA, 1056 bp, Homo sapiens
agaaatccagaattgggagatatatttttggaagaatttctgtctaaaagtgttggtggggtatgtgttatggcaagaagagagctgggatgtttaatgggttaacagcattttgttctttatcatatatttattgaaaaattttcctatcccattgtgctaggcactgaggaaattatttaaaaaataaagtagggcacagaacttgcctttccaggaaactcatttacaggtattgggttttgattctttctttctttcttctttggaaacagggtgttgctctgccgcctagccggccaggctagagtgtggtagggtgctcatggctcactgcaccttctgcctcctgggctcaagcaatcctcccaccgtagcctcctgagtaactgggactacaggcgtgcaccaccatgcctggctaatttttgtattttttgtagagatgtggtctcgccatgttactcaggctggtctcgaactcctgggctcaagtgatccgcttgtcttgattccttgtataactgccccttgtattggatttggggactgaaagaacacttagttactaatattcttttttttgtttttctttttctttttttctttttttttttttgagatggaatctcgctctgtcgcccaggctggagtgcagtggcgtgatcttggcttactgcaacctctgcctctgtgttcaagcgattctcctgcctcagcctcctgagtagctgggattacaggcacgcgccaccacacctggctaatttttgtatttttttgtagagatggggtctcgccatgtttctcaggctggtcttgaactccagggctcaagtgatctgcttgtcttgattccttctataactgccccttgtattagatttggggactgaaagaacacttagttactaatattgtttttttctttttctttttttttttttttttgagatggagtcttgctctgttgcccaggctggagtgcagtggcttgatcttggcttactgcaacctccacctccccgttcaagcgattctcctgcctcagcctcc

SEQ ID NO: 13512 - DNA, 1478 bp, Homo sapiens
attcgtaattcctgtaggtactggaaattaactttcatatttctgcaaaatcgatcaactactcccaaacaatagagaatcaactccccctgctgacagaatctaggaaaacatgacacataatattggacagaaacaagctggctgcggacaagctttaatgacctgatttatgattcagtattgattgtaaacatctaaattctgccattaaattccggcaactgcaccaaatcattggcaattctggtagtgcttcctgccagctcatttcaactgctttgagtttcttaatataataatgatgaggtagaatttacattccacttatggtattaattttacatttctctgaatgaaaagggttagaaggtagtaaaattgaacattaaatgaatcggaggagacagtagtgcaatatatgactgccctaaagacattgtgcaatgcctcatgggattaatgttgagtctcatttcctgcttttacaggatgcagaagaagctgtcagaattgcaagggaaattggtaagtccttaaattaactttggtaggatttctgtgtctttcagcagatacggttgagtcaacaggtaataagtaattcccatagagcaaataatactttaatagttttagattttgattacttgttgctctggaagaatgtatcagttgaattgccaaattctattattaaaggagactgtaaagagtaatttgaccttaactatacataactcttttgtaagatgagatcacaggctaattcaaagaaggaattgtcttaagaattctaaagattggatataagtttaatgtcaatttatatgtacatagttgaatgtggtttgttaaaattaagaacatttggattaaaatgaagataccatatgtgacatagttctttaagtttttgccttttgctaagatgttaggtatcaacttaatcttgttagatgggaaagataaaatagatgtgggaaattagaactgaatgatctaaattggaataaaaggtagactggaggagtttttaatggctgttttacatgtacttgtatttgggcagtgtttcccaactttttaatttcttttctttttcttttctttccttttttttttttaagatggagttttgctgtcattgcccaggctggagtgcaatggcacgatctccgctcactgcaacctctgccttccaggttcaagcgattctcctgcctcagcctccctagtagctgggattacaggtgcctgccatcacgcccagctaattttttgtatttttagtagagatggagtttcactatgttggccaggctggtctcgaactcctgacctcaggtgatccacccgcctcagcctcccaaagtgctgggattacaggcgtgagccaccgcccctggctcgcaactttttaattttaaaaatattcttggcggtcatgagaactatttttggtatctgctaattga

SEQ ID NO: 13513 - DNA, 1067 bp, Homo sapiens
attccatcctgtcagacatctttacatttaaaaagctctttttctagttctaggttagatattattatcaacctcattggatataataatactgttattattattattacagtatctacataaaggacaatatttagagaaatttagggaaataaagggattagaagaaaatttacagttacactgcagtgccacattttgaatggtgaattttggacttgcgagcattccctttgtgtaaatagcaggccgtggattgctttgcttcctttatgccttttcttccactttctttctttctttctttctttttttttttttttgagacagacttttcactcttgttgcccaggttggagtgcagtggtgcgatctctgctcactgcaacttctgcctcccgggttcaggtgattctcctgccttcacctcctgagtagctgggattgcaggcacacaccacaatgccagctaatttttttgtatttttagtagagacggggtttcaccatactggccaggctggtctcgaactcctgaccttaggtgatctgcccacctcagcctcccaaagtgccgggattacaggcataagccagtgcacctggccattttccactttcgttataacctgtcacctttaagataaccagctcatcatgatgggcctctgtctaactagttctcatcactttgctttcctccctcaatattttaatgctgtgctttacctccttttcattttttattttttcctactgaagttacctaatctaatctaagtcttttttctttgtacttgggcacatcctttatgactcctttctctttcctgtccttcttctaattcttccccaattactctctcttgcttgtgaaataaatgatagcaatcatggctattaagtataagagtactggtgttttgcttatactgaaagaaagggaaaccataaaatttgaggtaaaataaaccataaagaactagggtcatcagctcttacaaagcttttagaatttctctgaaaatctcttctgaatcacctcagaagcctcgcataaaatcttt

SEQ ID NO: 13514 - DNA, 1051 bp, Homo sapiens
tgaagtgctactttctaaagtaaattaaattatgttttattaaagtctgttggctttctgtgttgtttgatatttcgtaagttttttactactgattttattgagatatatcacattttaactatgattatgattccatgtgaaaatgtgttcctagttctaaacaactgatttataatcaaacctttgaacctatccatttgtaagttgttgattgtccatgtgttatacctattcatagagttctctcttaattctttctgtgttatgtgatgaaaatgaagtttatcctgttttatgtgatttcctcctctctcatgtctttgcttttcttctggaaacattaatctatgctgccaaagtaggaaactcactgtattgagcattgatgaattaagtgccttttacataatggtaactccagtttatggagcatttcttcctaaggccaggcactttggaaatgttgtttctaatgctaattcttgggtttaatcatttttgtttacatttaaggaaactaatgattagaaatggtaagtaatttgctcaaggtcacagaactatcgagtggtggaccctggtttaaatttaggtttatttgactccaaagaccacagactttttattatactgtgtctaaaccaatgggattagaggatggcagctaaaatttgagcgactactttgtgtaaaatactgtaaggtactcaaatgtgttatacatggaattaaagaagcagacagtctcctatccttgatgaggtgagagacagttaagacttaatatgttacttgtatgtatttgttttttggactacctagtttctctcattcttgttcctgattttttactttgacctatctaagttgagagatacagagctattgatcctcagtttgtctttaacctcaatgatagacaacagtaatcagtgagcttgatttccattgaagtttgatctttttactgggccaaaggtccttaatacaatcaagtcaaaattgattcttgaaaggaaaataaattgtgaatctaaaacctgtcctt

SEQ ID NO: 13515 - DNA, 1027 bp, Homo sapiens
gatgggggcaactgtagtagtggggagttctgctagtaggccagtacaagagtcctggactgctggtagtttgtgtaagtattatgattaagtattatgataactgagataaagaaaagtgaatagatttgatctttttaaataaagaatttataagagtttcatactatccagcagttgtgctcttacacatagatccaggaagctcatatacaaagttccagacaacaagtacaaaaatattcaaaggaccattgttatataaatagaacaggttacagtctgaatgttcattcacagtggaatggataatgctgcagtatgtttgtaggtgacatagattacagcagtaaaaataatgacttacagctgctcagattaactaatagatttacttagtaactcttactttgcatgttattctttaggcagtttcagccactgcagaaacaacaaagaagacaggcaaagatctttgtctttatgtttttttaatcattgtgcagtgaacaatgtagatattgactaaagcaagaatcattaaagttcatttttaataatgggtgaaaattgtttggatataggatcatcacagtttcaaagtatcaatctacagattatttgctaagaaaaaatggcatactttctgtgaggaaatttaatggatgccatcttaagtaatcaagctttatcagtttgggataaattgactttttattttacttttgatgcgatggaagaactcgaggatacaatatcaactatgttgtatttaagatttgttaaacatcttgaatttaatgagtgaataatcaggtatattcaaattgtggaatattctatcaaacaaccaccctgggttcttcagaaatatcatggtcatgaagaactccccccgccatcagcacaaaacaacaaacacaaacccacactttcccttctggggaggctgagggggttcaaaaggcaagtgaactactttacattagaggagcacaaagaaacgaaacaaagcaatgcgtactat

SEQ ID NO: 13516 - DNA, 1033 bp, Homo sapiens
attttattgctgttatgttttccttcattgcttggaatcattcttgagtttcagaaagggtttgttcctaaaaattaactttacagtcatatattaactatttattttacattttaccaattatagccatgatctttatttgatttttttcagaagccatatcaaatattaagattgatattatctgctatttataatgcacaaagaaacagaatgacttgttcagagaagttgcatagctgtttggaactaaaattagtgcctggtctttgggcttctaaaacagatcttacctctgtaaacctaatatatgtattcagaaatataaatcaacaccttaaatctgaaaatagattggtccgtttctgaaaatcagatgttctaggcaaaaactttaatgaagagctgcttttgagtttccagatttagctgaaaaagatacatgttaaatttgaatttcagattaacaatgattttttaaaatcactgttccatgtagtacttgggacatagctagaaaaaaattattcattgtttatctgaaatttaaatgtagctggatatcttgtattttatctggcaatctcagcttattttccattacaggttgaatgtatctcttaactgaaatgcttgggaccagaagtgtttcagatttcagatttttttgggttttggaatatttgcatttatacctgctggttgggtatccctaatctgaaaattcgaaatgctccagtgactgtttcctttgagcgtgatgtcaaaaaatttcagcttttggagcattttggatttcagattttctggttagagatgttcaatgggaaaaactattatgtttgtatattaactccagacctttagcagtttcctagaacaaaaataaaccacagtacagacatccatagatagataacagattacatattgggtggaaatgcatacaatgtcatttcccaatcaacagacatttaataatgttaacatcaagcagatgtttgtaataaagctgcggtggcactcctcagca

SEQ ID NO: 13517 - DNA, 1024 bp, Homo sapiens
tttaggaagatcctggaaggtgctgaagctaattacttggtgttgatctgaagttagacacttagctagggagacttgttagtatctttttcttaagaaaccatgtgctgagctagaactagtactgtagtactgtagtatggaggaaggggaaaaaggatacctgtggaacagtaagagtcttcaacacacatgtcttgcaattttctgtttccttgactgattatcaattccaattcaattaacactctgtttttagtaaaaacctactcaagtgttacctgggatagaaatctttcccagactgggaaccttgaatcataaaatgtgtttgttttttctctttgtctagaaatacaaacttttcataatgaataccttatctacttatttagagaaaaaaaggaaaatatacagcagtaggaatcaaaatgaaaaagctagaactcatcattaatactgacctgatatgtatttgtacactgtgaaatgttaaaataaatggaatgtgtagttttcagttcctggagtaagaatcggctgggcatggtggctcacacctgtaatcttagcactttgggaggctgaggtgggaggattgcttgagcctaagagtttgagaccagcctggacaacgtagtgggacctcatcttcacaaaaaagtaaaaaatcagctgactgtggtggcatatgcctatagttccagctacttgggaggctgaagtgggaggattgcttaaccccagaggtcgaggttgcagtgagccgacatcatgccaccagattccagcctgggtgacagagcaagaccctgttctcccccaccccccgaaaaataaaaataaaaaaaagaatctactaatgtgctttgagggcaatgctagctagggtcactcatatctctggatatctagcagggcttttgaaaagggcaagggcaagatcaaataggagaaagatagtttcacagagctgcactgagattctccagatgttatgctattaattgttagttggggtttt

SEQ ID NO: 13518 - DNA, 1083 bp, Homo sapiens
gaagtattttgattagcttttaaatacttcagattccaaaacttctttctaataatttaataaatgttctgtcctcagtaactgctcatttttaaagttttgcatggctaacctccgtgccttgctgctggtatcaaactgggaaatgaaaacaagaatcagtgatgtactaactcactcgttggctggttaacagcaatcagcctcttcaaaagaatattttgaacttgtgctatccccctaccccccaccccaagaaaatcacaaaatcagaactctaattggggctttacaaagcaaagccataggaaaagctgtgtaaacatgaaagcctcaggggagcaacagtaacagaaaaatagtgttttacagttgagagggtgaggcagaaaaggaaagtgttacagacatgaaaggcccaggcccacattcctatggagctgaggaccaggcttgacgaggggcctcactggtgggctcagaagggtctggcagggagtgcagttagcaagggcatcgtccatgccatgcttcagctggaagacaccatcagagagccacagcatcctggcatagtgatgtaggaagtcttcattttttattttttatttttgctgttttttagtttcgtcattcagtggcagaacaaaaaatgtgttgcattacatattaacggatcaagattttagattgttttcctattttccagaagttgaaatgttatttgagattgaaattctctatccattttctccatggaaatgaaattggtggttacaaaaaaatatctacacaatatgaattacttttctttttttctttttttctcccaggtccgagtggacagtggcatccaaccaggaagtgatattagcatttattatgatcctatgatttcaaaagttagtttaatttctcaatggattatttgatttcttcgaaaaatcaatgatatttaaagagtctgaaactgggcctttatctgaatcataagctataattaaacaactaattatgcactgatgtaaatgtgaaagcagagcaggttttttctcttgagagaaaattcagcgttatgttagt

SEQ ID NO: 13519 - DNA, 1035 bp, Homo sapiens
aaacatatgaaaagataagtataatattaatatagctttgtaggtgccccaataggggattgaaaaagggtagtgggagtttaaggaagaggctagcatatctttcttttctcgcctctcttggtcctttgaaagtaactagtactgctttaggactcatagtgtctctgtgtctctgtcgagagtacctcactttgttctgctttcaaatgatcctcagagtggcaggatttttaaaaagactggtaatgtcctgtgtaggtgaaataaaggggatgggcacgctcaagcgtctttgcagtatcacttgttatagtattttgggaaaataatctggtgttagatgttaaaataaaagtgcataccctctgacccagctattcatcttttgtgaatctttcctatagagttaaaaaactgaattatgagcatgttcaccatgacatttacaacaacattgtttgtagtagccaaaatgctgaccaaccacagtgtccgctaaatggatgaatgactgaataaattacaatgcattattactataaaatactatgcagctgtgacttaaagacctgtttgtatgaatcgttaaagtagaaaagcaatttgtagtcatgtgtagtacattctcatatcacttgaaccatcttctcatcctaaaatattttaaattgtgttggatgagcacagagaaaggtgtggacatctacatatcacaataatttttttaagctcaaaggatttatgagagaggggtttttcttgacacatttctcttagactttttaattttaggtattttcaaatctatagaaaagatgaatgaatagtactgtgcatgcctgtgtactcttcacctagattattatttaataaacttttttttgatatttgctttctctatttctccctttctttgccttttcctcttcctttctcacccttcctctttcctttcctccctccattctcttctctgtttttctcctgatccatttgaaagaaggttgcaaacatcatggcgcatcactcctg

SEQ ID NO: 13520 - DNA, 1050 bp, Homo sapiens
ttcctccctaatgttaccatagccttagctacttatctttgggtccttctcatctttctgttttccttcccagccaggaaaatctgtgtaagtctcaaatactttcctcttcccggaacaccaaagctgtcatttcctatgcaggtgaacctttctggcaagtgatacctcttttctttttcaaaagcactctagtttgtctctttgtgaaacatgatcaagggattaatttcccatgttttatttagcctgatctctttcaaggagctttttacatttttgcctacctaattgatctttctaagcatcctagcatattgccttcagttgcttttcactttcatctaaacaaaagcaacgccacattttttcaatgatttcttaggtatattgatgtcattagaaatttcatctgccttctactatgtttctcattaaaaaaacttattaaagccctctgaaacatagttattatgtatgggccaagtaaatcattacccacagaacaagcatgaaatagctgtgtagatctcatgggcatgcgctatagaagatctgtgtgtgtgtgtgtgtgtgtgtgtgtgtgtgtgtgtgtgtgtgtacataaagcaatctataatatatatatatgtatatagtgaagaatatgatcgattctgatatatataactttttccatggaatttttgtgtagctaaaggaatagcattaatttgaatttgtgaatgttttctaaacgtcttgaggcagttttgataaattgagaattggcctttataaaatttagatacatagcatctcttgagtcaggaacagaaatgctcaggattttccatatggttgtggatatggtctagtataaaaggatgcataggaaaatgcctgggagggtatacatgttaagctgttatcattggctagcttagagatggaaagtcatattgaaaaggtgtgccctgctcgctcaaacacatgcactagggtacagggtaacctgctgtaacaaagatttctaaatacagtgggataaataagagagacgtttattta

SEQ ID NO: 13521 - DNA, 1090 bp, Homo sapiens
cataataaatttctgatatttaaagtattcaatttcatgagttttgacatacgtatacacctgtgaaaccattaccacagccatggtgttgaacacttctttcacctctggaagtttccttatggtctttgacatttaccctccctctacccctttcccagtgtaaccacatgatctgctttctgtcactgtaggctcgtttgcatgtcctaaaattttatattaatggaattatacattattatgcattatttttggtcttgcttttttaactcagcataattatttttaggtttatccttgttatttaatgtgttattgactctgtgtgtgtatgtggaatagaattccattgtatggacaagcccagttttgttaattcatttgcctcttaatggagatttaaattgtttccaggttttgattatagtaaataaagctgctattaacctttgtatgtaagtctttgtatagacatatgtttttatttaacttgacttaatacgtaggagtgagttgtctgaatcagtgaatatatgtttaacttttccagaaactgccaaactgttccaaagtgtgtgtatcattttatattgccaccacagtgtgacaattcttgttccatatcctgactagcacttgctattatctgtcttttcactttggccatgtaaatcggtatattgacggcatctcattgtgtttctttaacaataatgatgttgaacaatttttcctatgcttagtggacattttgactgtgtttttttacttggtgtgttttttgtcttataattgtgttgtaagtgttctttatatgttggtagatacaactcccttgttcaatatatgtattgtgggccagacacggtggcttatgcctataatcctagtactttgggaggccaaggtgggtggatcacttgagcccaggagttcgagaccagcctgggcaacagcaaaaacgtgtctctacaaaaaatataaaaattagctgggtggccgggtgcagtggctcacgcctgtaatcctagcacttcgggaggccgaggcgggcagatcacgaggtcaggagatcgagaccaacctg

SEQ ID NO: 13522 - DNA, 1055 bp, Homo sapiens
atatgtgtgtaggagagaatgttgcttttgttttaaaacctgaatttcatattttttattcttttgataaatgcagtattcagatcctaattcctttaccttcagatgttatttggaccttgattatttcagaagttctgagtgtagctaaatatgactggtttgatttttaagaaatgtatgcaagttattttcagagagtgctgccttactgtgtggaagaatctgaaaagggcttaaaaagatggagaataaaaattacctgtaatcccataattattcaataattacttttaatgttttggtagaacccttcaaagtatatatatatatatatatatatatgtatttatgtgtgtgtatatatatgtatttttatatacatacatgtagcatttatactttgcataattagagtcataaacctgggaatatggtttgaattacttgtgcaagataaacagcagtatattgaacacccatgcacacattatctagcttcaatgactgtaaaaaatctatcttccttgtttcatttttacctctacccactccacactttccccatttgttaattttttaaggtaaaatatacaaacacacatatacacttcttacctgtacagtttttgtttttgttttttgagacagagtcttgctctgtcgcccaggctggagtgcagtggtgcgatctcggctcactgcagccttcatctcccgggttcaagcgattctcctgcctcagcctcctgagtagttgggactacaggcatacactaccacatctggctaatttttttttgtattttcagtagagatggggtttcaccatgttggccaggctggtcttgaactcctgacctcaggtgatccacccacctgggcctcccaaagtgctgggattataggcatgagccaccgcgcccagccttacctgtacagttttaacaaagggatgcttgtgtgtaactcagacgactctatctttacatcgtctcttccagtgcactccctgcctccttttgcttgtggtgctacctgcggtgtgatttctt

SEQ ID NO: 13523 - DNA, 1031 bp, Homo sapiens
tcaaaaaagatatagaaatggccaataagcccataaaagatgctctgtatcattagttgataggaaaatgtaagtcataaccacaatgagataccacttcacacccatgaagtggtgaagatgtggaaacatgggaaccattacatgttcctggtgggaatttatgactacagtgatatgaacttgggaataatttgacagattcttaaaatattagacgattaccacatgacctagctattccacttcctggtatatacccaagggaaatgaaaccatgtgtgcacagaaatgttgtatacaaatgtttatagtggcatttttcataatagccagtggaaacaaccctaatgtccttcaaatgatgaatgagtatataatagtaaataaaatgtgatacgttcatagaatggattatttttcagcaataaaaataaatgagctattgatattttctgcaacatggatgaattttgcaaaaatgctagatgaaataattcagtcaaagtagatcacaaattttcccagaataagcaaagctatagaaatcgaaagtacataacagttgcttagggctgaggaggggaatgtagagtaactgctctcgtatctaatgtttcccttatgaggcaatgaaaacgttttaaagttgcttgtggggatggttgcataactctgtgactatactaaaaaccattaacttgtacacttcagatgggttaaatgtatgatatgtgaatttcatctcaaactgtttaaatgtatatagtctgttacacattttatatttaagaatttgttttcctaatggtataatagatgttcaaattttaggaattaaatgaggcatttcttccttctagtttgatggagtctttgagaatatttcttttcaaattgtaaaatatgtttctatgtctgctctcaatttagtgcaagagtagctcttgggggtagcaatatcaagtgttcctgggctaccacctggaaggtggaagtagtagatgtatgtgaacccgcgttcttccatc

SEQ ID NO: 13524 - DNA, 1048 bp, Homo sapiens
cccagggatcccagaagatcccagaactgctggaatgctgaatgaactgagctaaaatttcagttgcctaccatggttatgataatgttggaatctgaatctcatcaatttgaggtacttgtaaacaccttgagctttccattaaaaccctggaaggaccatgccttgggagaaaagactgtttctggaataaatggtttggactttttatttattgagagcaaaaccaaatagttcctagtacaacataaaagtgagcctccacaacttcaggactggtaactagcaatgtaactgcctgctgtaataaaaatcagtacttttcagagggagataacatgatgagtgaagtctgacaacatctccacaatacagtttacttggcatgcaatctaagaataaagacaactataatccagaggaaaagcagtcaacagaaatcaaccgtgagattactaaaatgtttgtttcatgggcaagagctttaaagtagctattaaaatcattttcaagtattaaagatgaaaatgagggaaaaatgggaactatcagcatagaaatggaaattaaaacacactactaagtggaaattccatatctaaaatgtcctatatctgcaatggataatttgctggataggctgaaaagcatactggtgatggcagaagaaggaataggtaaccttgaagatagaagaatagagattatgcaatctgaaaaaagagaaagaaaaatgtgtttaaaaaattgaagagacacaaaaggacaaaggaaacttttggaggtaaaacatgtttattaccttgattgtggtgataatgtaatgaccgtatgcatatgtccaaactaatcaacttgtgtgcattaaacatgctgttttttaaaatgtcaaatacacctcactaaaggtgtttagccgaggtgggcagatcacctgaggtcaggagtttgagaccagcctggccaacatggtgaaaccctgtctctactaaaaatacaaaaaattagccaggtgtggtggtgcacgcctgtaatcccagctactagg

SEQ ID NO: 13525 - DNA, 1073 bp, Homo sapiens
ataagtgggattccaaacagaatccatgtagcgttttaatgaattcacatttggagaaaaaagtcacagactttcaaaacttacaggaatttggctgtcctagggcaactcctcacttaacagcaagaggggatgagaaggttgagtgactcacccagggaagtgactcacccagggaaggtcaagtgactcacccaaggttacttggtaagtaaagagagaagccagaagcctggggcctcctgacggctcctgcttctctttttactaaggtcttctgccatgggaagaaactctgaatgttagcaaccatctggatggtgttagttgtatgtctctctatgtatgttgaaaagaaaatgttgaagaattgaatttctcctgcttatgggttgtgtcacatttaatagcgttctttaagaaaaaaacacgattgctcaatatgattatatgagctcaccataaccaatgacaggcagaaaatcctgggaggatagacactaacaccacattatcctgttgggataatatcccaaattctgaatataactttcttttaccactttaaaggccaaaaaatggctgttaaatggagtatttttgtcaaaccaagtttttaaagttttcagcagctgcttctgctggcttttattaactactgaagagtctttttttttttttttttttgagatggagtcacgctctgtcacccaggctggattgcaatggcgtgatctcagcccactgcaacctctgcctcccgggttcaagcgattctcctgcctcagcctccctagtagctgggtttacaggcgcccgccaccgtgcctggctaatttttgtatttttagaagagatgcggtttcaccatgttggtcaggctggtcttgaactcttgatctcatgatctgtacacctcgggctcccaaagtgttgggattacaggcatgagttaccggaccctgcctactcaagagtcttaattgaacatcaaaatcctggttttgtttataaggaaaaaaagttaatggtgcaactaggactaattctttgattaattttttaaccacttc

SEQ ID NO: 13526 - DNA, 1058 bp, Homo sapiens
gtagtttttttgaaagtatgttgtctctcgttaaaagcattctgtttaaagtctttaaagtttaacttttgtacttttaaccctttactgaaatccagtaataaaatttcaccgttattcaagatccatctcccagcatccctgactaatcctactgtatgctgatctctcgttgatcagcccctggctatcttatcctcctttctacactaaacactcatcctcctccccacaatgtcccttcccttctggatcctttatcgtgctttctgattattgaggtagcattttggaagtaacgagggggagtctggccgaatctgcttagaaacccctgggaatcttgattcctggtgtgtgttcttcagcaccactctggagtacagcacatcttttgtgaatcagaagaggatcaggtactgaattccctcccggtaactggagttatatagttgtcgttgtattaataacttaaagacttagaacaatgacagctatcaactcatttggggctttattacaaagtaataatgcttttcattcagctgtggagtgtgtttactttttataggatgagtgggaggaaaacagctgggataagtggttcaccggttcttttgtcaggataataagagggtcagaaaagtttggagaagtgctgcttggtagaatttgttggtagaatttccagatctgtttctcacattattctgttactctctctaaagtaacaataattttcaccccacagccttgttgtgaaaattgattataagaggactggctaattacatgtgacttttttaaatgctcaagaaaaatattaaactattttggcaatgatatttattcttttttgtatatataatttcaacttttattttagattcagaaggtagaagtacaggtttgttacatgggggtattgcctgatgttaaggtttggggtgtgattgatcctgtcacccaggtagtgagcgtggtacccagtaggtagtgtttcagtcttatttccaccccttccctttgggatccccagtatctgttgttcccgtctt

SEQ ID NO: 13527 - DNA, 1030 bp, Homo sapiens
gctctccctgccacatttctgctaattgtttagcgcgtatctctgcacttaacgggtggcctcagatgactctgttctgagcatctgtcaggacgcagagcctcagactcattgtcactccaaatggaacaaaaactggttgagagaaacagtgtttacagaggattacataaaggagaagctattagttgatttctttacagtggattttgaccttgcttatgtcatgtttccttttagattcttgatgaaagctctagattctttccacagaaaattgagagatgtgtgaaaatgtcgagaaatacataaaacaaaagccttttctctcatcctccccacttacatgtaccctgctctgtgtatgagcctcattttgatatcctttctctgtattctagctgctacttgaattcagtcaactagaccttcagaaagttataaccttgcaccacattcatacttgtcctctgtcgtgttatttagagaagtcagtaataatttatgttttgatgtgttggttgtattgttgagtcattccaatgatggtggttataagaaactgacctgtggaatgtgtcactgtatttgctgtgagaatgttgttaaggatgatgatttcgttaattccttaatcatgtggcagatgtttattgagtaccttctttgtaccaggttgacaccatagaagctactccatggactctagattccatggaagcaagtgttgggaacgtctgaaccagtctaggaagaatcgagaaagatttcccaaaagtattaataacatcttacattgagacttgaaggatcatcacagtaaactaagcagagaggtagaaagggtgggggaaagatccagaggatgttggaggaactgtgagaagtttggtgtggccacagaggatatgatgggagcaggaggtgagggaggtgagcagatgattattaggggcattgctctggagtttcaatgttaagagccgttggaagacatggaaggttttcagcaggagtcaaatgtaggggc

SEQ ID NO: 13528 - DNA, 1048 bp, Homo sapiens
tacttgtttttgtttcttaattttaggtctgaaagctaataacattgactacacagttcattcagtcagaagagctctagaaaacactgcagtgaaggctgacaatatagaagtatttgctcaaggacatggtattattcaggtattgttgcctatatgaaaaatgggttgtaaagcatcattgagataatatcttagatattattgggtaatattttgttttataacagtgattcagtatatctgaattatggattatatggccatagaactacaagcaaaaaggatacacaaacaaattttgtagttaagacaaatctgttgcactaagatcaagaaatgtaatagatggaggccatgtagaggttagaaattcaaagaaatcgaggtcaaaaactggccaatcataacggcatagggattagttcctaaatttggtcacttgagaataacagtgtgaatagagtggagtggaagatgtgactggtgttgtttctaaaaatgtagaattgtcctcttagttggggtactaggtagttttgagaggtgaatatagacactaactttttgttttacaactgaaatcaaattgattggtaatttgcaacaaaatattttttgacccaaccatttatatcttaccatgtatattattttcactaggttgataaagcctatgactacctcgttcagaatacatcatttgctaataaattaggttttactgttactgttggaaataaccgtggcatctacctccgagatcctgttcaggtggctgcaccttcagatcatggcgttggcattgaacctgtatttccggagaacacaggtcagtaataggctggcagtaagctgacgtattcacatttgctgtttgaatgagtggtatcataataaagaattgctgtttgggccagtgttgtgaagagaatacatgaattgacagtatgattattttaaatcttagtcataagagaaaatattagagcaatttggggtccttgtacaatggcaatttagttagcatcttaaactaccagggaaa

SEQ ID NO: 13529 - DNA, 1050 bp, Homo sapiens
aggtgggatgggtggcaaaagtaatggaggccagtgtaaatgctggaccaaagaattgttgtaagatcaatgagatttcaataaaactgttactgaaacacacatcagtttggttataatgttagggaaatggattggtttcagtgaattttcacatttcagttttataaagtaattagaggtcctgaagtatgtatatgttgctttattaatgaatacacatagccaggtgtgtatttttaaaagtttgtaagagagcagtgacttttataagtgctaaaatactgtgtgttctatattttcaaaattttttaccacaagtatttttaatgttttttaaatgaaaaagtctcatgtcaataacaatattaaaaatttgtatcagaaattatatgcaaatcatgccaagtaatcttttttgttttttaatagcccaagagtggggaagtaactccaagctgcccactactttgtgaactattatatgaatctgaatttgacagccaactgtggattatttttgaccagaacaaaagacagatgggttcaggcgatgcctatccacatcaggtataaaattgatggtgatttttagaattaacggaagctgtttcctgaactaacaaaatcctggtttcttgttatggtaatgttcatactttaaaaaaaacaaaaattatagctttgtgtttagtacttttgcaaactgtgagagcctgtttgttgtagtcggtgaagaacagatggtgtcaactatttcaccatgtagttgtgctgaattagaggaggacaagggtgaaccttgcccacactggccagcataacttttggtgtgtggtgtttctccttcctatacactgattctacctatctgaaggtagaatcatcaaagcatgcatcaaagagatgcgagcctcttgaaatgatcctaagtctgagggggctaaagagagcactgcagcagtggccgcatgtcttcagttcatttgtacttttaaatttactacctcgttggacaactctgtaatgagcacttactacataccaggc

SEQ ID NO: 13530 - DNA, 1091 bp, Homo sapiens
gtttatgtgaagcttttaaatttttgagtattcagttactaacaattttaagaactaaagaaattgccattttgaaccacaatttaacttatagtgcgttgtgttgcccaaagagtagttattggtttggcaggtgagtttgactttctgaataacactgttcagtttgaacactgttgaaatacttcatgaatagctggaatgccttttttctaaacttaacattaaatatatactgtagagaaatcttcatagcatttctgctctgaagattcttcttgactgtctttttaaaccataatcaagatttctcaagaataaaggtacaaaattatttctattaaattggtactatgttaaccccttgagaattgtcataaaaatattaatatttattggcacaaagaagaaattattgtgatacagcaagtgaaaatagcgccatttttcttttgattagaaattaaaactaccaggtttataatttttactaataaaaaattccctgtcctgaaacatcttgtaggattacactaacatttataattgttaatttgatatatttaacatgtaaaatgctgattacaaaaccttgatttttgtttcactaagataattcatcataaactttctttgtctctttttttgcttttaatgatagtctaaggttactaggatatcttttttcccacttttgataggtctttgttagaattaattgtaaatcctaaattaattttaatagattgttcattttaaattcaattctcttttctcttctgtactaaaacaatagcaaatacctctgagtctgaggaggaagtgcctcacaacacataggctgcctgcctaagagcagcatacctctctccctgatacggtgaggaggtgtgggaagctcagggagaaagactggagaccactcttctagcacactgggtggcagagaagctcaattccatggagaatggagctatattaacagaaagtaaatattggaggccacttagcccctttaattcctagatgtgttgtctttgctgtacagatgacactgatgcagtctgtttccataagaacttggtggtaga

SEQ ID NO: 13531 - DNA, 1011 bp, Homo sapiens
ctagcccaagcaatagacctgtttccttttcccagtctcatgtttcacgtgaggcctttgtttacaggttctggccccctgacctcagagggagaatgacagccagtggctacaaatggatttatatggttatctgacatcaaagtggttttctgtgctttaaatgagtcagtgtggagataggattattattttgtgttggaatactattagaactacaaccatagttcctgttgtttactgttacatcattttataccccgaaattgtgttggtgaaaatatttaaaatgggaatatttgtgtcgtatatgctcctaaaaatcctatttgcgggaggtgaggacttgcagtattatttttttactcaaccagagtaaagctttttcagtgaatgtctttttgggaacatttgtttcagttttacaaactttgttaattaaaatgaatatagtattttaatttagcaccattttaaatgcaaacctgaagatagaatttgaggaactgacttaataaataacgacttaattaaggacacccagttactgtgccaaaaacaaatctagcaggtatagcatgtgatttcatttcccaaataatgctttacctttcacaagtcaagacttatctgtgaataaaataaatacagttactctccatttctctgctgctgtcttcaaagcaaaacttctcaaaagaatcacagacatgttgacttccattctcttttcatctctgtctcctccagcctggactgctccactgtcccctgacactgttcttgtccgggggggtcagtaggctctgtgctgccgggttttcagttccttccttcttcgtcgtacactgcctctcagctaaatgggcagttgatcattttctctttcttcttggtggtttttcctcaaggcttccgtgatcccaggtgctttttgctttccttttctcactcacagagctgctttttccattcactatccctaactgaccttattcatccacatatttt

SEQ ID NO: 13532 - DNA, 1033 bp, Homo sapiens
gaaataaatgataataaaattaggttaaaactatctggcaacttttatgaaactggttttatagtattagggagaataggaggagagaatttatagttttgcctttataaaacctaatgctgtgtgtaaatagagaagcttccctgggtttatgagtggttggtatggttccttccatgcaagtgtgatttccgtatgttggtgtaattaatggtccagtgactctgaaccaagctgccatttggtcactttcacccttccatgaactcttaaaccatcacctcatggtagctctcccagtgtcagttacttgtttatcacttttgtttatttttgacttacaggatcattaactaggtagaaatatcctgattcttttgtggttattataactaataaaccaaaactattcaggctacctgaaaatactaaattttccttaaaaattttctcagtttcagtcagtatttttttctacataaaatacttggattccaaactgctagaattctttccattatatcatttatattgatactataggatcttatgaatcttacaagcaataattttcaagtgggatagaatatatttaaaattgcttctttggccactattattaccttttcatatttttcaaaagaatagtctcaaaacattgccattttgttgttgttgttaataataacagaaaatacagccaccatttattaagtgccgattatgtataagggactattgagggcattttaaatacattgttttatttaaatttagtcttccaaacaacatggaaggcaggggcctttgtatcccccttttaaggaagagaaaactgaagttcagagagtttagatgacttggcccaggtgccactgctaggaagttggaaagcacatagtcaaatcaggatctgcctccacagccaatgccctttcttttctctgtatattcttctcccttcttgagaaggttaacataactcagtattatctcacagaaaaaggagcatcgtctgcctcccacccatcct

SEQ ID NO: 13533 - DNA, 1050 bp, Homo sapiens
acattccaaagtagagaccaaaaatatatataaatgattataagtatatttgacagatgcagtaattacaggtaaaaacttgtaccaaagaaaccatgtttatataatctaatacttgtttttttacttctatcctcatttgcaattttggcattttttatttctatcctgatttgcatctttgtaattatttatgttagctctggtttcttgtgcatgaagaggtatttttaagtggatttccacggctaataatttctcatattagttttcttcccaaaaaacagatggttcattctgtggaatactcagctcttttgaagacaccaattttctttttcaaagtttttaaaaatgtactctatgtaccatattcatttcaaaagctacacttctgttaaagccttaattttatggttaaagctaatgccttaaaatgtaaattattttataaacaagctttatcatgttttacattgtaggttttgacatttgcatataaacatgcattagtaaataaaatgtatgggagaggccttaaatttgcaactaaacttgtggaagaaaaaccaacaaaagaaaactggaaaaattgtattcaagtaagtgatatttaaaatgtcactgttaagcatcactttgatattgcatagtgacaagataactagaaaggattaggactgtgatatagcaatactggttttattgtgaccagttattacagtaattagcgtaatatgaactatagaataaatatatgagagacagtcaataagctatttaaattttaaaaacacttttcactgctatccaaaaaactgatactagcctcaaatgttttcaacaagggcaaatgcattttgaattttgtaaccgtagaagccagtttttctttatgaaggaaacaaatccttttaaaggcatgttgcctcaactctaaaatggttcaacttctggagtttatatttgattttattcttcatttgagatggtaggcatttttaaaattatcttaccatatacaatattatgtgcagagaaattttatag

SEQ ID NO: 13534 - DNA, 1337 bp, Homo sapiens
agaagggaggaacacaggttaataggaaagagggaaaaggacagttggtagggataatgatgagaacaataggttggttggtaggaaagttggttgatagtaagaaaagttggttggtgggaaggaggatcaatgggtgggtgacggttggtggaaggaaggttctatatgctactaccttactgttactatttaatacagaatttattctaaatactgagcttaaaaatctgtcacttcctttataataatatattattgtattttgttgtagctgatgaagttacttggatggacccattgtgcatcttttactgaaaactggctccccatcatgtatcctcccgattattgcgtattctaaaataggaaacaagactttaaattttaaaaaaggaagttttatagtgaatgggtataaaaacaaatttgtggcatttttagtctaatgcatgttttcatccactatccagtactgattattaaaatgacatgtatttatcagagaattcactgacgtgtggcttaatacatgtaaatctagacctctgacatcatggtgttttcttaatgcctcacattgctggcacggggatgtgccctgcctgccagcacctaggacttcgagttgggttgcagcttatgacatgcatgataggttttggaaggtaacttttaactgcaaacctataaagtactattttttattttataaatgaacagggttttaacgtgctcaactttaatttttttcaattgtatgaaggccttaaaaaagctacattaagcgtagctaaaattatttattggactaaaaactaacagaacttcatttccagaattttttttttttttttttttttttggcaaatgtttacattcaattaaggggaaaaagtagaaccagcacaaatgagtggcagttgctggagcataactgcttcaataaatcttcatcttggggtaattacaggcaagtcattttcacatcctcttgaggttcagagcatcagaatgaactctatgaatacatgtgtaagtgccagacagctgaatctttatcaggtattgtaaagatacacatatgatatgtttattaaaattgaaataatgtaaaacacatgaataaatttgcaaaaccaagatcacagtacaccatatgcactctggtaccttaatttttttttataaataataaaagtgaatattgaagcttcttaaagttggtcttaatttttcataaataaaatttggggttataacagaaataatacattaaatacatagacaaaaaaagttaaacataagataatctattttacagtgtttcttatagg

SEQ ID NO: 13535 - DNA, 1030 bp, Homo sapiens
atttctctttaaggtaggggactattattgaaaatacatgtattacttcattgtgtttgcaaatatcacttttagaacctgtggcagttatttatttgttattattttttctttgcactttctcagcagaattattaaggcagttacttcttaattttggtgcataattaatttttgtcatttcagtttacttcatcttaagcattttgcttattttatactcttgtattctaggcaatgcaaagaaacaagtttccaagagaaaaacttcagataaaaagggaagatatcagaaggaatgtcctcagcattctcctcttgaagatattaaacagcggaaagtattagacctcagacgatggtgatgttatcagtttttatttttttcatttttgaaatatgtaatatatgttggcaataacgtagcagtttacaaattaatacattatatgtatcataaatatttttatttctaaaattattaccaggatttctgaatatttaaagtcaccacaaatgtttgaagtagattaataatgagttatgctggtctttcccaaactcggcttattattagagtcatctgtgtgactccacgtaactgccatgtagatttaacaatgattaaccttttgatgtagttaaatacttagcttttcattgctgaagaattttcaagtaagtgactgatttttattatatttcatctcaagttacctaagtatgcatctctaaaaaatgacttttttctacttaaccacaatacttttgtcatacttaataagattaacgatatttccctagtgtctaattcccaggctaaattcacgtttcccagattgttctgaaaaggtcttcacatctgtttgttcaaagtgggacccagttgtgaaccacatgtttgcttgtcatgacccataattctctcaatctaggtcagtctccaccccactttcccccttgtcttttaaaaattctattattttaatcgacaaatgagaataataaagattgacttattgaagagact

SEQ ID NO: 13536 - DNA, 1050 bp, Homo sapiens
gtactatttagcaatttccatttttaaaattgttacaatcttttgactgtgtaaatcagaaaattgtaatacattgttaaagaaaaaattattctgacacttgttaatagggtgagaagactttattttaaacttgtgaaaggcctattgtagtaggaatgagagatcaggctcagctctgaatacagcaaagacaacaaagacaactgggactttatagccaagggacacagcgaggggtttgggggtgggatattactaagagggtcaagggtatggggattcttgctaaagcctaacagacttcttgctaaaggcaggtcaagggctgagacatcaggagttggcaggggacgtccgtaaggaacttgattagatattaagggttgtgggttctctctaaactgacttagcaggattcatgctaaaactggacacagaagtctaaggtccaggcctgtttgagaagaggactcaaggattaatcaggaagagaattgttatcaatagagggtatatggtttaccaaggtaaaagactgagcacaaagtcagatatatttctgttgacctatattgggtatatcaggttggttacttggaggcaggcttggagattacatgttgctttctacacatactagttttgtgaccttgaacaagtcacttgctgagccttgatgtagaccttttatctttctatatttgtatagggtcagtgtgaggataaaaggagacatacttgtaatgtacttagcacgctgtgttacagagtaaggactcagtaagtgctagcatttattcctactgactaaattctatgcattcacatggggcctgtctatccttctggaaaacacagctttaaatgctgtgttgctatttatttctgtttctagtgagactgtcaccacactactctcagtaagtgatcaggcaacgaaaaactaagaaaggatatattatcctgtttggtaattttctcttcagctgtgtctagtttgctttttatactgcctattgagtttgagttttttaaaagaggttttca

SEQ ID NO: 13537 - DNA, 1050 bp, Homo sapiens; identical to SEQ ID NO: 13536

SEQ ID NO: 13538 - DNA, 1050 bp, Homo sapiens; identical to SEQ ID NO: 13536

SEQ ID NO: 13539 - DNA, 1050 bp, Homo sapiens; identical to SEQ ID NO: 13536

SEQ ID NO: 13540 - DNA, 1037 bp, Homo sapiens
attatagttatggcaaatgtccagggaagagtgggcataagaggttgtggtggtactaccagcctgtctctgtagagatgttatcttgtcacttggcttgtgaagactactcctctagcctccataagttttgtgtaaagattaaagtgtgtgtagaaaaatctgggttcttatcacacaacaaggaaagattaggctcacagatactttgaagggtgaaggggaacagaatttattgggtgaaaaggaaaaaactcagcaaagcgagaagggttcctgctaacaggcccccatctcacagattgaatcccaggttgccacacagggacaggagaggccaaggtcctcccctctgcaaacagcgggcacttcctgaggcccaaccccatcctcccagcacgcaggccagctggagattctccaggaagccgtttttacttggctgtctcattagtaggagaagtttgcatttttagaacttgattattacctggagtttatttttattcatatacatcagtagttttttaagttgggatgtgtgtactgcatatatattagaacttctatattttaacctaattttaaattccaactttttgtatatcttttataaagacatattagtacagtggtatatgtatatactttataaatgcatgtgctaacattgggcatgcttgttcagaattttaagtgacagctgtgtacaaccagaaaagttgaaaccattgctgaatacactaggtaaatttcatagacaagtatgtgtgttattagaaggttttggtaagcaaggacatattttagttctttagtttgctaatgagcttacctgaatttcagtttaaagagtaaaacagaatacatttattaacattttttgtacctatcaatagcttcttgtttttccccagcagtgtcagtgtattccaagtaatgtcttttctgtccttaagcccttaaccggtcctttgtgtaaagcatggacactgctttatgggctttcagtttgtgtgtttgtttgtttttaatag

SEQ ID NO: 13541 - DNA, 1037 bp, Homo sapiens; identical to SEQ ID NO: 13540

SEQ ID NO: 13542 - DNA, 1037 bp, Homo sapiens; identical to SEQ ID NO: 13540

SEQ ID NO: 13543 - DNA, 1037 bp, Homo sapiens; identical to SEQ ID NO: 13540

SEQ ID NO: 13544 - DNA, 2334 bp, Homo sapiens
ggaaggtgttttggctccggtgggcattgttatattttgtaaaggcagctgttagaaaaggtgcaggatgaggtgctctgatgatgcctggaaggaaagtaccattctgaggccggtgaagtaaaaaaagaaagaagggagttcatagggacctacaaattagtacaattaatttccctttattttcttcagccaacatttttttcttctcaggttgggggaaatttgcattgcatcatagcattccagagacttaactggcaaagatttggcctttggaactttccatttggaaccattagacaagaatcacaacctccaacacatgcccagggaattgccaaatctgagagtgaagacaatatttccaagaagcagcatgggcgtctgggccggtctttcagtgctagtttccatcaggactcggcatggaaaaagatgtctagtatccatgagagaaggaacagtggttaccagggttacagtgattacgatgggaatgattgactatgcttgctactgaacagctggcattatatatgaaactgctatatacaggactgtataaagacagtagaagattttagtaagcctacattaaataggagcagatcttgtggtataaaaaataaccttgtagttctccagatactaagcttgtatatgattatggtgggtgatttcagatatataagcagataagcacagattattgtcctttcaagttaagagtatataatctggacagaaaatttcacaaaattcaataaaattacaactgttgtctaaataagtgaaacacaaattcacttaatagcatcaagatttgaaatacttaagcatgaagtgacttttataatgactcgatccctagacatttgttacagatagttttatgcctaagaccaagatgtaaagtaccatctgcccttaaaaaaaattggggctgtcaatttctagttttcactcatggttaacacgcatttaaaattatttcatgagtctagtagttctttgatttatagcaggatcttgcttgcctcatttgtttcctggttatgttcttaggattctgactaagaggcaaaagagaaaagactcaagaaactgatcctggagatcgagaccatcctggctaacatggtgaaaccccgtctctactaaacatacaaaaaattagccgggtgtagtggtgggcacctgtagtcctagctactcgagaggctgaggcaggagaatggcgtgaacccgggaggtggagcttgcagtgagcggagatcgcgccactgcactccagcctgggcgacagggcaagactctgtctcaaaaaaaaaaaaaaaaaaaaagacggatccttttttttggtgcaaatgggtgacttagtgcattgattcagatttttaaaatttcttgatgtggtttgtaataatcaaatattgacaagaaccttaggtctcgaaagacttttataagtctagatgacgtttgccttaggggtaaagtaaaagaacaattggcaccttaagtttctatacccaaggttatctgtgaaatgagatctcctgatatttgattgctttctcagtatggagtcatatgttgataacagtactgaagatgcataagaaatgcccaagtcactcagaggacaactacccatattccagactctgagctgtttcctttttaaaaatcatatagacaattagctgtttgaagtgagtattaaatatttcagaagtgtgaatttcatgtatttgagctcctctagttgctgttggtttttcttctgctgccaacctgtgactcacaaatgactaggatctcttgttctttaattttagggtcttgttccaggactcaaatcagtaacttggtgattacaaggtgctgaatgtgttggtaaccatatcgcaatacacctcaaggaaaaggttcagatttttatttttaaaatattttcatttttttcttgaattttatatccgtttgttcactcgtacatgcctagcctacagaaggggatatatattatgaaatggtcatttttctgaagagaatattttgcttgaaatgcaaaggactgaaagagatttgtaggttgttgattttgttacttcatactggaacttttaaaaagatttcatcaaataaagttttgttttctacttttaattatatgaatgtttttaaacctttgttttaggtagaaggtaccattgtgtctttgaagtacatgataatttgtcaattctgctcaactggtacattgtaagaaaccatcttgagccttttataattaatgaaacaatatgcattatgatgactgtaatt

SEQ ID NO: 13545 - DNA, 1035 bp, Homo sapiens
ctaactaaagaactaaagaaacttattttttgtattgaaatgttattggtctttgggtcttataccgaaagtgatttttggctttgctgcagattttaacttttctgtccgcagaaatttaattttgcgtatataaacttactgaaattagacaagtcaaattatacaaatattttcagattgtctcatttttcatatttcttgtctaacaatttatgtgaatattttcaggtcgtctaattttacatatttcatctctaagaattcaagccaaaattctcaaccctagctgagaattggcattacctgtagttaattgaaaaataaaaaataaaagaagtcctacctcagtctctatgatttagaattttaggcccatggggtttaataatccgtatgtttcagaagcttcatatcctattctaatggatagcagggatgagagccactgatctgaaactagatttcctcactgaagttaaagtttaaagtagtgggccaagtagaaactaatttaatcctatgtaatagtgagcttcatggcttttccagactatacttgtagcaagcagaaacatcgatctaatacaagacagatgcacatcaacaccaagttctacctctgagatgtatcttttatccgatctcttctcgtggtctccaccactactgtctgcgttaacttgggctattgtaactcattttagaactggtttccttataatctgttcttcacatgttcatcaaagttatccttaaatcatgttctagaaacttcccagtggccgtatcacctcctgccattccttttgtcctgctgcactggcttcctggagatagggaccgtctctgttttgttcatggctgaattgtttggtgtatatccctagggtcttggatatgcctggcccatggtattgctaaatattatagaaataagcatagcagtagcttgctttccactaggtattttgttacatagtgttttgtaaattaattgttgatggacctacatttttttttatgttagtaaaa

SEQ ID NO: 13546 - DNA, 1049 bp, Homo sapiens
atccgatattcagccataagcacagggactatccatttgtcactacttgaacatttcttacaagatatttctatacattttagaatttctcatgatatataatcttgaatattgaagggcagaattacatgtaagtaatgcatgtttataaaaagcaatattagaaattgtttttggtgtcactgtgacattttatagaataaataaataatttcttttgggaagcatttaagctttccacttcttgggcatattaaaagacatttaaaagaaactgaaagtaaattaagtttcccaaatatattgtgtagtagcccattaagtaatagatggaaactctgggtgtcctttacgtagcagcaacctgaagatatacactgatatggcaattaggaggaaatgctaaagcagccatagtctgaaaactcagacaaaccaaattctctggaaaataaatcacagcaatgtttctagtggtctaatatcctgaagtgagatcttacatcctttcttctcataggtgaagagaaggcagagaaaggacttagcgtccagtgactccaggaaaacgacagagaagcttctgaaaacatttttgaaaagacaagccatcaaaactgccttcagaagcaaaaggcaagaggaaaattatagtcgtgttagagatgaagttttaaaaaagtgatttttgtcttgatttcctgcgattctctttccctatctaattttgactctcaacagaaaatagagagtgaaatgagacaagtaggctgccattttgacctggtaatttggagttgtggcaattctccgttctgtgagaatcaactttgctaatgagaaaaaaaagctgtcgtgttgcgtcatgtacactttttactttgattatggtcttcttgactctaggtgagcagccccgccaaggttccttcctttctctcggctgcatttattttccacagcagtggcctgagagcagccaggtcaggtccctgttcaccatcctgagcagggtctgcataatctgtttaaagatttgtgtactttcc

SEQ ID NO: 13547 - DNA, 1046 bp, Homo sapiens
tttttgattcccaaattcactgtttcttgtttgttcatatggttttgttctatcaggtagaaacttttgagctaaaacctcgagatccttcaggttgcggaggtgctgtgctattaatgcagctagtgagagcaatcttagttaagaccatgggcctcgtggtcaaaaagacctgcgtttcagtccaggctccactgttcactagctgtgtgatcttacacagattaaattctccaaggctttatttttttttgtaaaacgaaattgatatcaatgccttcctgatgggggtgatgggagcattagtgagggaaagcacaggaaatgctgagcgcagtgacaggtctgtcctacgtgtttgctggttggtacgtacacatgtaacatacagacatgcaggacatcaggttgtattagcttatcttttttactaatgaaggattttaaagtacttttggtaatgagttaaagttgagaaaagttttacacttttccatgtcttctgtgaatttcttttaatttcatttcttatgttataagcaaaataaaactaacttaattatgggaatgatatatattgcttgaattcctaaggcacattctgtcttgggttcttgcattttctgttctctcagcctgaaatgctctatcctcagtgaggctctttgatatcttccaagtccctgctcacacatcctctttttagtggggtcttctttatctatcaaatagatctttttttccacgttctgttcatgtaatcactctcatatcagataaatctgctttattttaccattatcttgttcatttatttatttatttattgtcttctctcctctgctcctaagagcagggaccttatctggcaccttatccgatctcacagtaccttagcacctagaacagtgcctggtgccttagaggtacctgctaagtatttttttcttttgaatgaattaaagagtgaatggctacattccctaatttgcctactcactttgttgcctgtcacagattatatgcaactgtgtttagccaattgt

SEQ ID NO: 13548 - DNA, 1046 bp, Homo sapiens; identical to SEQ ID NO: 13547

SEQ ID NO: 13549 - DNA, 1046 bp, Homo sapiens; identical to SEQ ID NO: 13547

SEQ ID NO: 13550 - DNA, 1046 bp, Homo sapiens; identical to SEQ ID NO: 13547

SEQ ID NO: 13551 - DNA, 1106 bp, Homo sapiens
gtaagacagtaagagaggagagaagggaagtggaagaggaagaactatttcttagtcacagctttattctgtgctgtgtaaatagcataaaaacatactgagcaacttccatgattgtttatatactttgataatcctcctttttgaatttttaaaacaatgtcagttaacttagaacatatttatataaagcgaatatacaaatcttaagagagtttcctactttcaaagacagtgccagtttacctaattgaaaaggcttgttttgaagttacaggcatttgtgattacatttatttattaataacgctactattacatgtattctgttatagtcatatctttcctttttaggatgtagcatttttcaggttcctccagaaagctcttgatgattgcaggatcattttaatgttttgattgtagatgaagtgaccttttaattttggtacaggaagtttcattgaagtgcaaagtgtgattagtgatgaggaacttcaagcagaattccctgaaacttccaaacctccctcagaacaaggcgaagaggaactggtaggaactagggagggagaagcccctgctgagtccgagagcctcctgagggacaactctgagagggacgacgtggatggtgagccacaggaagctgagaaagatgcggaagattcgctccatgaatggcaagatattaatttggtaataccgtaacattgtgtttcgacttcttgctgaggaagccaggttaagtaggttttgagttttaaggagttggtggatgagtatttagtagctatttgcagtacatcttgtggttgctgatggcttcatttttgtgtaggttactggctgggatagactccgttttccatgtggtttagtgatgaatctctaaagatattacagagtcttggttagacatccagtggagtacttcctaaggagaaagagcttattggtaatttcagtcagactaaatgcaggctttttgtaaacaaaactcatttggattattaatataaatctataaatgaaaaaacattttataggaggagttggaaactctggagagcaacctcttagcacagcagaattcactgaaagct

SEQ ID NO: 13552 - DNA, 1029 bp, Homo sapiens
ttatgttagtaactttgatggcatttattttttcctaattgtgtaaatgtttctggtcagtcgtcactgcattacaaactaccttcagccttagtggcttcacacagcagtagtcactgattttgctcatgcctctgaagctcgctcaggcctggtgggggtgtcttgtctctgttccatgtcggctaggacagctcagctgggctaggaccccttaagatggctcgcggggctgatgaggtggcttcggcctcggggcctgggtggacacttggtgagcttggcttcctcatagcatgttggagccaagagcaggaggtccaggggacaggaagtggcgagggcctcccctaggcctggcacggcttgagtcacactggtcagccatggccgccctgctcaagaggaggccacagggacccccttcgtgatgggaggagggtccaagagtgtgtcgctgtctttatccggccgatttaggcttagaatggaaaacattgaaaaatgaataaaatataaagaagaaaatgaatggctgtgtgctcacgtagaatattgcctagcacacagcgaaataatagttgttagtgttatttattttaagtatctgtttacttttctcatatatgtgttttttccaaaactggaatcatactttaagtagagttctattatctctgtttttgtatatatttatttgttttacatacatatgtatttatatatatataaaatgttaaattttaaaaacagatacatgtatctgtttttacagattttttaaacaaatttaacattttcttggcatatttacattttattaaatattcttcgatccattattgtatttgatttgaggtaaataatacagatacattacttccattttactgctgagaaagagacccagagaagttgtaacttctgtggtataattatgagtgtgggctctagaggaagactgtaccaattccagctgtgaaatcttgagccagttacttatttttgagttcagttccctcctctgtg

SEQ ID NO: 13553 - DNA, 1029 bp, Homo sapiens; identical to SEQ ID NO: 13552

SEQ ID NO: 13554 - DNA, 1029 bp, Homo sapiens; identical to SEQ ID NO: 13552

SEQ ID NO: 13555 - DNA, 1029 bp, Homo sapiens; identical to SEQ ID NO: 13552

SEQ ID NO: 13556 - DNA, 1087 bp, Homo sapiens
aaaagaatagatagacgttgaattattgatattctccctctctctctctaggatacttacagagagctacaatggaaaagtcctggatgctgtggaactttgttgaaagatggctaatagccttggcttcatggtcttgggctctctgccgtatttctcttttacctttaatagtgacttttcatctgtatggaggcattatcttacttttgttaatattcatatcaatagcaggtattctgtataaattccaggatgtattgctttattttccagaacagccatcctcttcacgtctttatgttcccatgcccactggcattccacatgaaaacattttcatcagaaccaaagatggaatacgtctgaatcttattttgatacgatacactggagacaattcaccctattccccaactataatttattttcatgggaatgcaggcaacataggtcacaggttgccaaatgcattacttatgttggttaacctcaaagttaaccttttgctggttgattatcgaggatatggaaaaagtgaaggagaagcaagtgaagaaggactctacttagattctgaagctgtgttagactacgtgatgactagacctgaccttgataaaacaaaaatttttctttttggccgttccttgggtggagcagtggctattcatttggcttctgaaaattcacataggatttcagccattatggtggagaacacatttttaagcataccacatatggccagcactttattttcattctttccgatgcgttaccttcctttatggtgctacaaaaataaatttttgtcctacagaaaaatctctcagtgtagaatgccttcacttttcatctctggactctcagatcaattaattccaccagtaatgatgaaacaactttatgaactctccccatctcggactaagagattagccatttttccagatgggactcacaatgacacatggcagtgccaaggctatttcactgcacttgaacagttcatcaaagaagtcgtaaagagccattctcctgaagaaatggcaaaaacttcatctaatgtaacaattatataatg

SEQ ID NO: 13557 - DNA, 1032 bp, Homo sapiens
tagcaaattaaaatacaaaaaaatggtaaatatgttgaaaaagtgaaaaggttagggcaggtgaatgagtatcaggaatgtgaagggtgaggaagggaaagaaatgcgttttcattttgaatggagaggccaggttcattaagcctttttatcttttcttgaaagctcaataattctttatacttttgactattttttttaacattgcagacatgggtaggtgatttttaaaataaattcaaaatgtttatacctgtgttgtttttattagtaattccatatgaatggaaaatgttagttttaatgcttattctttttatagatcaactcctacttaaaagaactgcattgagcagctgcatttttgttgtggtgatattttttttttaaaagacattcccatttctgaagagttagagaaacagaaggtttctcttcaaatagatttatcacccactgtttctgcaaatatctgaggtaggcactccataatatacagagaagaggacagcgaagctaacaattatcaggcgtgtttcatgtgcaaacactgtgttgggctctgggaatgtatatcatttactttctcaacaactctgttagttgggcattattgttttcattttagatgagaaagctgcaacccagagaatcaattgcctctctcagcaagctaattatttaatagttggagaagttaagccaaattgatgcaaaatttaaaagaacaataaaatagacaagttatttacaattcataaaacacatctaaatgatgacttcaatctattttcgcagcagtatgaaatggatattgctattcccattgttacaggacccaacactcacccaaagttaacctttgggtcgggggtttctgtactatattcccttctgtggtcgccagagaaatgttacaggaaaggagtcccgatccagacccccggagagggttcttggatctgacgccagaaaaaattcggggcgaatccacagggtaaagtgaaagcaagtttattaggaaagtaaagg

SEQ ID NO: 13558 - DNA, 1032 bp, Homo sapiens
gctaccacatcatcctgtgcccctcatgaaaacccacaggaaaaaatattctttaatctcaattctagaaatattgttatcttcttgggcttctagcctattgtctgttgtggattctgaattttattatcaattttgttttcatttttgctatgatcaggatgaaatttggagacaggtatggttcaccattaccaattatatagggacatttaaagtatgattttagactaacttctatagctctattttactattttatccttatattacagtccctcaatcttctttttattcattttacatcatttaatttatactccccaaatttcccaatctccagccttagggctcaccctttattcaacacacccatgagaaatccagggaatgtaaagtatgaattcacaggaaaggaatgtctctgctctcttaatgggttttgatgtctgaacgcacctacagattctggctcagcaatgtagtccccccatgtgcctactcactgatggctactgtcttctctctgtccctttcatctcacccttgagcacagtggtctccttgtcactacccaagtgacttttgatgggtaatggaggagaattatcactgaactgaacagaagccattgaaactcaaatatcatagatggttgttacaaagttccttgaccgttcttagtaaaggttgtgtcttagtcactttcttctttcttccgtaggctcccttctgttgccacatttgggccaaggaatggagagatttcttcgtctggaaacattttgccaaactcttcagatactctttcctctctgggaatcaaaggaaaatctctactagtgtgttattcagagaaattttgtccactctttgcttcaaactctcttatccagatcagcctttattatgaaatagccgaaatatagaccaataaagggaaaacccagacattcatataaagggttagctctcaggttcttgtatctgatatattaacccaggttaacatataagtgatggcaaagaatc

SEQ ID NO: 13559 - DNA, 1048 bp, Homo sapiens
ggccgaggttgcagtaagccgaaatagcaccactgctctccagtctgggcgacggagcaagactctgtctaaaaacaaaacaaacaaacaaaaaaaacctagttactaaacatagctctgccctaatctcttaaatccagagccccagtttccgtactctgaagaattacggcttcacagaggccaagtgccctaaggcagataggacacctctatgcctccccaaaacctcatcattgctgcaagctcacccccagtctctttgactctttgatctttggatggcaccaagaacattgattgcccagcagagcttctcaaagtgcaggccccctagacccccagacctaaaccctgaaaggcttgttaagaagtcaggccccatctcagaccttcaggtcagacattccagggtggagtccgggactccgcctccccacatgataccagaatctgggaaccactgagctacagtattgggttgagaggcagttgagattacttgccaattcactttattttcctgggctttagattctaactcaaccaaaaaaaatagatatttttaatcattttactagggacctagtaatatgtgttgttaagagacatgtagtttgttacgttcaacaaggggctggtcttctacttactcacttcttggtaaccactggctttaatggctgttccttgtgaaataatgtttcaattttcaactgtattgattaaagatttttcttaattgtggcaaggactctttcctgcgtaggtcagttcaggaaaaagggctgccgctgggagccctttggcttgttttgtttcggaagcagctaggatgggcagtgaagagccttggtgattacttattgggcacttcctgtgtgccaatttgtctgtactaatgcttctaatcctcacaagcaagcacactgatgagctaggtaactattattacccccattttacaggtgagaaaagccacaaagggtttgcagccctcgcccaaggttcctgtctttgtaactgaatgagacggattagaacccag

SEQ ID NO: 13560 - DNA, 1038 bp, Homo sapiens
tgaagagaatgagtgtctgggaagctgggggccagcccacaggctcctctcctagacagacagagcatgcaggatgcccagtgccagcttcccctacctgctacctgcagtattgcatacaataagggcaggtggagttgaagtcagaaaattccaaaggaaaggggcttcctcctccacaccaaatctaagcacaggccccaggtggctccctgaggacagggaccaagccatgggcacgctgcccccagcgcccagctgggcatctgctgtagcagctggagtctaagccacacaatagacagagctggtgggaggaaagagagagggaaagtcgagattcctggccaggaccgaagctaagtagtttggggactttttgttcagaatcacaacacaaatcattatgctgagtgcgaaaggcatggccctcaaaaatgtgcaccttgggtcaactgaaggttcctctctcattggtttcacttgatttgaattacagtcgaaaaaattattgggtagacagacattggcttatctgcaaagtcaaactaatgcaaaatatgcttcaactgcaagacagagtgccaaactatttcaatttaatagcatggtttttttttttcttgagcttcaatgcaaagggaagccaggcatctggccagtgagcagtctatgagctgagctgtgcttttcttcagggcaggcagaggttggccagtggccttcttggcactcccagaaactcagcttcatgggcgtcaagggtaagaatgtggaaggtggtctggtggccaaaatcacacagtccctggatgtggtggtcaccatccaccaatgtccactggtgggcgataactggactcgctccttcttgacacctgtcctgctgggctcttgatattgaggctactggaggaaggagcttgcctgagaaggcacttccacaaggagagggatctgagtccacaggggaggggaggtctcttcgcctgaatgcatgagaaagcatactggacatgaagccccagtcctggctgg

SEQ ID NO: 13561 - DNA, 1026 bp, Homo sapiens
tatgagttgatgctttaccctatagacccaggaggcccgcctgcccttcccagacaactggccaatgaattattgggtcaactgaggacctctgccaagcgcctgttcatgcctccctcacgtgtagtaaaaggcatgaatgcgccagcccatctagtcttgagctttggtgctaaactttctggcttagtatggagttggatttctagaaatcacatattcaaatcatgggatttatgagccccattgcagataaacattggagccattgaaaaattggcaaatacctaggatcgtgttttcagggcgtgagaggattttatatatgtttacttttacaccataaactccagctgcctcattacctcactcaagacaaaaagatcactggaaagaaatgtaaaagctttcaaggtactgttttctctgaagggtttgggactttccactttttggagttttttttttttatagtagtaactgatgcatcagatactatattaggtaaagaattataagaagaacataaaaaacgtgaaactctcagatgagagttctctagtagaaaattgttagctgaaagaaaaaaaaaatcacccatacaaaaggaacatggagtcattgctggaacccaaggccaactcttgccaggaggttttgggtcagaagcctgcgtgtcctgcccttctgccctggactatctggaagaccctgctgggcggcagtggcagagtgggcctggccatgccacttgcacctccacgtggacatgcagctggtgacaggaaaggggaaggttccagcagacccgctatcacaaaacaacttacagagggagtccccaagtgatagtcctgtttagtcattgacacgtaactcagaagagagtgaaaaggctgtggtaaaatacaatttgcttaacattggaaagggttctgtcatctggtaagttttacttgcatgataaggtttcaatcagtgaacaccagaagccagccttgtccagggtcccttaggtgtaactgt

SEQ ID NO: 13562 - DNA, 1037 bp, Homo sapiens
gaaagcagtagaggggcagataggaaatcggagtcaacaaataagacagctttgctttgcttgttaactcacctagcagatggtgaaagtcttggatttttccaagtaaggtcaattttagttcattatttcagtaacttagccaggttcctgttctcccccaaacatctgatttttgaccataaactctgatcagataggttgtttcaaattttttaatgacatcaaccttcacagggcacctcctatgtcctaaggcacttgggtattccagaaactggtaaatatgaagactggttggataactccgtgttgggaattagtgagatggtcaaatggccctgtcacacgacaacagggaaaagagaacccacgtcatcagcccctgaacgagtgagtggaggcctctgcatcactcagcatgcatccaggcggtacccacagtgccccctgtggcctggcagctgcagctgagagcctggagactatgcttctggaaggttgcgattgacaagctcgctcaagtaagcagtggctgagtgcttagggcaacaagttgtgtttagcgactgcattttttcatgtagctaagagtttcccacagtctatgggtccctggacttgggtcaaatagtccttagcctcaccagatttcttaaattcaacactataaatcaaagtaaaagaaaccagagagaaactgagcaaaaatagctgccaagagaagagggaacgagtgctcggggcgggttggaggcagataacgagaaggcaagaaaattctttgtctttggctcctgctgtcagctcagaggggtcatcttgagatgaaaaagaaaagtccccagccttggggaaggaaaggagagggtgccccacgcagatatgaagcaaagccattggcaagatattctctctaaggagagcagcggtcttgccaaaggcatcttctattgtgtattgccgtcataaaccctacccttccatgtagatagccaggattttaaaataaaactaaatcttccccaaggagagaa

SEQ ID NO: 13563 - DNA, 1027 bp, Homo sapiens
aacctccacctcctgggttcaagtcattctcctgcctcagcctcccgagtagctgggattacaggcatgcgccaccacaccctgctaattttgtatttttagtagagatggggtttctccatgttggccaggatggtctcgaactcctgacctcaggtgattcacctgcctcggcctcccaaagtgctgggattacaggtgtgagccactgttcccggcctggcattttctttaattagaactagatgtctcattgaatggcgcaccaaagtatgaacctcgagactttgtcacaaagggctctgtgaccttgggtagggcacatgacttctttaaaggagtctcctgagggcttcacaccttgctcaaatgggccttccagagctttgcacacccctccccctacccttctctctgaacctgccctttctccacgcaatggccttggctctccaagagtcaccctggccccattgcagcccctgctgctggggcatcctccccggttcattgactccttccttctcttacaccagtgccttacatgcagttgctgatagaaaatacatatttgagcgttgaaggaatgtaaaactccattgctaaaacgaagctagggcctttcttaggatggaggacatgaaagaaaatgccacttccaaagctccacactccatcagattgacaagttagctgggatcagataataatagccatttcatgtcttgattaaaaacctcacacagactccacagaactgttgataaactagagcaaaaggaattcacagttccattcttcttataaaccaaactaaaatgctgactttcgaaatccttttttccgacctcctgatggaaagttttgacaagtgtagcactgaagcatttccccctctctgctagaggagaaatggcaatcttcaaagaccattgttttgttttattcgcttccaattcattcttagtaaacaattgcaggatttctaaaaagaccagaccatagtagttaccagacatgagatgct

SEQ ID NO: 13564 - DNA, 1052 bp, Homo sapiens
tgctatgccttgattattacttatttcaatgggacaaatttgcactagaactacagtatttgttatcactgaatttttcacggttgccatatatatatccagcatcatttgtgtcctactgctgttgaacaactactttaagatcagaaaatagaagtagtttagccagtctaaaaggatttccattcatcgaatcataaatagagaaaaaaacaatcccttctatccattactaaacctctccattccaaatgtcttcaaacaaagcaattatggtggacaagtatttgaggacagttttttctcataaacagctgcatagtgctatagcatccttgttgattagccaattagaataaattctttccacagcacattttaaaagacttaggggaaaaaacaagacttgcaagacttgaagttttcatagaacaatgtgcacccgtcttccgcccacttccccagagagaaatatatgaatcacatagcagtaaatgagtaaagtatcaaaacaggtgctggagactagggagcatgaatcatcttcttccttagatactttgtaaataaaacaggatgtatttatggtaactctgtgcgtaaacttctatttacaatgaattatataaaataaatacaatgtcacacaaagtaaataaaattgaagaatctattaaatatcactttaacaattatattaaattgtttccttaaattgatccaattttgaaagaggaatttgaataggagagatcaacaacaacaaaaattcctcctgtattcaaactttaaggaacgctagctatctattttaatgagtgaataacttatttcccaaaccacattttaagaaagtcaaaaatagttgcatcacatttttcctattgaaaatatacactttgaataacagaaaaataatccgcagataattttttaaagatttttactcagcttagtggtaatagatttctgtttatattaaccttaagaaagagtgttcagaatggagtttggccatttcattatgagttatggatattattgtataaaac

SEQ ID NO: 13565 - DNA, 1045 bp, Homo sapiens
attgagccctgcaggagctagtggggagaggtttacaaggggaaggtggtgggcgaggtcatccaacatggctgaccatgctgaatccagattggccacaacatttaattagcataacagttatcctaactccgtgtgtgtgcatgtaaggcatgaaagaggaaacagtgttctggagggatgcacacgtgtgcccccattcccatatcagaaaaagatcaaaatgggaaactgagttcatcttttttttagttttttgggggggaaccagaagtgtgtagcagtcttggaatccaagttacatgatcaaaaaatcaaaacttttctttggactcaatgtttctcaaaaggaataattgttatccctatagtttaatggaaaaactaaatttgcagactcttatatttctttccaaccctgaaggctatcgccacaaaatagtctaagttttcttttgaaaaaatgtgcttttgtttatgaaattgggtttatggatcatttggggaggcttggctgaaagccaccctgggctgggtgggacaccaggcgtctctgtggtgcccatgccctgtgtctggggggaccctgggcatccttgatgctggtgcctcacaactgggtgggatgccgggcacccatggtgccgatgccctgcgtctgcgtggaaccccaggcgtccgtggggctgatgccctgcgtctgcgtgggaccccaggcgtccgtggggctgatgccgtgcgtctgcgtgggaccccaggcgtccgtggggctgatgccctgcgtctgcgtgggaccccaggcgtccgtggggctcatgccctgcgtctgcgtgggaccccaggcgtccgtggggctgatgccctgcgtctgcgtgggaccccaggcgtccgtggggctgatgccctgcgtctgcgtgggaccccaggcgtccgtggggctgatgccgtgcatctgcgtgggaccccaggcgtcgtggggctgatgccgtgcgtctgcgtgggaccccaggcgtccgtggggctgatgccctgcgtctgcgtggga

SEQ ID NO: 13566 - DNA, 1067 bp, Homo sapiens
cctgctcacctatgacctttcatgaccttggcctctgaggccagggctcttgccctccctgacggctccctggagccggctcctccccttggcccgcaggcccagtggtggcaatcttcagctctaagcactgaattccttaacctccttcacactccccgcaactcaacctatgcctctgaatgtggtcccagtttttaagtatctttagtaaacatcagagtcaaattctgaaccccatgagactatgagtgaacacttgagtcacttagtctgagcctcagttttcccatctaagaaatgggggtcatagtgcccatcagaacaggcagtgtccataaagcaccaagtgtgccacccagctctccccgctgcctgatacccctctccccgccacgctaagaggaatgcggaacaaggaggccctcctctccctcctctgcaggtgacgctggggaatgcagatgtacagaaggcgacgaagctatcaaaggtcttccgggactgccaggacccaagggcttcgcaggcatcaacggggagccggggaggaaaggggacagaggagaccccggccaacacggcctccctgggttcccagggctcaaggtgaggagcaatttcatcatgaagctggcaagacactctgaggcctccccaggtgtcccgttcttgccttttatctcctaagtttacacagcttcagaccggcaacactcatggacccaaggcatggctaaaccattctaaaaacccacataccccaaggcggactttctacatgtccactggtgagactgagaaggggcgctgctgtgggaaccgcagccgacagctcttgaaagagttcaatagggggtcaccacgtgacccagaaatgccactcctggtgtatccccaagagacttgaaagcacgtgtccacacaaacacacatacaccaatgttcacagcagcattcttcaaaataggcagaaggtgaaactatccaaatgtgcgtcacctgatgaatggatcagctaaatctatacagcatctataccacagaatagccctgaccttcacgtg

SEQ ID NO: 13567 - DNA, 1025 bp, Homo sapiens
cccccgcaggtgaaataaataacgatgagtgacacccccgcaggtgaaataaataacgatgagtgacacccccgcaggttttccgggactccgtgggatccgcggcttacacggcttgccaggcaccaagggctttccaggatccccaggtactctgtgccgtcccagccccgagtcccacgcagaggtgtcgagggtggggactctgtgctgagtctgccctccagacttcagggaatggagggtctcagagagcagggtgggcttcctgaagtgctatgcgatcggccgtgaggggcgggtccgggccctgtggtcctgtacgctgctaagatgtgatccctaagaatcggtttctcaaggcagttgctgggttgaatggactcatcaggcttttagacggagagagaaatagagtccttgctttttcagcagcaccgttgggagggtgggatgcacctgcgcccctcaggtgtctggagtgttcactctgcccattgcctgtctgtgatctttcattttgttggcctaaggaagccagcggtttccacctgcccctgggcagttctgatgctggagacagtgatagcgcttgggcacccacaggctgggagccaaaaacaaccaaaatgggtttcctcccagttctggaggctgggatcagcatgccagcgtggtcgggttctggggggggccgcgtcctggctgctcgctgtgtcctcacgagggagagcacccgctctcccctgtcacttcttataagggcagtaaccccatcttggggccccaccctcatgacctggcctaaccctaatcacctcccaaaggcccctgctccaaatgccatcacactggagttagggcttccacttaggaactttggggttggggagaatgacacaatcagtccatagcaaggtgaaccaagggcttcttaccacaggaaaaagaaactaacaactttcatagcactttctggcttattttataaactactgtagcacacatttttccctgaatgggga

SEQ ID NO: 13568 - DNA, 1063 bp, Homo sapiens
tctccttggcccacagtttatagtgattctgtgccgggtcttgtgtgttggtctggaagaaggtgaaaagatttggggttgggctgagcgcggtggctcacacctgtaatcctagcactttgggaggccgaggtgggcagatcacaaggtcaggagatcgagaccaccctggccaacatggtgaaaccccgtctctgctaaaaatacaaaaattagctgggcgtggtggcatgcgcctgtagtcccagctactcaggaggctgacgcaggagaattgcttggaccagggggtcgtaggttgcagtgagccgagattgtaccactgcactccagcctggcgacagagtgagactctgtctcaaaaaaaaaaaaaaaaaagaatttgggttgatggggattcataggatctttttatcttggggaatcccagcatctgctctatcagctaaggcagttacatctactcataaagaaaattccttcaaaagttttgttgagtaaaaagtaaaactgtaagagttaaaagacaaagctcttttgctgtgaaacgctcagtgagctttggactgcagtcagtggaacttgtgacactggtttttctctgctgctgagataattggaaggataaaaatattgagtgccttgtttgaaaaaatactgtttatatttgcaaagatcctttcattctagggagaatgtatgctttattcattgagctctatagaacataccagcatttctctcatagccgagctgttttaaatattaaggtaaaatatataacacaggaagctcttcaagaaaggccaattgaagtgtagctgtttagagacaactcaagatgatgaaaatacattaaatgccactttgaacccaatttaagaggtgtgccatatttagaatgccatttctaggttatttaattaatacccagttgagtgttggaatacagttgggagtaatatgatgaatctgtcagacttctgagcaccccagcggattacaggtgggagcttgctttccagtttgtgaggagagaaaagacctaataatcctaaaggga

SEQ ID NO: 13569 - DNA, 1023 bp, Homo sapiens
gtcccttgtgctgttggtgtcttatctcagaagcttctgcctaacccaaggtttactcctacatgttaagagccttattgttttggttgttactttagctctgcggtgcatgtcgagctgatgctggtgtggtaggaggaggctccagcgtcagtcttttgcttgtgggtgtccagctgttgcagcaccatgtgctggagagactcctttttcctcccaacttgtcatcctccctgacaatccgttgaccctaaatgtgaaggcttatttctggactgttgtttctgttttgttgatctgtacagctgtcctgcaactgcccggtcttgactgctgtggctgtgtaggaagccttgacgtcgaaagcccgagtcctccaaattcgctctttttaaggttgttttggctctcctgggtcccatgcattccagttttggatcagcttgctgatttgtggaataggcagccgcaactttggtagggatgatgttgaaactgaagatcagttgggggaatgtctaacaacattaagtcttctggttcctgggctggctttgaacccacgttgtctgaatctggagcgcaggctcttgaccaatgcacctgtcctcacactgtgctctttgcacactcgttaacagtgtgtcctggagactttttcatggaaggatatgtggatactcattatttttaacagccacatcagaatttatggatctactacagtgtatttagttcatttacactgttttcagctttttcttcatgttaacatcagtggtgtcctgaatctatgtgttttgtgcactcttttgggtgaagttccattgctgaatcagagtaaggacgtttaaatttttgagagatgcccccagatttctccctagtgtaccaaggtttgctttcccatgggtggggacacccttctgcgctgggtgctctgatgctgcaaacctttctaggagacccatgtaacattgcattttccagggtttgaatattcacttttgagtactatttgca

SEQ ID NO: 13570 - DNA, 1167 bp, Homo sapiens
tgaaactcccacggttgcccatggagagctgtgggagcctgggctggagtggaggcagtgctgacaaggagatggggatggcaccaagggagcccaggagggtgcggcggcgggcagacagggggacagtgatttgggtgactcctgggtttctggttgcacaacaggatagatggggcggtcgcctgtgctggagccctgggcgaggcttacctaggtttggggcaaggagatcaggaatggattcagggttgggtgtgtcgttggaggcatccgcatagagctgttggagcttagaggccccctggactgaagcatacacgtgggactcgtagtacagagatatgtactgaagctgaaggacttgtgaggtttcttacagggcagttaaagtgcgaacgtgagaaggccaagggccagccttgggaagggtggagatgaataaccaggtggtgctgatgagcctgaagagagaaactaaggcagggtggtcagaggccattaggagacgggcagtgacctgaggtcaggggacgagagtgctggtgtgtttctgagaggtcaggtgagtgcaattcagaagattgtctgctggcttgggcctgtgctgggtgggaaggagggtgctattcctagctgttctaggacaactggccagcacacacccagagcccacatactggagcaatgcaggcatgcccaggactgaagagggggctgggagggagcctggcagtcgcagaggggagtggaaatgttggaatagagttgtggagtatgagagaggggtggactcagtgagggggtggaccgtgagccctgtggaaacccacccatggaggggtgcatgcacctgtagcaattggcagggaactgagcgggagattagggcactcattaactgtcttgaatgtttggttaagaggaagtgatcttcagtgagggtcagcgtgtttttcttgataaaggaggctctagcaaactgtatccctttcaaccgctttaggggagaatgtctgatattttttctttcctttcccacattttaaagtgtgttcttttccttcctgatggatgcatctggtggtttaaggccaataagtgttgcgttgagcctgaacagttgtttgttactctcaaaatgtctaagactttcatctccagctt

SEQ ID NO: 13571 - DNA, 1040 bp, Homo sapiens
ttttaaaacacctgagcaccataaaatgaaaccacagtattcctgagtagcctggtgaaatgtcgtgattttctcctacagtacagaaggacaaaaatgcctttaatgtcctcaaatgctagagttctagatgacgcattagtttaaatgtcaacgcttaatgtcttcacatgtaatttggaacataagttttcttacagttaaaataatccttagagcaaaaaacaaaataaagtttttcgtatgcctcaggcttcttaaaattttctagtaattggtactgtttctggtttccttagtttcttgccgtgggtaaggtccaaacaccttacatgtgttgctggtggccctcacaattctaccttggactaaagcactagggagtctgtaggcgccttcctgcgctcctccactgcggtggatccacaatttcttctcagctgacttactggttttcatgttaactatttcggttaatcattcatgaagcgcgtggcttatatttgggaaaacattgcaccttaatcccaacatgcataatttatgttgcttaattattttaagtcattgcattagaatagtaactgcgctctccatgagcctaggctagaaagaagggaaaaaatcccaggttctctcccaacgatcaggggttactcaagccgcccgagttctctggggcccctctgggccaggctgcgtccacttgggagaggccgaggacctggcgccaagaggcggcggtgtctgcgctaggggccgagcgggtgcgctgtgtctgcggggccaggccaaggacctggagcagggaggaggccgagcgcggagccgggccttgtcggctgcgtccgcggggctagggtagagaccgaagactggacaggaggaggcggcggtggccgcgcgcggggccaaccggtgggctccctctaccggaccgaggcccagcactgggccagaggaggtggcagctcgccggcaaagcagggtgggctgcgtccgcgggggcgaacacccgacgctatccgaagacgtcccgc

SEQ ID NO: 13572 - DNA, 1042 bp, Homo sapiens
tctccttgtctgtctccctttcttgctcttccttcacctttctcgcagtcttgctcttgcattttatgacttcctggtcattacaaggagctgggaaatgccatgcattatctgggcatacgtggcttagttcactaagttttcctgtagtgctattttgagttcattgtcttgccttagttaaagtagacatctggagggccactttgctccagctttgtgaaaacacaccttctgggtttgccctgctctgtgtccacaccccgtgcctcagctgtgctagcggtctggtccatctgtacgctgggggtcgtaagcagaaaggagaggaaacaccgggaggtccttgcagctcctaggaagcagtttgctgataactcagctaggcgtgcgaggactagaagttgctgacagtcctcgggttggttttgtgcagcacatgtgcttgtgcgtgtcgggtgaaacctaaaagctccatctgttgcctgtgtctcgggatcttgctgtctcctcctcaaccgtcctcctgtgttgggagcatacagcagtgtgaatttgactcttccctgttttaagttgaattaaattagattgtagcctttccacaaggtagatctgccttctgggagtgggacgagcttctctaaattgaatatttgtttgtggtaagctgcttatttcttttcgtaatagttcactgaaatagccactaaggagttgatgggataattcagcagctgtgcactgagggcccctgtgggtcccacactgtcttagaagctctagagtcaaggcccacacttgtatggttcagaatgtacagaggacagacatgttcacaacagaattcctggcgctgatggaagccatgaagaagacagagtgaggggagagtgagggaatgggagagggtgagagagcagggctgccctgtgagactcaaagcctgggagcacctctctgggggccctctcagtcagggtgttgccatgtgagtgtggggaagggcacccaggcagaagagtgcctgggcaaaggctct

SEQ ID NO: 13573 - DNA, 1035 bp, Homo sapiens
atataatgtaataggtagcatcactctttctaatctgtaagtgtataaaacggttatgtatccttagatgccatcacacacatccacgggcctttcctgtgctccagagaagccgcacacctgtcttttcctccctgctcctttagtttgcgatggccttcagatgccaggccaaggaggaaaacctgagcctcctggtgacagggtgtcttcggtctccatccatcagcagtgaccctaaaccctggcgttgcttcgtctcttcatcttctgctttgcccttggcttttctccacctcaatgaagatttctgttaaatcttttgactcctgaagtctctgcttggggcccgtaggtggagatggttaatgatgaggggccctgaggtatcagggagggtgtgcagcttgtgggatcccctcttttcctgggcggcgaggtgcctgctggcttctttcacacctggctcccattgtttttcatgggatttccttgctgtatctggactaagatgatacagatgaaggttgtcaggtaggcactagtggaatgctgacacggagaggagctcagtgtttgggaggattgagtgacttaattgcaagaaaggctgtcttgtgaaataattacctcctgactgaaggagtcatttaagaagcagctccaagtaagactctacattgggctggaaggtcgaagggtgactggctagatgccttcctactataagccaatgactggcactcttgagtaaccattataacctcgtaaaacccctttttgtgaaaaagggaaacagaccgatagacttgtccagctgcagacagtcagtggtggagcgcagctgggagcccaggtccacgtggctgcagaggccggctctacctgtcgccatgctgctgtgcaggtgccattggtggtgtctgcttccccctgtgtgctggaggctttgcaggagccattgcctataaacctttaacatttaggagaaacgtaccccaagacctgtgaatctccaaatttaaaagtaataga

SEQ ID NO: 13574 - DNA, 1099 bp, Homo sapiens
aggatgcaactcagaatgagatggatagaagaaagatgtagggtaagggatgggagcagagtttctaggccctctgggtgcagcacctccgtgctttcagcaacccaaaatctctccaagccctgtccttggtggtttctaatgtaggctctgttaggtagacatgcatgattgactagatcactggacattgctgagtggcatgatctccagccccttgtcctccctttaggttgctggttggggctgaaagttcctgtgatcatggtggtctttgtgacacctagcccccatcctgtaagctgtctaggggccgacccagagttacctcgttagcatagactcgggtatgacggaaaggggttcatgatgggtaacaaaagacacttctgtcactcagaaaattccaggggctttgggagccagggacagtttatctgatatcacaggagagagagcaccctgaggtgggcattggctgtggctggagcctgtgaatggagaggagtggaacagtaggagcccggacgggcaggcgagatcaggtcctggagactttgattggatcttaggtgactgtcaagagtagttggaagccgctgatggatttgaagcttggcagtatcatagtcggcactcttctgtaaaaggaaccgtatgctctgtgatgagtggtctgggtggggcagagggcaggaggacacagagactccagaaaggaggatattgaattttgtcgagattcttttccgtgttaaataaatatccgttaccttaaaagccactgacttataatcattcagtggtaattttgtggaggtgtttataaaagttacttagcaagtctgtttttgcttaggcattgtagttagtgcttctgggatccacggctggttgtaggcagcgtcttctcccagaaccactctgaaccaggaagtaggtcactactttcacatacactcatgcctgcatgcattcattctcccggaaccactctgaaccaggaagtgtgggtcaccaccttcacatacactcatgcatgcatgcattcattctgtttttgtttttcccccagaatgaccctatgcctagaattctt

SEQ ID NO: 13575 - DNA, 1094 bp, Homo sapiens
aaaaaaaaaaagaagacccattgtgctgggaatgcttgagtctgaggagagaaaacggtgggtggtgggatttggcacctctgtcacagcgttacttcctgtgcttttctgtctccacagctattataggacgtactgataacagctcagtaaattttcttaaattgatgagaacaggaacagtctttttgagcctcggttaacagttactaagaaatgaataaaaaatggttgaaaaacagggagaagaccaagttagcataaattttgagtgctctgtgttttgaacatgaggtttttcctaatacttgtgacttgctgattctcctgactatgactttctccagccagtacttagccgcggagcggaaagcagtgctcatgaaggtggaggcacacccagagactgcatggaggtggaaccgggaagtccggggtctgaggtcctgcctgcagggttgaaaggcatgcctgccagcagacacatttgggagccagagtgtgctgtggtctgaatgtgtttccccagatcatctgttactacagatgatcaccaattggatggtattaaaaggtgggccttggaggtgggtaggttgtgaggatgcagccctcatgaataggatcagcagccttgtaacagctgtgagggagctgttttgccccttccccgctgtgaggatgcaataggggaccacctgcgggtgccttgatcttaggcttccaacctccagagctgtgggcagtgcatttctgttgttggaaaattacccagtccgcggtgttctgttcccagcaggggcggactgaggccgtgtgcttatcggtggggacagcagagcagaagcagtgtccccatgagttgtaggcctggaccttagacccaggctccagccacctttgtgttggatgctgacgtctttcatttttttttgcattcctctgtcattttggtcacgtacctgctctgggaacttcccgaggagcaagtgcatgccaggcagttaatccatgtgaatgctcacggttgactcagatggagacagttagaggaagcgatttccacccccgtttcaaggggtgcttcagtgttt

SEQ ID NO: 13576 - DNA, 1029 bp, Homo sapiens
atagttaatcacagagctgaactctttaaccaaatatagtttcaagatgttacacaggctaattgtgagtccaggatcttttaatcagtccgtttactttcttaccttttgttttttgaagaatttggaagtccttctctttacctatatgttaaagctctctcataatcatatgttaagacttaatacagaatttatcataattgtttccatttaatttacctgataaaacttgatagaaatacctaaacgagaaatatcatgtaatgtttcatagggcctagtataaataagtgaagtatttgtgctcacatttgttaagtagatgttttttaagaaatgttttggatttctttttttgtattaggaaaagaatgaaagatatcttctactcttcccaaatgttttgctaatgttgtctgccagtcctaggatgagtggctttatctatcaggtaaaacacaatttaaatttatattttattgtggatctgaggataatttcaaactggctttgaattttgtgttaaatattacgtgtatctatctgtgtatgtgctgtgtgtgtagtgctgtatattcagatatggacgtacagctcctgtttgtgtttcgttgtgactgcaagcatatcctatgttaatttcaaaaaaggaaagaagtgtaaactgtagagcaacctcataaggacacagactactgtggcacaagtcagtctctgtcattgccttctgtcgtttcatgcaaaataccttgctcctccttgctatggttttattctgtgaaattggttcaagtagggcttgtgggttagtggggtagtgtagactaagatcttgtgtcagtggcacggcaccgcccaaatgcatcagcaaacagaaagtgatgtaagggtgtaagtagcagtgtgtgatcgttgaacctttttaatttttgtttccctgcttctctttgagaaaatgtgacagcagatttgggaaggaggtgcaagggtgagcagggccttttctgttgcgacagtggtttatag

SEQ ID NO: 13577 - DNA, 1028 bp, Homo sapiens
caccgatgttcagaggggctaggttaaacacagttgtgcggtttcattttctgtaggacttacagctgttaaagtacttatatgcattacgaatcttggaaaggagttcacagtgtgtagcattttttaaatacgcttggccacagaagtgtccagcagtctcctcttccaccggccatgctttaggatgagatttctcagcctgggcactgctgacgttctggactggatcgttcatggccaggggctgggggtctcggtgagactgtcctgggcactgtagggtatcagcagcctctctggcccttacttgctggaggtctgagcccctgccaggttgtggcactgccacccattctctgtgggggcacgttccccacaccagttgagcagcactccgtctggaggtgcttatgtagaatcctgctccgcagctgatggagtgctccccaggcagcgctgcccagacgcccactgcctcttcctgcggacttggtgggccaccatgtactgtggtttctgtcagctgtgccaggatgttttgtgttcacttctgacttgtttgtaatgatcactttgtaccccctttctggtatctttccattgacatttcctggtgcagttaccgatttcttctgttttcagggagcactggtttgccaaccattttgtgcattgtgtgcagcatttagcacaactacttattttctgttttacaaagtagaatgttatgaaattcttgttcttgcctcaatttcccacccttattttgactttaaacttggaacttcctctgcatttctttacgaggaaaatacatggttcttttctgcaaaaacatcatttaaaacaactgttatacacggtagttttttaaaaatcataatgtgtgatgtcttttgtcctggtgtctatgtttagtagcagctcatcagatacagtgtgtgtttgggcttgtcactctgtcccttgtcgccagttgagtttcttgcttacagtacagtattataatttattatttgagataa

SEQ ID NO: 13578 - DNA, 1183 bp, Homo sapiens
gtgcaaaacacttgcttcacatttctctgcagatctttggccctcttcgtgcagtagtgaattgttttccaatgagtgttctcgagaaacaaccctgaattgtgcctcctcacgcacagttcagaggtgcttgggtgggaagctgcttctgctccgtgtggccctagaagactgatttaggggagttttacactcaactatagatgatttttctgagaattttaactgtttattatgcttcatttaagaaaacaaaaaataaatgattatgatgatgaaaagggccagactcatgttgaaggcattaaaagaatttatgacacactgttgattttaagaaattgaggtgtcttttacttagaaaagctcaacaagtctttggatatttagagacttttttttttttttttttttttttttttacaacttttcagaatagatgaacactgaagcttcagtgtttaaacctctcctggtgttttgtgctcaagaagttggtatcgggttgttttaacagtcgtcatctttatcaagtaatacggaaaaactgggcagagcttttaaagaatgaatgacgatgacacaggcgttttctgcttacagatttcctcacatccttattaggctattaggatcagctctgtcgtgtgctcagttttcatgttttcttcttcatgtgaaggttgtagctcaagaaggattgctgtactctgatattctcatcagagtttcagagtccatctgatttctttcagcagtaaagattgtaactactcattggcttttagctagcatttcatttttaatggctctaccattttaaaattctccattctttcatggagatcagtttatcccagggacgtgtgtgtacacgtgtgtttataaagaacagtggatgagctgcttcactcaggttttcaacagcagcctgaaactctacttcatacaattttatatcaagtcagcttttctctgtggccagaccctccgtcttagtgtttctttcactggtggctgggaaggcatcccttcagcggggaaggcactgtgcctcatgtttaaaatgttctgcattctcctacagagtttcttgtgtgggatgatgtattctgtgatccaactctgaccagctgaaatcattttctaattttagcataaagcatacttcctttgacttttt

SEQ ID NO: 13579 - DNA, 1046 bp, Homo sapiens
agggaagaaaattgggataaaactgttgggcaaagaagtagaaagggcaacggaaggggtattgaagtgaagataaacaattttttttgataagtctggctgcatttgctttgccaactccacactgggagagaagggctcacaccgagcagctgccgtccagtgttgctgagcaccgcccagcagtagcgtggagagtgatcttgcagggtgtgagaagaggacatggaggctcgtggaggccgctctgcagcccgctctgcctggctctggctcaggtgtgctgtgtgctctgtgaccctctgcgcctgcaggtgccctcggagcacgtgaggggcgggcgttggctcttcaaggctctccatctcaatttgcttcgaattagggaagccatgagcacatgtgtataaatgtgtcttctggaacagattgctgctgcatttctaagagctttccaattttttatagaaatacttttgtttaactttttgaaggctattttagattcagagtttgttacgtggctgtattgggtgatgctggggtttgggcttctggggtacctattacccaaataggaaacattgtacccaatgggtagcttttcaaaactcacccccatcaccttccgccttttggagtccccagggtctgtcatttccatggtcatgtccatgtgtacccattgtttagctcccaagaaaagacttttaaagataattttaaaaaccaagctttgtttcctctgtttccagcctggttcattccatagcacatctcatcttctgagtcttggtctcgcgtttagcattcgtgatggtttatgtcgttggggtgatgcagaaaccagcctttttttgatatcggtatttaacacgtgcttgacagttgacaccttacctgctctgttgggacttgctttgctcactttgttttttgccgtcgtcttctgtgcttgtttgaaaagctgtttgaagaggtaaggggtgggccattccgttgtgaacactctgagctggtgtgcatgtggcccctgcacagcagcc

SEQ ID NO: 13580 - DNA, 1071 bp, Homo sapiens
aggtttaagccatcaccaggcctttgcaaatggcctaaatggtgttccctttgaaataacgcttgccacaagtatataataagctatattaattgtgttttgcataaaattgccaaaacacagtaatgtgtatatagtggtataagatcttgaaaaaaatctctataattgtgctctttatctgtgaatgggaaaagccatttttagtaggtgactaccatttgaaaaactcaattggatgtatatctgaatgttgcattgtattgtacagtatgcatattattgtttgtggttgcatatggcaatgaagtgtttgttttatattaaaaaaaacctgttatgtacagttgaaataaattttgcatttgctagcccgtggcttttaatatttgttacatgggggaggggaatagcatagtttgcagtgtaatataatttggctcttctacctgaacggaacatcttccaaaggcaggcaggtgatagatagaacccttctgtctgccctgatagaaaagcttgcactctcttagattagccgtgttctggacaagacgaagtcactccttgtacatttcttatttcatctctttcccgtttcttaagaagctttcagtcactggcgggtttgtcttcagaaagaagcattattttttgtgtgtgcgcataaatgggaaaaagcacaactttaaaatgtttttatttagactaaggccagtttttaatttttgttttataaagtgcttatccagctaagagagtaatgaagcaaaataaagggaaaggaaacgaagtacctggtggcaggtatagtgataggacaaggtgcagacagtaaatgtagaaaactctctcagcacaagttgggagttttcctaagaaaagtaaattagacccttagagccataaataacaaaatggcctagatgacttttggagagagattactaaatcgtttttaagtgtagttgtattttgctccactgtgaatgttatttgattttcagttgattagagatgcagattttagaaaagataatgaatttaagaaggtgaattatcctgcacatg

SEQ ID NO: 13581 - DNA, 1053 bp, Homo sapiens
gagaagctggtgaggaaagtcctgaagaacatgaatgatcctgcctgggatgagaccaatctataagggatgtcctcagttctttctgttgaagaccagttctgaggtgaagctgggcacccctgacccaagtcggggtgcactcaggaccacagggcagggctgggtggggcgccaccttgctctctgtatatagaaaagctggagcttattctgcgaatggagacgatcaaaccatgactgatgaatccagacaggagggattgactctgaggacctgagctacatcaatccactctgtgaacatctcagttacctcattctgcaataagttcagtgactgactaaaagtcttgtttttccagactttgaattgaatatataaatattatatatacatgtttcttgtaaatatcccattttgaatgcatacctgtggtggttctgtccgggctaatccccatgctagaatgtcctttccagctacgtgaataagaagtcccatgcccgcatccaccggaagcagaagcctggtggatgcctggttcgttccgcagcaccagggcctccaccgtgctgtggcagcaccccccatgtcggtatttctaaataaccttatttatacctgcagagatacacttcagtcccattcagaagtcttctcttaaagcagcattacagtcccagacctgcgggtttctgagggcaacttgctggctgacagactcagtcttgacctcaaggaaggcccatacggcactgccgcatccacctagaggtgtttgctcttgtccgctgtctgagtactgtgattctcagatgagtttgctgcgttttgggaggacacagacggttctgtataggctagttcagtaacaacaaaatacactgttttgtcttccctcaaagagagatcttactagaacctgtaaatagaatgtattatttattataagtcactgcagctgatgaaaacagatggaggccatgctgcaggctgatactgatgggtggagttttgtcatcaggccagcctcatcccgaggtctcctc

SEQ ID NO: 13582 - DNA, 1035 bp, Homo sapiens
agctgggccaggtgtggtgatgcacacctgtggtcccatctacttgagaggccgaggtgggaggatcagatcccctgagcccaggagttcgaagccaacctgggcaacatagcaagaccctgtctctgatacatacgtaaataaaataaaagttaaaactcaaaggggaggaacctgagatccaattttaaatccacctgatgagaaaaaaaaaaaagcagcccagggacgtcaccgtaaacaggcaccgcatccaccaggggtcaggagtcaggtcagggctctggactgggaggggcactgcagggacatcccgtcagcgggcaccgtgcgttgagccaggggtcagggctttggaccgggcaagactctgttttgcttccattttttaagcctctggaagtcctggctgttcagaattccaggcttgaattgctagtgttcccgggactgggaaacagcccggatgtgtggagtaagaggcagctcttggattgctgtgaacgtaggggagcaaggctccacgccctctcccagcctctctgccttctgaatacagcccaggagcctggatgactcactttctggagcacatagataaggagcgggtggaggggagaggccttagttaattaacattcctaggaatctgaggctccttctcccagccctgttgtctgggtagcaacgtgctgaacccagagtgagaacagctggctgcagtgtcaggggcaggaccttttgtcgatgagtttaaaaaacaaagcagaagctgccaggtgcctccttcgcatgttggctcccacgtgttttccccgttctccctccccaccctgagtgacacacgctatgctgcttgaaaatagcacagatgcattttgcttcacggtgaaatgtggccggtagttccccaggagtaaacaatgtggtggtgcccacgggggaagagcagcttaattatgcacccagccccgcatacaaaacgctccctccatggttagaatttgctggggctaagggagtcagggctggttt

SEQ ID NO: 13583 - DNA, 1026 bp, Homo sapiens
cctgtccttgtctaggcctctgagacaggcccgaaggacaggcttttctctctactgtgggtgatggtcccggctggtcagctagcgtccacagcccctcgactccctgcgcagagcccctctcactggaccggcgtcagtgccccacagagactggaaacctgtttccaaggtgtggctctatggccggaccacagtcggtgaggtgagggccagttccagccagggtgccacctctgccttttcttatgtccactggaaaaaataaagagggtgtttgtcatcccctgtcttttgggactcggggttcagtgcaggccaggggaggttgtgtctctggtgtttgctgaacacaaagcgtatgaaagtggtaacacctcggaggtgagggctttctttttatagcagccatgctggaactcagtgtctgaggagacctagagtatttgtttgaatgtttgaaagagacgtatctggttaatgtgagcagaggcttggaaatttagagcacgctcgactgtatttcagtagacttatgacagcagctacacatccatccattttagcattctcagagtattctaaaacatggagggctgggcacggtggctcacacctggaatcccagcactttgggaggctgaggcaggcggatcacaaggtcaggagtttgagaccggcctggccaacatggtgaaaccccgtctctactaaaaatacaaaaatttgctgggcatggtggtgggcgcctgtaatcccagctactcaggaggctgagacaggagaattgcttgaacctgggaggcggaggttgcagtgagccaagatcatgccattgcactttagcctgggtgacagagcaagactccgtctctaaaaaaaataaataaaaacatggagttcacaaagtggcatgaataatcatgaaacgaagtgacttcaaagtgtaatggttctcatgcatgtaagaattcatgttattaaacaagtataaataaaaaaattgtgcactgcataagtgacaga

SEQ ID NO: 13584 - DNA, 1730 bp, Homo sapiens
agcctcctgagtagctgggattacaggtgcccacaccacgcccagataatttttgtatttgtagtagagacagggtttcaccatgttggccaggctggtctggaactcctgacctccagtgatccaccctcctcagcctccaaaatgctccagtgatccgcctgccttagcctcccaaagtgctgggattacaggcatgagctactgtgtccggcctcctatacagtctttcttagataaaacaggaagggttagctttattactaaagaaaacagattagctttattactaaagaaaacagaaatgccatctaagcagaaatagaaactaagtatcagaactcccttgatgactgcgccacacacttcattcccactccattcccagccaggagtccacagcccaagtctcattccagccagctgaggttctgtagttgataatcaattgcacggcactcactagttttctgttttatttatgagtaaagttttaagtgtgacgatgtaagtgaaaattcaagagtgggaactggatgtgaatcaactcattgcctatcgatggcccagcaggtactgctgtccccaaggaaggtgcgggaggagacagtaggtgtcacttatgttcatggctgtcccacgaggcctgtcacgtcctatcctatgagatccatcacatcttatcctgtgagacttacaacaacctatgctacgaacatatcacatcctatccttcaaaaaatatcccatcttgccctacaagcctctaggagcaggtgcagaagtgcacgtgaggaagggagcagtggcctgaggggtgcatgggacagtggcagtcccagcagtgtgtggggtaaacctactagatggtggagaaatgggggcgggggggggcaggtggcccatgttccggtgtgggaaggcatagcgtgcgggcactggcctccccaggtgagacagtggcccgcagcggcatcctgtgcatacctgcacctacggtgttgtgcagtgagtaaaaggctccggcatgagttcggtcctgtcgggaagttggttgggagttttagggacgtggcaataactgcgtcccaagcagctcctccattcagggcccgtgacggtctggagtcggaggagccacagaccaccttctggttcctccattgcactcaggtgggcaactttaaacgtttctaagttaaaacaaagtctaacttactgtagaatagaatgaaaacttggcataaaaatgtaagaatatatacaaaaactaaaagaaataatgtgttgtagtgggtgattagaggtcctgggccagtgagtctctctctccccatcctcttctttcctactccctgcttccctctctctccagctgtgtctctctccatctctctctctccagctctgtctctctccagctccatctctctccagctccatctctctccagctgcatctctctgcattttctcttctggcctttgtggttaaacttgagaataaaaataaaagcacttacaaatttattttatgaccatatctgcctctagtttgtttgtttgtttatttattttgagacagagtctcgctttgttgcccaggccggagtggagtggtgcgatctcggctcactgcaacctccccctcccaggttcaagcgattcttacgcctcatcctcccgagtatctgggactgcaggcgcacgccaccatgcctggctagtttt

SEQ ID NO: 13585 - DNA, 1064 bp, Homo sapiens
gcttccctggactgctaggaggcggcgatggcgagtcaggaggaagcctatttttagaaacgcttaagtgcccacgatcttctgaccatcaaacaagaaacgttgctgtttgaagctatacacggacggcagaacaagaagtggctgtgtcactggatacctgtacatttgaataccggccattagggagaatcgccctgtaaacattgatccagtgattgaggccggtcggcttgcttctgttctgccccgcggtgtaattcagctaataggttttgtttgtctcagctgaaatgtgaaacttccattaggtgtctaaccctggctaaaagtggttttcagcctatttttaaaaaatctcctttgtccctgcatgcattctaaccccattctaacctgatgcgggcagccacaacccaggccctaacagagttcatggtaaggatggtgaaggcgtgacccacggtggaaagttggttattttgggtaatccagcgattttctgattgaacttcgaatgcggaaacatcttgcccttactggggcaacgaggggaggcaaggcgtgcgccaggcagagacaccttggaatcccacccagcccagatgtgtctcctgggttctgggacgggcgcaggtgactgtatttgcgctggtgggaggagttgcccccttggttaaatccggaggacacagctgcatggtgcttgccctcagccgtttctctcttcttactttgagaataatctcttttttttctagtttctcttttcttaggcatactcctttggaaacttactgggctcacttttacccactatgagaccctatctgtcatgagtagtgcaaggttagagataaccaggtccacatgcacttgtgtctttctgtagtgtgaggcctttgttgacgttatttcagtcacaaaagccgggaactgctggtgcttcccgtcactcgggtagtcccagccgcgggcacacaggctcaagccactcctcacatcagtcaatgttgtaaaccatagtaatagtatacctaatcaatacataaatgttataaaca

SEQ ID NO: 13586 - DNA, 1045 bp, Homo sapiens
ctcacccttcagacacacagtccagatctgctatgccttcctcacccggcagacacacagtccagatctgcaatgccttcctcatccttcagacacacagtccagacctgtgatgccttcctcacccttcagacacacagcccaggccactgagatgccttcctcactgatgaaataaaatggatacagacacaaactagaccatgacctttaattaaaaacccacatgatcaactttctgtgattgatttttactttagtttttgaaacattgttgccacttttgctttatttgtcctcatgctttgatgatctgggcagcgccttggttctgttgatcaggaagctctcagaactcgattacctggttcataaaacgcctagatttagatcaaagcttctcacaggagtacttcccacttggccacgctcacagaacactccaactcgtcgtcttggtctgaatcaaagataaccttgttacaggtgtttgtctgtgtttttgctgcggaagttagaacattgaaacctgacctggtctttccttggtcccagcagaatgtctggcaagagtcttttcctgaaaccgtgtccacatccccgtgtcttcctgtgaatagatgagcagcttgagggaagcggtcccacaggacgggcaagctttcacggaggggctttccattgaccatcctttctgctttgtcctgtaggttggggacattgtcatggttaaggaggacgagacctttccctgcgacttgatcttcctttccagcaaccggggagatgggacgtgccacgtcaccaccgccagcttggatggagaatccagccataaagtaaggggccttttcattagactccagggcaggatcttcctgtcctgcttcggactgtgcccatgcggccacagaaactaacatcctgtttgaaaagtcaccgttttcatgtaacccagggagttacaccagccatgtttttcctcacttttccttcctcctattttccactttcttctttttcctttttaaaaataaattgtatt

SEQ ID NO: 13587 - DNA, 1027 bp, Homo sapiens
ttcctgggaacagtctgttcctttcaggccatgccttcgtgatgtccagcagacccacagcagtgcctgccccgggtggtgctccccagactgccaggccctgagcgctgtgcctggtgagtggccatgcctcctggcagcaggctgtcccaccctcctcctaatggcttgttgctggcctccaggagcttcctcacagttgcaggtgcttgaggggccgtccacagcctctggcatccactccatcctaggaactctggtgcttgttcccttgacacccaggtctgccccataactcagggaattcactggctccggctacgttcccctgcccgagcctcggcctggaagctctccgggtagtgagctgggcacttgcagggccccctcggttggcagcattttattttgaaataattacagatttaggagaagttaaaataagtagaaagacagtccagaggggcctgtgtgtccttcgagtccagttaatttctcctttcgctggctgtgcttgctgtcatatcgaagaaactgctatgaaatccaagatgatgaagatttgccaccactgtgtttttttctataagttttctagttttagctcttaaatgtaggagtgtaatccatgtttggctaatttttgcatctttcataaagtgagggtcctactttatttccctgcatgcagttatccagttttcccagcaccatttggtgaagactctcctctcccactgagtgatactgacactcttgctgaaaagcatttgattacggtacctggaggtttatttctgggctctctgttccatcccattttctctatgtctgtctttatcccagttcccgctgttttgattactgtcagtttctagcaggctttgaaaccaggatatgtgagtctttcaactttgttcttctgttataaaatggtttggctattctgaacctcttgagatttaataggaattttaggatgggctttttcatttgtgcagaaaatgccactgggggccaggtacgg

SEQ ID NO: 13588 - DNA, 1074 bp, Homo sapiens
tgtcatgtattgcattgactttcatatgttgactcacttttgcattcctggaataaaccccacttggtcgtggtgtatgatcctctatgtgccattggattcagtttgctagtattttgttgagcatatttgcatctatatttctaagggatattgttctacagttttcttgtagggtatttgtctggctttgttttatgtgctgtgtccagggttttcgtagtacttagcaggaggaatagagaaaagtatttctgttctgtgttaccacaagagaaagtccctgattgacttttaaaagcagcgacatatttatttccaaaagcttctgcttatcactcacagcaacctaagttctgggaccattttgggttattatcctgtaaaaccattttcttgttatgtaatttttctggtttcagactgaagctatatatcttgtatgttttattgcctcttaggaaaagtcagagaattcattctgcaattcgcatttatgtctccaatctgtaacttgatcaacaggtgcacaaaagatctaatttcaaccacttatttattcagcaaacgttgttgagttttggctgtgtgccagggattcagtggtgaagtcagacacagtgcccacagccagagaacccagtgcctaacaatagaggcaaacccgtgagcagaaagctgcaaggtcgtgtgctcagcaggaggtgaggctggggtggctgagcagcgtctgttcagtgctactttcctctgagacgggtccactggcttctcacttattcttgaccaggagacaatatctggaggatgggaaggaaggagttccagaatgttcctggagaacaggactcaggcacacatagaccctgtcttgtgttctgacttcttcaactccccctttcccaacttctggcttttgagagctcaagggccatgacagccgttgacccagtggcaattctgtccacaccagttaagaggtcggaactagtgataaatatgagccttccctgagagttaggagacgcttcatctcatagaacggaaaacattgtttcaactcttacaaaccag

SEQ ID NO: 13589 - DNA, 1177 bp, Homo sapiens
aatgccagctgtgagggagtttttgtgctcagtttgagaccttgggacgtctgttgtggctgagagcattgagcagggccagcgtcaggagcgggcagcaagttgcagataggcaggctctgagcccatcaccaagccacagaactggtggtgggagatgcagccgggaaatgggggcgtcctgccgtgctctggggagttgctgcatcttcttttacgggataataagaaaatatagtgcttatatctttggggtttgaagtgttggcacacaagaaaaatgaggtgtattttctaaaactcttgattgtgaaagagaaaaaaaaatacataaaaacgagatgacttggactattttccccaaacagatatttggaaactggacgtttggaacgctggtattcaccgtgatggtgttcacagttacactaaaggtaagtggtctcgcgctcacgttcctcccccagccacagtgaacccctgcagtgtaggcctcacgcgctctgagctctctgaattataactctgtactgaggctggaagccactctccacccagccttggctggctcctggggcacccctgggcatccttgtcctgctgtttagacaagtaatgcacagccactcagcacacccggccaccccatgtgcaaaccccagagctacaccggaggtaacctcgggagcaagctgcttctttgtgaaagaattcaggctagaattgttttcagtggcaagtagccctccccccagcgccatcaaaatacactttaattgaaacaaattaatgtattttgaaaaatttcactctttaaagttcagtgaaattatatacagaatatatcattatgaaatctcaaaacctatcagactgagtcttaaaaagtgataccaaaacattcctaaggtgattttcttagatagtgatgtaaacaacacctgactctaaagtaactttctggccaggcatagtggctcacacctgtagttccaacactttgggaggccaaggtggatggatcacctgaggtcagcagttcgagaccagcctggccaacatggcaaaaccccatctttactaaaaacacaaaaagtagccgggcatggtggcacgcgcctgtaatcccagctacttgggaggctgaggcacgagaatcgcttgaacccgggaggtg

SEQ ID NO: 13590 - DNA, 1028 bp, Homo sapiens
acgcaggagggacattctgctggcccaccctgcgcgctgtcatgcagaggccattcccccaggcctgtgtcttcacccacctgccatcattggcctttgctgtcactgggagagaagagccgtccagggacccatggtggcccacatgtggatgccacatgctgctgtttcctgcttgcccggccaccacccatgccctccatagggtgaggtggagccatggtggtgcgtcctttactcaacaaccctccaatccggatgctgtgggaagggccgggtcactcggataccatcatccctgcggatgcaccgccgtaccctgctcatctgggagtggtttccctgcggttacgtccaagcccgcctgccctgtgtgttggggctggctgagtttcggtctccccatcaccggccgcctcgtggagaaggcagtgccacgtgggaggacaaggccacgccggcagcttccagccctgccgcagaagtgccaggatgtccatcagccactcgccagggcacggagccgtcagtccactgttacgggagaatgttgatttcgcgggtgcgagggccgggagacagatacttggctgtgatgagcagacatcctctgtccccgtggaggggtcaacaccaaggtggtgttcgtgcaccagaacctgtctcgggctgacgggggtggcacacaggacacgggtggatcccaacaggcagcaccgcacctctgcccgcctcccgcactgcagctccgcccgccgggctctgcgtccccacgtcccctcgtcccatccccacgtcccctcatcccgtcacctcgtccccacatccccttgccccgtcacctcgtcctcatgtccccttgtcctgtcacctcgtccccacgtcccctcgtctcctcatccccacgtcctctcgtccccttgtcccgtccccacataccctcgtccccatgtccccacgcagggctctccttcgtcttaggatctgtccagcgctgctctgggtgggttagcaaccccagggctgct

SEQ ID NO: 13591 - DNA, 1138 bp, Homo sapiens
atgattcacacccagtccctgccacagaccgtctcagacacgcacagtgggcctgctgcatgattcacacccagtccctgccacagaccgtctcagacacgcacagtgggcctgctgcatgcgtgttacctggcttttggctccacgctcactcatagccatgtccacatgggggcttgcacacaggatcactcacatatgtacatgtacccaccacaaacgtgcaagctcctgcacacatgcatgcacacaaacgtgtacacaagtgtgagctcctacacgcatacacacacacacgtgtacatgcaccaaagcatgtgtgacctacagacatgcagaacatgcacgtgtacacataccacagacacgcgtgtgcatgctcctacacaatacatatgcacatatcatgaacagcgtaagttcctacacacggacgtgtgatacacacatgcatgtacaggtaagcacacatgtacaagctcctacaggcttgctctcacacacgtgtatgcacagcagagagacgtatgagcttctactgcacacatgcacacacacacgcacacgtacattcactacaaacgtgcagcctcctgcacacgtgcacattcatgtgtacaccacaaatgagttcccagacgtgtaaacacacgtgcacacatcgtacacatgtgagctcccacacgtacacacagatgcacatggacacaccccaaacacgcacaggctcctacacacatgcacacacgtgtacaccacaaacgagctcccagacatgtaaacacacgtctcccacacgtgagctcccacacgtacacatgcacatgtacgcaccacaaacacatgcgcaggctcctgcaggcgtgaatacacacatgcacacacatatacacacatgtgccacaaacaagtgcacactgtcctggtgtcctgcactgcatcctgcctccttgctgaggggcccctgtgagaggcctctggatgggcatgggaagatgggctccctggcccccagcccatgcctccctgggatgaagagtccccctcctggcagaatgtctgggctttgcagagcaggccccgggggtgaagtcgcagcttcacttacaccagctgctctgtgagcaaggcttggtgc

SEQ ID NO: 13592 - DNA, 1032 bp, Homo sapiens
tgacagcatccctctggcatcccaatgcaggttcctgagtcccaccacagagcttcccgcctcacagatggaacagggccctgcgtcttcggcaggtactcagtggtgtttctaggttccaacttgagtcatcagtggattccctgtggagggtccttcaggggacagcagggcactggtcaggggccatgcaggctgagagcccaccctgagaggaggccaggccggcagagcacagggccccagctcggagtgcgggtggcagagtctttagtgcgtggccagctggaagcagcagtggcactttgagaatttcaagtcttgtccaggggccttggtggcctctgactcacatggcctgttcatggcaacccccgctttgggaaagctacatcatgagggtcgctcctggcgtcctaaagtgaacctctccgagctttcagccaacggtaggatacgggacacggtatggccaccgagaagcttttggacatctgtgagggccaccatcgtgaacgtggtggtcaggagcccagcatgaaccggactcagttgagcatcagggctgccccagccggctctgcggggttcacaggaagcccactcctcctccccagccatgcctgggatctcctcggagccctgaaaggtcgtccccatggggttccacagcagggacaatgatggctcaagcggccattggaaccagagctgggaagctgtgggacgtcccggatgaaatgtaggatgtaagtccctgttgggggccatgcagccccacctgttgagaaagtgaagagcattactgacatttccatcatgatgtaaggaaatcaaagcacatctagtgagaaagtgatgctgtggagaccggagagggtaaccgtgttttcttcgcagtcaccatcttcacttttcattcattaaagaaatggcagaaagaaagcagaactgactcctgtggggacaggcccacttctgtgtccaggtgggcagactagagtgaggcagagacatggcaggtggagccgt

SEQ ID NO: 13593 - DNA, 1044 bp, Homo sapiens
ggtatgaaatatactcacactgttgtacaaccaccaccagtgtccatcttcagaactttctcatcttctctgaaactctgtccccattaaacacccgctcccattccccctgttggaaataagaactcggagttgcaaagaaaacgagcacgtaaataaaggatttctcaacaaggcaaatttacttctgcagaagggtgctgctcactcttctggtcgctgcaagagcacaccgaacaaaggaggagagggggttttatccctaacgcagccagtccctgctactgtgtccagtccccattggctggagtcagactacacaatctcagctgatcctgattggctacttcaaatggaacaggggtgggggctacagtggtgggaagagcagtttcagaactaaaggcaccaaataaggaatagatgtgggttgttacagattgggaatggatgtgggttacagattgggaacggcacgaagtttgtttaccgtaactaggggcaaggaggcaaggaagttaggctttgagcataaaggacaaagacgagggatttgaacaagtggaacttttgaagaggatctcactgtatccaacacccctgcccccagctcgacacccaccatcctactttctttctctatgaaatggacaactctagggagctcatgtaactggaggttattacactgggcataacattctgaggttcatctgtgttgtaccgtgtgacacaatttccttcctttttaaggctgagtaatattccatagtgtgggtggaccacatttgtttcttcacacattcatccacggacgtttgggtcacagccgcctctgctattgtgaataacactcctatgaacacagtgtgcaaatacctgtgcaggcccctgctttcaggccttggggttgcctccccagaagtggaattgccgcatcatgcaagtatttattttgaaaccatgatagaaggtgattccccctggttctacctttattttcctgctgggcgatgaacagtgtcccgtccaacttccctgttc

SEQ ID NO: 13594 - DNA, 1033 bp, Homo sapiens
tgtgcctgcagaattagcaccacgtggactctgccaaggatgactgcttgcatcctctggacacctgagccatagctgtgtgaccaaggagtgctgtgccagaatgtggagaatagagacctcagatggctgtgggcagtgaggttgcatgggtgtcctgggcttctctccctaaactattctgtgctgtgatgggcatggcaaccctgaagatctccgaaatgcccttggggccgttagtccataatctttatgaataacaccaggcttccttcaatccatactaatcttatgaaagtaggccacactgttggttttcttccctaaatactctttgttgttctttacatggccaagctgagaatttttaaatctttatattctgcttcccttttaattataaattttgtccttaaataattttctgttctcaaattttaccataagcagttaaggaaaactattctgaatactttgctgcttagagatttcttctgccaaattatcttagttcatcactcttaagctctgccttccacaaagtcctaggacatggacacaattcagtcaagttttttgccactttgtaacaaagaaaatgaaaatacagcatatcaaaatttatggaacacatctaaagcagtactgagaggggaatttttagcactaaaatgcatgcaatagaaaataggaaaagtctcaaatcaatctcagcttctacctcaagaacttcttgtctacctctctagaaaatgaagagcaaaataaacccaaagaaaagcagaaggaaggaaataactgaaatcaatgaaataaaacacagaaaagtggctgggcatggtcactcatgcctgtaatctcagcactttgggaggccaaggtgggtggatcacctgaggccaggagttcgagaccagcctgaccaatatggtgaaaccccgtctctactaaaaatacaaaaattagccaggcgtggtggcatgcacctgtagtcccagctactcatgaggcacaggagaattgcctgaacctg

SEQ ID NO: 13595 - DNA, 1050 bp, Homo sapiens
atggtacacggatgctctgttggacgctggaatgctggtgcattgttgccggatgctggaatggtgcacgcatgctctgttggacgctggaatgctggcgcatgtgcacatgttattggcatgagctgtagttcaaacctcagccatatgatgcttgaattcccaaaccattcgtggaaatgtgtacttcttcctgctggaattctctctctctctctctctcttttaactgattggggagtgaggtgggggggggggtcttgctacattgcccaggctcaaacttctgggctcaaatgatcctcctgcttctgcctcagcttctgcctcggcctccggagtagctgggactacaggcctgaaatactgtttctttaaggaagggcatgttacctataataccaaaccacaaaaggatagctgcggttttgggcgaggagagctcagagagtttcttgcatatggccctgtgatggcggccatggccctgcatagacacgagctggaatctgcaggtggcagccaggacgctgcgtgtgtcgagtgcacagtgtggcttggtgccaaccatggcgagggtggagagccccgtgcctgcagcgcgcgcttccctcactgggtcctgcgtccttgggcaggcgatgcccctgcggggaggggctggtccatccccggccagccacggacccacgcatggacccagcgacccacggacctgcttacctgggcgcggcgcgggtggcatgcggccacacggaaggggcgcgctgggctgctgcggcctctgcagcttctacacctgccacggggcggccggaggtaaagggaggcggcggccaggcgcggccccgcggaggcagctgcactcgctcggtccactcgcggcttcgcggctgcccgcaaaccaggagggcgtggagacccggaaccggggggaagggcgggggcacttgtgcggcacccgcggggctcccaggggacctcggcggtgacacgaatttctaggtgaccttggcggtgacacgaatttctaggtgacctgtgtgatac

SEQ ID NO: 13596 - DNA, 1035 bp, Homo sapiens
gggcggaggccgcgcggaccggggcgggcggagcggagctcggcgggcggcggcgctcggggcggggcgcggcggttccggcccagccatggcggacgaggccccgcggaagggcagcttctcggcgctcgtgggccgcaccaacggcctcaccaagcccgcggccctggccgccgcgcccgccaagccggggggcgcgggcggctccaagaagctggtcatcaagaacttccgaggtgggtgcggcggccgggtcgagggccaggcgccccgggcggggaccccacgagaccccgcccgacttggggggaaggccccgagatccgtgcgggccccgggagcgggggcgccggggcgccggccgggtcgggggtggctacgcggggcgcttcgcggcgcgccctgagccgcccgctctccctccgccctgcagacagacctcggctgcccgacaactacacgcaggacacgtggcggaagctgcacgaggcggtgcgggccgtgcagagcagcacctccatcaggtacaacctcgaggagctctaccaggtgaggcggcggccggggctggggacgccgctcctgccccgcgtgacgcagacgcggccgggcggccgctccgggtgcctcgcaggctctcgccggggagcggaaaggcagggcgtttgcctccactgcagggccgggagccccagaggcaacaagtggttttgtttattgccgtggtggaatttttgttttcaggcttaagctgcttagaaccatatttaaagttatcccattacggaagagaaggaggtgtgtttctaggagccacgtgactcatattttgcaagtatacggcaaattattttctcgttatatgtaaaactcatgactgtgtcacttgccacagtaataagagggtcttttctctgttgtgttttgtgattaatggttgcctttaagatattcaaacagattttgaaaaaattcaaaattcagaaaaagtggttttgttctctgttgtgttttgtgattagtggttgcctttaa

SEQ ID NO: 13597 - DNA, 2101 bp, Homo sapiens
cgtcccatggtcccatgtggctgtggaggtcgtgtgtgactatggaggtctcgtccacgtggctgtggaggtctttgtgtgactatggaggtcacgtcccatgtggctgtggaggtcgctgtgtgactatggaggtctcatctgtgtggctgtggaggtctttgtgtgactatggaggtcacgtcccatgtggctgtggaggtctctgtgtgactatggaggtcatgtcccacagctccatggccttccttgttctgtcttccacatctgagagcagggattgcccttatccgcagtgagcattttgtttaagtagcagtgagttcactccaggcaatgctttgacactataaatagacgtgtatttgacattcacacacgtgtctgttgagctaatacagacaatcatttgatgaacctgctagttaggaagtagctgtgatgtgagaagagacagtgctggctgtagatatacaccaaatttcctcacttggctgttgatacaaggaaagcatcttgatactaataggagtagaatgcaaatgatacttctctacctccgatcattggattacattccttttctctggggtgaatctttaaaatgctaatggcctgagtgcaccaacatgaagcacacagtaccatctgattagttgctttatgcatccagagagggtatttctaaatctcaaagtatgattgagtgtcaaaaatccatttgggggaggggcaactcctgtgttgtgctgcttctataacagcacaaaaaagtcttccagtatgttcctgccagcaaggagttggcagggcggggagaaacaaaggctgtcgcctttccagtgatgagtgcctgtaatatgaagccgggagtcctgactcagcacctacagcaaacctgggttacccagggcttgccacttgttttgagaggttcttaaattcttaattttaaaaacaaagtaaattgcagtatgactcatatgaatagtaaatgtgcaccaaataggacacataggaggcagagtgggttataaaatatttagtcatttgccacaaccaggaaaagatggttttaaggatattggttcttggtctaggaattaaaacatccagaaaatggtcctaagttactgttgatttttgctgaagaaaatacattttcttcatgtgttatataaaaaacttactttgtaataattatgtttgtgggattcactaatgtttaactactggagcaaaacctttgtcgtaaagttctcttggttgtttgaggagacaaaaggatggcagatctttgaccaaattatgaagatatggaattcaaagggatggaattgaagagtttgagaaaggagttaaagtaaatacagaatgtgggtaggaattccgtttctatagtaagacaaaatgtagggggaaagtttgtatttctttgttattatgctgataataagcttgctagaaaacaggattataattaaaaacaggattataattattccacatcctcttttgatctttgtaaatatgcatgtattttatatggtagtaatcactgtatgtatttaactttggttaatatgtagcagctctccgatatttagtattggaattattaatacttgtgtaagtattagtaaaatgaatagctttataactttaatttaccttttttcctaggggtatattgtatcctaattaaattcagattatttatctaaagtgtttttattctgtatatccccacatttttcgaaccccacattggttcaaaacttgttagaaaaaccatatttctgtttataatatttcatattggaattgaatgagtttaagtttttgtacctaagattggaaaggaaattttattagaactggtaagaatgtacaagcattgtttctttgaggtgagtaaaaatattgtgagaaaaaattttctgcttcaaaaaatggtgtcagctgggcacggtggctcatgcctgtaatcccagcactgtgggaggccgaggcggacaaatcacctgaggtcaggcgtttgagaccggcctggccaacatggcgaaacccctcctctactgaaaatacaaaaattaacctg

SEQ ID NO: 13598 - DNA, 1034 bp, Homo sapiens
ttcctgaagtactggggtagggtgtggggtgcctttttcttatgattacagctatgttaacaatagggtttttttatgaaccaatctgttgttcatactgaagaattgatgtagcccttttgtttgcaggctgtggaaaatctctgttctcacaaagtctccccaatgctctacaagcaactgcgtcaggcctgtgaagaccacgtccaggcacagatccttccgtttagagaatatcctttttttggttcataaagtttctattcattatctaagtcttttaaaactgaacattattatgataaagagctaatgagtatccttaatattaaaacaacagcttttaaagttctcttttatttgataggtttgtaagcgaaatttaccatttaaattattttgctgatttgaattaaagggaaaccgtgttcatttattgggtatggttgaagtatttaggaaatgttctgaaaaatgtcttcaagtttgagtatcctttattctaataaacaccatctgcattggctttctgtgataggcaacaaagtcccatcgacttggcgacttatggagacacccacttatcagcgcacagttgtgtctgtcaggaggccaggcaggattcagtggattctatgctcagtctcacgggcagagtcaaggtgtcagccaggttggggcctcacctgaggtctttgctagcacgggcaggcagttggcggaagccagttcctgtggtagtgggactgagggccctgccttctgtcccgtgttgcttggtgtcactctcagctccacatgcacaggtccttgcctctcctctcacagcacgactcttttctgcttctagaccagcaggagaatctgcctgtctgacctgctgagatagggccttatatgatgtaacccgtaacccagtcaaggaatgatgaccttcgtattcacagcctcgttcacagttgcgtgtgaggcatcctccacgtggggacagggcaggagcatctcagaattctgctgccacaccagctgtgact

SEQ ID NO: 13599 - DNA, 1375 bp, Homo sapiens
agtctgaggggatgatgagaccaggaagtggctggttactgtgatgaaggcttttaggctacattcgtacgttaacctagtaaacatggggtgtttctgtccaactcagcactgtgcgttggggaccagggacaggcatgaatggcacgggtcctgctctcaaaaagcttgtttttgctggaagagagttctgacccagcccagtctcacctggggaaatgttaatgtgatggcagatgctgagatactgtgtggcagggagtattccaaggtctgcatattcagatttcttttgcctctgggatattccagtacttcaagtaactctactttctaagatttaagtaatttgttgttgttgttgttgttttgagacggagtttcgctcttaattgcccaggctagtgtgcaatggcgcaatcttggctcaccgcaacaacctccactcctgggttcaagcgattctcttgtctcagcctcccgagtagctgggattacaggaatgcgccaccacgcctggctaattttgtatttttagtagaaacggggtttctccacattggtcaggctggtctcgaatttgcgatcttggattatctgcctgcttcgacctcccaaagtgttgggattacaggcgtgagccaccatgcccggccagatttaagtaatgttatgtaccgattatattttgattgtatgctgatattagattatagatgaaacccatcagatgtgcaggtagaaaaagggcttttgtggaattgagtcattcactaccatcttcttcgtttaccacatccgttttcttgtctcacatgtttgataaattctgcacttagctgtccgtttcaaaatagatagctgctcttggtgacgtcccttcctcaaaataaaggccatttgtacccttgcactcatacacatgctcagccacaggcagctgctgcagaacccacaccacatgctgcaggaccacgtgccacccagccaagctacgtgggcaacaggagctcttcaaaaatgtcaagcccgcagagtgcggtggctcacgcctgtaatcccagtactttgggaggccaaggtgggcggatcatgaggtcaggagatcgagaccatcctggctaacacggtgaaaccccgtctctactgaaaatacaaaaaaattagccgggcgtggtggcgggcacctgtagtcccagctactcgggaggctgaggcaggagaatggcatgaacccgggaggcagatcttgcagtgagccgagatcgcaccactgcactccagcctgggtgacagagcgagactccatctcaaaaaaaaaaaaatgtcaagccaactgtcctcagaatctaacctgtagataactatagatgaa

SEQ ID NO: 13600 - DNA, 1047 bp, Homo sapiens
taaagagatggaaatcacataccaaggggacaaaattaactttagaaaaaaaaaataaaacatgagggctgtggtggacaggaaacagctgttggatttgagacagctagcatggagttaaaaggcctgatctttcatattttgctagtagaattcataagtaaatggttctcctttctgctggtcagatcatgatcagaagcatcttcctgttcttggaccgcacctatgtgctgcagaactccacgctgccctccatctggtgagtgtcctcacagcgcagagctgcgtcttccctgcagctgatgcttttcgtcccgtttgtgtcttccgcaggctaagatggtaaagtgtgtgtgattacttgtgccttcctttcttcagccaaaatcattaacgtgaacgtaggagtccaggtgggtcttagccttgaaacaccaggtgtctagccagcagcaaggagtggagcaggaagctcggacaggcggctgactttggtcatgagggtgaagacagagggtcttggtttctctctgacgactggaggttgagcctggagcggctctttccagcgctgcagttgaaactcggagaaagactgcctgctgcccgtggggtcgcagccctgaggctgtgcgtcccctgtggaatggcttgctcagcctcccggcctcctgagcacatagcactcatcgtccgtcatctttcggggactgtatacaccaggggttctggggcctttcctcagcagcgttcgcggccacggaccccacatgtcctctgctgacccctgtgtgtcctctgtggccaccccatggcgctgaatcctgccgcctcctgcaagccgactttggacaaaagctgtgtccggtctcaccgtctgatttgtcttgttctctgttaatgtagtgtttcattcttctcacattcatacataaaagtgatgtcgtgccttctcatgagctttaaacccaagttctttaaaatgtgcctgcttttcctaccccacccactgggcacgctgacccaaggcaatgtgatttctgc

SEQ ID NO: 13601 - DNA, 1007 bp, Homo sapiens
agtgatcttcctgcgttggcctcccctgtagctgggactataggcacgcaccaccacattcgactaacttctaaaaattttttgtagtgccaggatcttgctatgttgcccaggctggtctcgaacccctggcctcaagcgatcctcccacctcagcctcccaaagtgctggaattacaggtgtgaaccaccatgcccaacactaaactcttaatttataaacatagtttataccataactgtcatacaaactataaacattgtttataaaatagaataaatgataccacctccagtctaccacaagtggctaaaaacctgaacgtgagcatcattacaagaagaatcctggttgaggtgtgtgtgggcaatgcatggtgaggagatactttgtccatctctgggatggggaggagggctgagggtgaaccttggcctgtgctttgaagaatgagcaaaggtggtcaggcagctaagaaagaaagagtagaaggaagcagtaagttcaaagccgagtatctcctgctagtgatggctaggacggcagcatgaccagaagaagcctgtgtggggagtgggaggtggggagggatagagctgatgagggccctgaagggtttttcagctgaggttgatgttttaaagagaagatcccagtggcagggtagagagtcacacaagtggagacctaagccttcctaagcactggctacctgcctggcactgccccaagggcttcagaggcaggaactaataacatttgatccccattttaacagttcaggaaggaaaggcacagagacattaagcttctcacccagggtcacacagctagcaagtagtagggccaggattcaaacccaggcagctgcctcgagcccacaagtctggccactgcaccttcctgctccaactgtggtgaagtgcacagaagacctggtgtgcagcacacgcgggagcaacaggagaggcccatggtgatgtgggcagtcaagggaggtgcacgt

SEQ ID NO: 13602 - DNA, 1008 bp, Homo sapiens
ctttctctgagggggtgggggtgccgctctctctgagggggtgggggtgctgctctctccgaggggtggaatgccgctgtctctgaggggtgggggtgccgctctaaattggctccatatcatttgagtttagggttctggtgtttggtttcttcattctttactgcactcagatttaagccttacaaagggaaagcctctggccgtcacacgtaggacgcatgaaggtcactcgtggtgaggctgacatgctcacacattacaacagtagagagggaacatcctaagacagaggaactccagagatgagtgtctggagcgcttcagttcagctttaaaggccaggacgggccacacgtggctggcggcctcgttccagtggcggcacgtccttgggcgtctctaatgtctgcagctcaagggctggcacttttttaaatataaaaatgggtgttatttttatttttatttgtaaagtgatttttggtcttctgttgacattcggggtgatcctgttctgcgctgtgtacaatgtgagatcggtgcgttctcctgatgttttgccgtggcttggggattgtacacgggaccagctcacgtaatgcattgcctgtaacaatgtaataaaaagcctctttctttttggggtgggccttgtccttctgtcagctaaaatgggagctcatgagagaaggacgtcagggaaacggggttgagggtggtctcggtgcagagagaagggtgtcagggaaacggggggtgagggtggtcttggtgccagacgtagggaatggtgttgggagtggcccgagtgcctggcacagttgtctggttcattcatgtaacatgataatttttaaatcattaaaaaaattacctttcatacagataccatggaatactatgcagccataaagaggtatgagatcttgtcccctgcagggacacggatagagctggaagccattattctcagcaaactaacacaggagcagaaaaccagacacc

SEQ ID NO: 13603 - DNA, 1051 bp, Homo sapiens
tgcttctccttttgggagtcagtctccaagaatgttttgaattgaacactttctaaccagaatatagtcttttcttggtgacttttgcttgtaattctgatcagtactgttgtctaacacagtactgtcttcaggacctgctggggtgcagacagtcgctgagccttcaccgagtcatctggcctccaggcttttttagttctcctgtttgttttgcataaggtttgtctctttctgtggctgccatttcatggtttgggcagaatgctgcctccagaaatgctgcccttacttttgctgcatctaacctactttgcctgggaaactcgattaaaccaattagaatttgggttagcagtgaaatgaaagtatagatatatagatacatcttttagtaaccaggtttccaggtcggggaatctttgtaatatgtgatggttgagtaggaattcctgagtaacagtccattggatgctgctatgaagaatggttaggttaatattttgttgttgtttactttaaactgtaaatctgcgtaagtggtaggtgttggttttgttgccttttttgggatagctacttgtgactggtgatctcctagtggccaaattccacggactctacgtttattactccttccttccacggtctcggtttcccacctctcagctcgttctgccttagtgacctttgctggccgctgtctcatcctgctttctgaacagtgctcctgtctgggtgccttgccctacccctgctcatcaccacctggacaccacggctacagccgcactgaaaccgtcctcattcccccagcagtaatgttcagaaagcaggttcctgtctgtgctgtgccttgccaggataaattaatatacattgttttaggtattcctaaagaaaggaagagaaggagactgaattgggatgataacaaaaagttctagagatctaggtattgtggcatatatatatatatatttttaattcttgacatcttggtagcacttgactgtagactgactttggaaatgtggcaacatttcaaatg

SEQ ID NO: 13604 - DNA, 1031 bp, Homo sapiens
gtttttcagatctgattatttaatactctgatcaatagtaatgaatcattgtttaactatgtgtgacaataactctttttcagctgaaaatgtgtgtctgacatgcaagctcagtggggcagagacccgtggattgctgtgccctgccctccggacctggatcatgaaggtgttgggaagaagcttcttctgggtgctgtttcccgtccttccctgggcggtgcaggctgtggagcacgaggaggtggcgcagcgtgtgatcaaactgcaccgcgggcgaggggtggctgccatgcagagccggcagtgggtccgggacagctgcaggaagctctcagggcttctccgccagaagaatgcagttctgaacaaactgaaaactgcaattggagcagtggagaaagacgtgggcctgtcggatgaagagaaactgtttcaggtgcacacgtttgaaattttccagaaagagctgaatgaaagtgaaaattccgttttccaagctgtctacggactgcagagagccctgcagggggattacaaagatgtcgtgaacatgaaggagagcagccggcagcgcctggaggccctgagagaggctgcaataaaggtcagtcctagagagggagagagagagagagggagagggagagagaggtgaagagagagggagagtgcgtgcccacatcctcatcctagagacagcccacacggagctggggagcagacaggaagggaaggcgtgaatgctgctgatgtcgctcaggtgttgtctttcacaggaaatcgcatctagaaaaatctctcatgtgagggagaatcttttccttttgcataatagtgtagctcttacttctagaaggagccagtctcatacttttctctatagagaaatcccctggtaattcaaaaagttattcaagttgtactagtaaactgatgcaaagataaatataacttaaatcaacatttgctgagtttctgacaggagttccttttagtgtgaagtttgacttttcttcagtgtcatatat

SEQ ID NO: 13605 - DNA, 1031 bp, Homo sapiens
gtcagccccatcgtgagactggacagggttggagggtcgggggctgagtgaaatgaaaaaagaccaagtggggaccaggaacgacgcatgaaaacagctcctagtttagtggcccgcacacgggacacccacacctgtgaagaaatctgtggctggaaaagagctgacggactcagcagtcacagcgtgaactgcccttatggacagagaagcttcacaaagacttcaaaatcagtgcacggtgtatatacactcggaggtgtgcagtatatatacactcggagtcacggaggccgggactggagaggcagagggccggagtgtagatggagagggtcagtatatatacactcggagtcgcgggggccgggactggagagggagagggttggagtgtagatggagagggtcagtatatatatatacttggagtctcaggggccgggactggagagggagagggttggtgtgtagatggagagggtcagtatatatacactcggagtcgcgggggccgggactggagaggcagagggccggagtgtagatggagagggtcagtatatatacactcggagtcgcgggggccgggactggagagggagagggttggagtgtagatggagagggtcagtatatatatacactcggagtctcaggggccgggactggagagggagagggttggtgtgtagatggagagggtcagtatatatggactcagagccccaggggccggagtgtagacggagagggttggagtgtagatggagagggtcagtatatatagactcagagcctcagtggccggagtgtagatggagggggttggagcgtagatggagaaggttggagtgtagacggagagggttggagagtagatggagagggtcagtgtacatagactcggagccccaggtgctggaactggaagggggccggagtgtaaacggagagagtcagtatatatagatttggagccccaggtgctgggactggaagggggctggagtgtagatggagagagtcag

SEQ ID NO: 13606 - DNA, 1164 bp, Homo sapiens
catgagcctcgctagtattcggggtgcaggctgatgggactgagatcgacgccatccacacaagcctgctgccaagctttgttttagaccgagtcttgcaacaggaagacatgagcctcgctagtatttggggtgcaggctgatgggactgagatcgacgccatccacacaagcctgctgccaagctttgttttagaccgagtcttgcaacaggaagacatgagcctcgctagtattcggggtgcaggctgatgggactgagatcgacgccatccacacgagcttgctgccaagctttgttttagaccgagtcttgctgtcacccaggctggagtgcagtggcttgatcttggctcactgcagccccaacctcctgggctcaagtgatcctcccatctcagcatcctgagtagctgggatgacaggcgtgtgccaccatgcctggctaagtttttagtctttttgtagagatggaggtcttgctatgttacccaggctggttttgaaccctggcctcgagcagtcctcctgcctcggcctcccaaagcgttgggattgcaggcatgagccaccgcacctggccctggcagacatttttaacctgatctaccattggcaagaatgtggagttgcaagatctaagcattctccatgggaatgtaaattggttcagccactttggagaacaattttgcaatcagaaaattccatttctatatacatatcctagaaaattcttgcaaattattataattcaaaacagcattatttttagtagcaaaaaattaatcaactgaatattcagtaacatgctggacagttaagatgtattcatacattggaatgctgcagaagcaaatgtgaattctgtagcatggagggaaagatagaagatgtggaatgcaacatgttttatgtgtttaaagtctgaactttacatacatgcaaacttttacactaaaagcaacaagaagtgtttgagaatgacagatgtggccgggtggctgtgccagagatggggaggcatgccatcagagagagacgcagggcagtcggctgcttgtgacatttcttccagaagctcagtgatggctctggttgttcatgacatgctttgtaccttttttcttgatccaaagtattttataataattgtttttaaaa

SEQ ID NO: 13607 - DNA, 1011 bp, Homo sapiens
gagacagagtttgcagtgagccgagatcgtgccactgcactccagcctggttgacagagcgagactccgtcccaaaaaaaaaaaaaaaaaaaaaaaagaaatgcagctgacttgtgtgtgtttattttgtgccctgcaactttgtgaactggtttattgtaatagatttttgtgtgtggaatctttaggattttctacatatgagataatctcatctgcttacaggatcattaaattcattcttcccaatttggacaccagccttgtgtcttagagatgcacattgaaaggtatggttaagaggatgactggggtttcccttaggagggtagagtggaggttagtgtatgaaacaaggttagtctgcctgatcatggaaactggattatttgttccttgagatgcactgtatttttctttctacttttgcatatgcttgaaattttattagaaattcctatatatgtccaggcatggtggctcatgcctgtaatcccagcactttgggaggccaaggcaggtggatcacatcaggtcaggagttcaagaccgtcctggccaacatggcaaaacctcatctctactgaaaatataaaaattagccgggcatggtggcacacgcctgtaatccccagctactcgggaggctgaggcacaagaattgcttgaaccctggaggcggagcttccagtgagctgagttcacaccactgcactccagcctgggccacagagtgagactccatctcaaaaaaaaaaaaaagaaaagaaaagaaaagaaatttgtatatagcccaaacttaagactgtctcaccagagcttaaaggtgttagctctggccacagcagcggcctcagtcactcttcttacatggattttgatgcaaattctgctccttttctatttctcaagatttctagccccttcgaggggcccaaccctcgaaggagtccagtaaatgtgtaactccactctgccttgcctgtgctgaaaacacatagaaagaggaac

SEQ ID NO: 13608 - DNA, 1063 bp, Homo sapiens
taacagtagcttttttttttttttttgagacggagtctcgctcttgtcccccaggctggagtgcagtggcgtgatctcagctcactgtaacctccgcctcctgggttcaagtgattctcctgcctcagcctcccaagtagctgggactgcaggtgcccgccaccatgcccagctaattttttgtattttttagaacagatggggtttcaccatgttggtcaggctggtctcgaactcctgacctcaggtgatctacccacctcagcctcccaaagtgctgggattacaggcgtgagccaccgcgcccagccgctttttttttttttttgtaagaaaaagtaccttgttcggggtggggttgggggaatgacaatttaatttttagaagcatatttacagagttcatagctggaactgtacattgaaaattgagacctttggaggcttgtgcaagttactgaatttgtgaagaaggtctcattttcctttcttctttccagagttgttccttagtctcttcagctagtcatggctactactgttctgccctcgtgagccggtgtttgtctgccgggcccgccttggtcacacagtgaaggctcattccgtgtggtggcttgggtgcgtctgcaccatttggacaccaagtctgtgttggtcacacagtgaaggctcattccgtgtggtggcttgggtgcgtctgcaccatttggacaccaagtctgtcttggtctcacagcgaaggctcattccgtgtggtggcttgggtgcgtctgcaccatttggacatcaagtctgtgttggtctcacagagaaggctcgttctgtgcagtggcttgggtgggtctgcacacgtggaacacaccacgtgaccagaggggcctgagtcaggcctacctggagtagctcagggaagctgtaaaggtgagaagcaaaggcttctccatgtgtttctgggacgcagtgaaattggtgtgattatccaagcctgtcatcttgtttgccatgtcacctttttgtcatgagatttttcaataattatataaataacaagtaagtcgtg

SEQ ID NO: 13609 - DNA, 1040 bp, Homo sapiens
taacttatcactgtttgctggaatccacgttttaccacttcatgtgaaatgtagaagccttatttccacttagctccctccccctgcccacatgttaaatagtcacgcgctgcataatgacattttggtcagtgatgggccacctgtacagcagtggtcgggtgggattctctggacctgaacaattcctgttgcctagtgaggttgcagcccttgtaacgtcacagggcagtgtaatgcccccatgcttgtggtgatgctggcacgaacaaacctgctgcactgccaatcatataaaaggctcacacacccaattaggcatggtacggaatacttgataacgacaataaatcactgttactggtttatgtatttactatactttttatcgttagagtgtactccttctacttataaagagaagtagaactgtcaaaacagcctcaggcaggttcttcaggagctattctagaacaagccatcatcatcataggagacgacagctctgtgccggttattctagaacaagccatcgtcatcatagcagacgacagctctgtgcctgttattctagaacaagccatcgtcatcataggagacgacagctctgtgcctgttattctagaacaagccatcgtcatcgtaggagacgacagctctgtgccggttattctagaacaagccatcgtcgtcgtaggagaggacagctctgtgccggttattctagaacaagccatcgtcgtcgtaggagacgacagctctgtgcctgttattctagaacaagccatcgtcgtcgtaggagacgacagctctgtgccggttattctagaacaagccgtcgtcgtcgtaggagacgacagctctgtgccggttattctagaacaagccgtcgtcgtcgtaggagacgacagctctgtgccggttattctagaagaagccgtcgtcgtcgtaggagacgacagctatgtgccggttattctagaacaagccgtcgtcgtcgtaggagacgacagctctgtgccggttattccacctgaaga

SEQ ID NO: 13610 - DNA, 1109 bp, Homo sapiens
tggccttttgaagcgttttagtcatggctgctttaacaccctcatcagataactccagtatccgttcgtctcgatgtgaagtctggcgcttgtcttttctccttcaagttgtgattttcccgattcttaatatgatgagcgacttttcgttgtatcctgggtggttcgtgtgtttattaggaggctttaaaccagtgactcccctggggagggtggtgtgaggcctggccagggggttctgcttcctgccaggcctccagccccaccccggcccaaacagctggcaagcgcttcctcatggcaggcggtggggtggaagaattttttagtatttgccttttgccagatcttctgttacatcttccctgctgtcggtagctcagccaggcaggcaggaaagtagaaggaatgaagggctgtttacctgggttttccagaggttcagcccaggctagagccccagcttggccatgctctggccgtgcaagccctggcagctttctgtgaattggggaggacgtgggaacagtgcctacctggtggaccgtgggaagactgaaagagaaaaccaggcagggcacttagtgcagccgctggtggaggcagtggttagagttcactcgctagagggtccttgtgataagagggtccttatgataagagggtccttatgataagagggtccttatcatggccattttcctttgatccagatgtctttaaatatcagaaaaataacgcttttagtcccaaccgccacatcggaatcagttcttattccttctggctacaatgtccaacataagttgaacaacataatttggacaacagaaggaagggttgtcatgctagccggagatgacttctagttaagaggtctgagcattttccacgcacaaccagttattctcaacggagggcggactctccatacgaaacaagcagagccctggcagagactgcagggcatttgtaaaactcaaacaccacgttgatctcactgccacgttctttccagttacacgcaggtctaacatgctggcataagacattgtcttaatcagaacacttttaaagcttttttttcccttttttccaattcaaaaaat

SEQ ID NO: 13611 - DNA, 1039 bp, Homo sapiens
gaagtgctgatgggtacagggtttctttttgggatgatgaaagtattctaacatggattgtggtaatagttgtgtaattttgtgaatatgctggaaaccattgaattgtatactttaaatgggtaagttgtatggtaagtgaattatatatcatagctgttaaaaatatatacgatattttaattagacatagaagaacatgaatagagactagaaatatatatatgtatatataacaaggtgttaatgattttctactagtagactggtagatttgtactaagttttttctactatatatacttttctgtaatttaggaaaacctccctttcaattttaataacgagggaaaatttatatttaaaatatcaaagaaataaaattagttgcaacataatagactctgctttcttattaagctttattcagaattaaccttgatcattcctagaggaaagaactctttccctcaaaatatttcacaggtaaagaacagaacacagaaggctgtaataaagcaaaacagatgtttatgcccatattaaagacagaggcttatgtttcttattttataaaggtctcctataccttaataagaaaaatatgaataactgagtttgaaaacaggtcagcagcaaagcagctattagacttgagtaaagtaggaaacacccaccctcacaccaaagaagggtgatggcaccacccgcccatcagactgggcaccattagaagctgggtggtgcccaggttgggaagtggggtaccttgggcatcattgttgggatgggaattggagcaacttcctggcggcccaccagacagcacctgtcatagtgggaggcacccggctcccttagtgagcacccactgccaccatcagtggacccacaggctccttggtcaccgcagcgcccaagaaccaggatggccgtggagtcagtgtgagaaccgggacagcccttgcatctggctgagcaaatgatggtgcgtcccgccagggagcccttcctcacctgtccgctggccagacatgct

SEQ ID NO: 13612 - DNA, 1688 bp, Homo sapiens
ttctaaacagaacatagcaaaggatcactttctctgtgtctgaatcacagacacagacctcagagctggctgcctcgggagtgccttgctgacggtcgctggagttcgtccatcaggcgactgcggtggggcacggagagcaaccgctgcctggcggagactttgatgtgcggctgaggcctggcgaggaattttatcgtcaggcatcagctgagataggaacgctgtcagtcgagaattttcacattctagaatacgcattcaccccagagtattgactgcaaaccaatgcagcttccacctttggctcaacacaacttaatttctgagatgagtatgattcataggtgtttttgtatttgaaaataaagatgtgtatgattcaggtaatttattttgtagcatgttaaagaaaaaaactgaaagattattttattgagttttagagaactgtgttttggaagtgaaatcacgtctcttttttctttcccagcattgtcgtggaagttctccgaatcctggttttgattggtcagattcttttttcactagcggcggtttttcttttatgtcttgttataaagaagtatctcattggaccctattatcggaagctgcacatggaaagcaaggggaacaaagaaatcctgatcttgggaatatctgcctttatcttcttaatgttaacggtaattctcaaactatgtgttatttatgtaatctgatacataatctctttcactgaaatcttgtgatccattctttacctttccattttaataatggttaaaatatttgaaacatttactagtattttttattttatacacactttcttatactacccatcaaaatataatacagggagctaaacccgtttaactggtttgactcatactcttaagcactttgctaaaatagtgtttgtgagtatttcattaaaaacaaatccgtgggccgggtatagtggctcacacctgtagtcctagcatgtggggaagctgaggcaggagaatcacttgagctcagaagtttgggagcagccaggacaacagagtgagaacccctctgctacaaaaaatagaaaaaccagctggggcgtggtcgcgctcatgtatagaccagctgctggagagactgagctgggaggatggcttgagcccaggaggccaaggctgcagggagctgtggtcgcaccactgcactctagcctgggtgacagagcaagaccccatatcaaaaaaaaacggccgggtgtggtggctcacgcctgtcatcccagcactttgggaggctgaggcgggtggatcacaaggtcaggagatcgagaccatcctggctaacatgatgaaaccccgtctctactaaaagtacaaaaaaaattagctgggtgtggtggcgggcgcctgtagtcccagctactcaggaggctgaggcaggagaatggcgtgaacgcgggaggcggagcttgcagtgagccaagatcgtgccactgcactccagcctgggcgacagagcaagaccccatatcaaaacaaacaaaactgtgatgataaaaagcgccataaacactaatatcaaaccatgctactctgtcttaaattttcaaatagctttgcacctgaaatacaaaattaagtttggaaaaacagtttttaactgtgttgctcacaagctaattaactgta

SEQ ID NO: 13613 - DNA, 1551 bp, Homo sapiens
cttttatcctctccactgtgcttgtccgtaccatgccctgacctcgtgcgggcatgcactcagaatgccagatgtgggcatgtgctcagcgcgcaagccatgttcattacatctcctcatggtgaggagctggacccagggcctcggttagagcacgcttctggtgttgtgtggtttcctgtgtggtttcctcagatggttctcaaacacgctttgatacataatggatggtgttttcggggccctctttcattcccccgtgatttcactggcactgtctgtgagcagcatgtagtgtgaggctgggggtggggggcgtgtggaaaggtggtccggctctgcaggaccctgaatgctccatccagtgtgggcacctgagacgcagcatttgtcaggaactgcataggcacaggggctgggggctcaccttgcactcaggggttgtgatctgagttgggggttggcgctgggaggagagtaggattctgcagctggtgaggccttccctgctcaaagcctgggagtggtcaggagtgctgggtctggatggaaagtgaggttgtgaacaagtcaaggaatttgatgttttcgctagctcttttttttttttttttttttgagacagagtctcactctgtctcccaagctggagtgcagtgacgcgatcttggctcactgcaacctctgtctcctgggtttaagcaatcctctcgcctcagcctcccgagaagctaggattacaggcatgtgccaccatgcctggcaaatttttttgtatttttagtagagatggggtttcaccatgttgcccaggctgggctcgagctcctgacctcaacaatccacccgccttacaggcgtgagccaccgcgcccggcctagctaactcttttaagtagaggtgtgacatttgagttttgaaaagatgatgttggcagcttttgcagaagggaacatcgataaccagttaggtgttttgtttttgttttttgagacggagttttgcttgttgcccaggctagagtgcaatggcgcgacctcagctcactgtgaccttggcctcctgggttcaagcagttcttctcctcagcctcccaaatagctgggattacaggcgcgccaccacacccagctaattttttgttagtagacacggggtttcaccatgttggccaggcttgtcttgaactcctgacctcaggggatccacccacctcggcctcccaaagtgctgggattacaggcgtgagccgctgtgcccagcccaccagttaggtttttaaaagcactggtactgcagtaaaaccacaggtgtatgtcaaaagcctttatgctgggggaaagctgtgccacttgggttgaaggaggcaggcctccagcttctaagtgccctggggcctctgtagagggccatgaggggccacaggatgcagggagctggagctaggccctggtagtcaccatggaggaggagaaacaaggacatccaagacctgaggctggaaggttctggagagaacacaagagaaaaacaactccggagcttccaac

SEQ ID NO: 13614 - DNA, 1625 bp, Homo sapiens
tgagtgaggggcagaaagaagaggatgaggtcagtcctctgggggtgtcatctttgaacagcagttgacaggcagtgggtgtgaaggtctatatggcaaggagctacacacgagggaggagagaggtactctgaaaagtttgcagagtgggtaggaaatgactgtggagcagtgaggagagtgatcagtgatggtgtagtagttagagagtgagtggtggtggacttgatggagagtgagtggtggtgctggagtggtggagagtgagtggtgatggtagattggacggagagtgagtgtggtagactcggggacagtgagtggtgatggtagattggatggagagtgagtggtggtaggactgggggagagagagtggtgatggtggtgtaggtggagagtgagtggtgatggtggagttggtagagtgagtgtggtgatggtgttgtgggtggagagtgagtgatggtagtgttgtgggtggacagtgagtggtgatggtggtagactggaggagagtgagtgtggtgatggtgttgtgggtggagagtgagtggcggtgctggagtgggtgatgtagggtcacagaaggaggaaacagcctagaaggtggctgcctttgatggtccttgagtgggcccagctggagaaatggtgagaaggattaggtttctgttgtcttgctcagggactttttattttattgcacttatttgaattaaaatggtaaattcaaatggaatatttgtgtttatactctgttaagtgggagaatgtggagaacaggagtcagctgccatacggccacctggctggctccgggaacctgaggcctggtcttgcccagcaggagcgctggcatagcatggatcacttacagaaatttatgatcaagattatgggctgctcctggcaatatggggaggatttccttgctgtggggactgtctgtttccatgcctggcccacccggtctgtgatagcctcaggtgcagtcctgtcttaagtttggagacaccctgggaggtccgtacagactctttgagtttctgaactgtcctcgaaacatctcaggccctccgcctcagggcctagggaggctgtcctctggttcctgaacagggtggctctgacccgcagatctgtgggctcccgttgcaggtaccggtggtgctcggaaccgtcctcagattcagtcttggaaggtgctttggcacctccttagagtcggacagacccttgtcacgagtcagtccagctgcaggggctcaagttgttctagagctgggctggcagggcccttgggtgagggagtgtggcttggcactggcatctcagcctgcggccaagtttcctgcctgcccaggcagcatgacccttggtgggatcaggcagagctctgcctctcccctccctacctcggaacatcctgtcgtcacacacgattgtccagtgtcatgaaagtttgtaagtgggaaggcaggcagatgatgaattcatcaaacattacagggatgcttttgctgtaagacttcgggatgtagcccgtgtggggctgtttctggggtcccgttcgcctctccaagctcctcctgccattggtaaagatgcagggcatctgaact

SEQ ID NO: 13615 - DNA, 1951 bp, Homo sapiens
tggtgaagttcaggcctgaagaggtgaacctgatgcagcaacaaactgctgtttccttcagtgcttgaaggagtgagttctgggaacaggattcagcgactcaggccttcttttgtcctcataaagaaacaactttacatttgaggttaagaaggttgtcagtttagccccctcaggtttaagtgttgaagaaatctatgatgacgtgcttgtttttacaagagtcttttcatatttcaggattttttttttctacataggatgaggttagagaaactctgaagggatattaaaaattagaaaattataggttgggccgggcgcagtggctcacgcctgtaatcccagcactttgggaggccgaggcaggtggatcacaaggtcaggagattgagaccatcctggctaagagggtgaaaccccttctccactaaaaatacaaaaaattagccaggcatggtggtgggcgcctgtagtcccagctactggggaggctgagttaggagaatggcgtgaactcgggaggcggagcttgcagtgagcagagatcacgccactgcactccagcctgggcgacagagcgagactctgtctcaaaaaaaaaaaaaaaaaaaaagaaaaagaaaattataggttaattaaaagttttgcccctgctgggcacggtggctcatgcctgtaatcccggaggccaaggcgggtggatcacctgaggtcaggagttcgagaccagtctggccaacatggcaaaaccctgtctctactaaacatacagaaattagctgggcgtggtggcgggcgcctgtaatcccagctactctcgaggctgagaaggagaatcgcttgaacccgggaggcggaggttgcagtgagccgagatcacgccattgcactccagcctgggtgacaagagcaagacttcatctcaaaaaaaaaaaaaaagaaaaaagttttgcccctaaaacatgctttaaaagaggtattataggaacatctggtataaaattcaaagaataaaaaaggacatcttttttcttacataatcagctctttgttagctctttacttttggtatttggaagaaatctctggagttcgttgtgtaagaattggaaacctcacctttggtgcacagctcgatttgcagtagaagtatcaggtgctctttaggggatgttaaaaacttttcactcttggtatttacattaaaaaatactttgttgtagaacaattagaaaatccagatttgcagttgatatttagcttgacttacagtgtggctttctgctgtttgtcataagagactagatttgtcaagttttgcttagagaggaggactggtagcagcaggtggcttagactacgtgtggggatggatctgcgaggggaagggcagatgtcagcgttggctgaattagaggctgaattaggtgacccctcatcccccaggtgtcttactcagatgattctggttgttcgggtactggccatgcactgctctctgtatctttgtgtgtagcccaagcctggaaaagcatccgccctttgtacctttttcccgactggctgagattcccgcagcatcccgactccgcttcagggctcctgtgaggacagggactatggcttttaagttgtcgcacaggtcatgggcactattcacatgtgctgcaggtaattttgagactcaaggatgaagagttatatctgcctcttcccgttagtcttttatgtgaatcctgtttgtttgtttgtttcgagacggagtttcgttcttgttgcccaggctggagtgcaatggcacgatcttggctcaccacaacctctgtctcccgggttcaagcgattctctgacctcagcctcccaagtagctgggattacaggcatgcgccaccataccctgctaattttttgtatttttagtagagacggggtttcttcatgttgctc

SEQ ID NO: 13616 - DNA, 1072 bp, Homo sapiens
gatgccctagatgtgtgtgtttaaatacacatgtacagtacggaattctaaataaatgaactcacatgttttgttcactgctatgttttactcaacagtttgtcctaggtttttttttttcacatcaataaatataagcagagataattctaaaaaatttgtggaacgtttcagacacacacaaaggagagagattgtgctggtgcctcgtccctgtcacggacctgggtgactccctgccgggccagggtgatcattaagtagttattaaatattctgacatgtgtctctcagagatagtcattcactcttattgtcacataggcagcatttacatttctcaagttgtctcaaatttggaaagtttgtttgcattggagcctcgccccctccaggctgctggagtctggtctcgctgatgcgccctcacgtactccaccctgttgatgggctgccctggctgaatgttcatccttcgaaaccctcaaaggtgttgggtgttggggcctttgggagtgactagaattgagtgagggcacgcgggtgtagtcccccctgccctgttggatcagtgtcctgatagccagtccccacggcgagcctgcccttttcccaccttgcgaggcccaaggaggaggtagtaggtgcagcctggaagctggctctgccctgacctcccgcttccacatccaggaccgtgagagagaatccttgcacttagggctccaggactacgagagagaacccaggaccgtgagagagaacccaggaccatgagaaagaacccaggaccgtgaaagagaacccttgtgcttagggcttcaggactgccagagagaatccttgtatgtagggctccagaaccgtgagagagaacccaggactgtgataaagaatccttgcacgtagggctccaggaccatgagagagagcccaggaccgtgagagagaatccttgtatgtagggctccagaaccgtgagagagaacccaggactgtgagagagaatccttgcacgtagggctccaggaccatgagagagaacccaggaccgtgagagagaatccttgta

SEQ ID NO: 13617 - DNA, 1073 bp, Homo sapiens
tgtgccctgacgtgtgactgtactgtcatgcgtgtgcccccaccgtgtgctgtaccatcacacgtgtgaccccgctgtgtggttgtgccatcatacgtgcccccactttgtggctgtgccatcacacatgtgcccccgctgtgtggctgtgccatcacgtgtgcccccgctgtgtggttgtgccatcacgtgtgcccccgctgtgtggttgtgccatcatacgtgcccctgctttgtggctgtgccatcacacatgtgcccccgctgtgtggctgtgccgtcacgtgtgtacccctgctttgtggctgtgccgtcacacgtgtgtccttgctgtgtggctgtactcttacctgtgccacacttaaatagaatgtgtttaacattctattgtgaacattttcctcatcattacaatcttgatttttcaagactgtgtggattctgtaagtcatggctaattcctggtggacggtgctgttttggccctgtaggtgccatggtgatagtgacattccttctccggacctggcgttctcctggttgttcctggagttgcttgcttaactgtggtccttctgcctttttatgacgttatttgatagaacccttgagggtggttttaaacacccctagtttcgtagcccttttagctgtcatatttattattgttttgttgctttccgcaggccggtctaattgaagccaacggagaactcaaggtcttcatagaccagaaccttagtcccgggaaaggtaagggcacctgttctggacacactcttgtgttgatgaatgcatgaagcttcacatgtttatgaagctgttgacgctgaagcctcttgctaatgatggcatctcctgcatgggcacctttgtgctccgggaacccaggagggtgggcgtaggagccttctagcatttagaacacagcctgcacacacaccagtagctttgtggattttgaattctaaggtatgtatactatttgcaaaagtttagaaaaggtagaatattgtaaagaagaaataaagatagtttgttttctctccacccaaagataatgacgtttcagc

SEQ ID NO: 13618 - DNA, 1053 bp, Homo sapiens
gtttttaattagttcatttgaaaaacgctgtgtagtgccttttacagttgaaacaatattatttctattgagttggcttgtgggccatgtcttcatgtgactcagcttgtccctgaaatgttagccctcctccctcccatgcatagattgtgtggcagtcttatcaagaaaatgtgtggaacactctactctacttatattgccagattaaaactaaatgattggctgggcgtggtggctcacacctgtagtcccagcactttgagaggccaaggcgggtggatcgcttgaactcaggagttcaagaccagtctgggtgatgtggcgaaactctgtctctacaaaaaatacaaaaattagccgggtatggttgtgcgagcctgtagtaccagctacttgggaggctgaggtgggaggatcccttgaaccgggaggtggaggttgcagtgagctgagattctacaactgcactccagcctgggtgacagagtgagaccctgtctcaaaaacaacaactactactactaattgaaataacattctatcctgaggtggacaaaaaaagtggtggggagcggcagcctggctgccactggtgcgtctggcctggaatgaccacttggggagctgggtggactctgggacagcggccgctgggacccgggcttccctggtggcaggtgtgccgaggaaaacacacagcatgtggttcagtaataacaaacagcattttcatatgacatctgtgttcatatgaccactttattataatggcatagcataacagcatttaaggaaatcagcctgacggctctatgtatgggtaaatctgaaacacaatgttggcagaattgcagaatgcgagccatataatatttgtctgtgtttcagacgcacacaaaaacaatcatttatagccttaggttcagcacatcctggaaaagtatgaaaaataaagtgagtacgtccctgcaggccctgggagttgcacacagggcagactcggggggaggctgaggatcctggggactgtaattttatttctgctcttta

SEQ ID NO: 13619 - DNA, 1091 bp, Homo sapiens
cactggcttttgtgaactcagaggtctgtttctttcttcacatttattgaaattagagactcgtttgcaaattttaaaagatgttatctttgtaatgaatcaactacatattcttgaaaactgagtgtttactcatctgtatgtgaatctgaaaagtgtttaattgcgtactttaaatcattccctgcatagtagaatattatttttgcttttaaaatgcctttccctggtaagtattacaccgtgtatatgtgcatccaatcatcactggtacatttcgaatatgtacaatctttacttttcaattgaatattctgaaaatacctttcacatatataaaacaataaaaaagtaaatatttgcttttcttaggatgcacacctttatttttggaagaaaatttcccaaagcagatcatcttattttagttccagaagagaattttaaatatgtgctgacattggttggtaaaaatactaatatttaacccagttgaatcaaaaggcaaatgtctttttaatcacttcctaatgatctgtcttggccaacttaggttattaagagaaattactaagtgtccttatgtagcacaaaattcattgtttaatatattttaaagaaatgcataaaaagcagtagatgttttaaaaatgcatgggttgtaaagggccccaaaatgaaacttcagatcgcaaaggcaatgtattcgaaagtctcaccgatgattcatgagtcattttggtgctaactggtgggaatgaagggagatgcctgtggggaggtccagggtcctgcagctctgcggatgggcggccgtccggggaggcccaaggtgtggcgagatcggggagttcttctttcctgatgttgttgtgacccgaaagtctgtgttttcttcacctgagagtatcatgtattttcaaatggggggctatccgctcagctcccccagccgtggggtggggtgtgggtggcaagccacccaggtgccgaggcaagagaccgaggacacgagctgttccagtataataaaatataaaacaagaatggttattccagatatagatcttagatatgattatatatgaata

SEQ ID NO: 13620 - DNA, 1033 bp, Homo sapiens
gagataggagctgaggggacatagtgaggagtgaccagaagacgagtgcgagccttctgttatgcccggacagggccaccagagggctccttggtctagcggtaacgccagcgtctgggaagatgtccgttgccaggtggactgtggtctagcggtagcctcagtgtcacggaaaaacagcggctacttagcagaccgggaaagggagtttagagaagactctgttcctccacctcttgtggagggcctgacatgagtcaggctcgcctgcagttatctggaggcctaaccgtctccctgtgatgctgtgcttcagtggtcacgctcctagtccaccttcatgttccatcctgtacacctggctctgccttctagatagcagtagtaaattagtgaaagtactaaaagtctctgatatgcagaaataatggcgtaagctgtctttctctttgcctcctctctctctctgcctcggctgccaggcagggaagggccccctgtccagtggacgcgtgacccacatggccttacctgtgattggagatggcttactctccttatctttcccttttgtcttgtatccaataaatatcagtgcagcctggcattcggggccactaccggtctctgcgacttggtggtagtggtcccccgggcccagctgccttttcttttatctctttgtcttgtgtctttacttctacactctctcgtctccgcacacggggagaaacccaccgaccctgtggggccggtccctacagtggggcactgcgagccccttgctgcctctgtgtggccgcccacccttccagtgttgccctgacgcccctcccgggctgtgctgaccacccaggcctcccaacttgtttcccagggtgctcgctaccacctggtttacggtttctttgtttagttctctctgcccgctgatgccagtttttgaactttatcattactacttctgtttatgtgtaaatgttccaggacttttatccaccgccctgtccctaggaccttttgcataccgctg

SEQ ID NO: 13621 - DNA, 1052 bp, Homo sapiens
ttttggtcatttttgcactttagtctttattttatatgcattcctgctatttccgtttatttaaatatgcttgaaattctctggattctttaacagatgttaggatatgagttttaagagagagtggcttgtgggtcacagccttgaggatctgagcaggattgccttccccgcgctcccttccccgcgtcccacttccctgcgccccgcttccccgcagcccccctccccgtgtgtgctcccacacagctgtcctgattgagcggttccagatcccaggcagcttttgtggccccgtttcctgcctgtggaaggtgacaaaaaacttgctctgcagaagttttgtggccattgaaagtagcggtttgtggaagccctaccacgtcatacggcttttcaaccacgttgcacagcagatcacggcttttcagtaaatgccattttgataaaagctaaaaattcagtttttgttttgcttgataattagattataggtttgcttataagttgactaggaattctaagtttgattttataggtgctgtgtgtcatagcagagtttgtctgggtgaataattgtagcaccactttcgtctttactgccggtgtgaatacactggggggaaacgaatgagaagattatcttattgatgtgctttaaacttcgtcactgaaagtcaagttcctgatttaaattcagctgttcgggtggagtttgtcattgctgttttgtgctttgcaaaatcccagtgatgggaattaaagctgacaaagggcaaatgtttcttaaacctttttatataccagaggtttacaaaaaactggactggctcattctgacacgaggggtggggctcagtccgggcatgtgagtgaaagcggtggggaggtccttaggtctctgacctgcaccagtcagcaggcgcagggcttgtcaaggtcagggtcttttgaggtgcggatgcttgtgaagcctgtggtgctgcagagctcagcacgcgcacaggaacgtgtgcgggacagaggacatatgtgctcagccggcaggagca

SEQ ID NO: 13622 - DNA, 1032 bp, Homo sapiens
tccaggccgcccctgtgatgctgactcagctcacagggctggtgagcagcaggtgatgggtgaggagcagggacagtgctgcggagacacagtgaggggagctgccacgcagggcacgcagaggaaggtgcaggcacccttgcccagcactgcatgggccggatgccgcggggccttccgcagggagcagttaaagcaggagagtaaggagagcttcctgtaagacctggcctccgtaaacaacgcattcccagtgcactggtggctcgttctcagggtgcccctgggtgctgagtcctgtcttccaggaaaggttgttggtgagcaccattgagcacctggtgtgtacctgcctctggctttctcttcttcccaacttacagtgggtttgacctgtgattttgactttaagatggtccaaaagcaacatgcattcagtggaaactgcttccactgcccatacgaccgtcctatttttcattttgagtgtggtattcagtgggtctcctgggatacccacacttgactagagtgggctttgtgtgagatgcttctgcccgactgggctaacatgcgtgatctgagcacgtgtaaggtaggctggctaagctgtgatgtgtggtaggagaggtggatgacgtgcatttcgacttagggtattttcagctcatgcgggtttatcgggatgttccttgtaagttcctcgttgtaagtcagttcctcgttgtaagtccactctttgtgagtaggtttgctcctgcctggaggacagcggcacggtgacggcatctgttttggggccaagatccagtgccttgcgtggtcctgggattcctggggaagggagtggacccatgaggtgggttagaatcgtgtgtgggattctccagccccctgtacctgtgcgtgtggtatgcgcggagccagccagcactgcctggcgtggagctggcgggttctcagtctgacatcaactcccggagaatggcatctgctgaactcaacgtaggaagccgtgcggggccagcgcgc

SEQ ID NO: 13623 - DNA, 1050 bp, Homo sapiens
acctgcaggaccactgggcctgggggctggggctagggggtcctggcctgctcacgtgttggatctgctgcgcccgtgggacgtggcccctttttgtgcagctcattagagctctcaggtaaaagcattcctcgattcaggctgatcctcaggagggctgacagtcgcttctcttttcctttgtattttgaaggaagcgcaacaggaaaggagagaagaatggcaagggcctacggcatttctccatgaaggtctgcgagaaggtgcagaggaaagggaccacttcctacaacgaagtggcagacgagctggttgcggagttcagtgctgccgacaaccacatcttaccaaacgagtcagtaagtgtgtgccgggggccgagaggctggggtggcggagcccagcggtgtggtacgtttcgctcttttaatatcgggaacagttaaaaccatacagaaaatgccaagtacagcataaaagaatttttaccaaacgagtcagtaagtgtgtgccggggccgagaggctggggtggcggagcccagcggtgtggtacgtttcgctcttttaatatcgggaacagttaaaaccatacagaaaatgccaagtacagcataaaagaatttttccgatccatttgctggcacgatgctttgtcaactccagtgagtgagcacgtgggctggctctgcacgtctagcggcccagaaatgcacaaatgcccacctcaccagctgggctcgacacccgagagcccccggctctccttctggaacacactcaggcttcgcacagccccgtcttgccctgcgtcatctgtggggtgggagcgctccctgagggcatgttggggtggcggctccgtgagcggggtgcccctttgagccagtgcccatggtctacagtttaaggatccaccggcctttttggatcatttggaaactccactccctgtcatccccaggcttatgaccagaaaaacataagacggcgcgtctacgatgccttaaacgtgctaatggccatgaacatcatctccaaggagaagaag

SEQ ID NO: 13624 - DNA, 1842 bp, Homo sapiens
ccaaaattggtgttttgttgagcgccgttgccgtggaggacacttttatcagggcacggatggctgtgcgcccgctttcccttagttctcccctcaggatcccgtttcctgagcgcttttctccctgggctgcagaggtcagcacccagcggccggcgctggcatttcagatgtccaggccaactcctcgctgtcacgtggacgcagggagggctgtgaggacccctcgagcacaggggctgcgttcttgtgccgccacgggccacctggctcctcttattttttttagcaaattgccttcaagaacctggtgcagagaaaccggcatgcggagcagcaggccagccggccaccgccacccaactcagtcatccacctgcccttcatcatcgtcaacaccagcaagaagacggtcatcgactgcagcatctccaatgacaagtaggttgtgggcggggagctgttccctggtcacccatctcttttttagggagccgaccctgttggtattgtcactaggacaagttttaaatgttgtacaaatagcaaatgttgcacaaattgctgtccattggggggtggtgggaggctgccgccatgtggcagatggaaggtctctgttccgggagcgtgtgccttagggcatgtcctcctggggagaataggcctcgatttgcctctcatctcatttacttcagagtttataaattctgtgaggagacactgatgactgggaaccgggaagctgtgtgtggcggtcagcgggtcagccgtcctggctccaccccagtgtgtaccgtctccgctgggagaccctgtctttctgactgtgcctttccccttcagatttgagtatctgtttaattttgacaacacatttgaaatccacgatgacatagaagtgctgaagcggatgggcatggcttgcgggctggagtcggggagctgctctgccgaagaccttaaaatggccagaagtctggtccccaaggctctggagccatacgtgacaggtcagcaatgcccagacaacctggcgtggctgtgtgaggaatggcccccagcctccgacggtgccctcccctcccggctcgggatgtgtcttgctgagatcaggcccacgtgtgtagggccaggagcaaagacaaaggggctgtgagggggatgagggcaggggtgtggctggggtggggtccagccagtgccgtgacccactggatatgggggccttgagtccacaggtggctcgtgtggatttcctatgtggtttgtgtgaggaggtgctaagtcaggattttaccctccaagtaggcccagaagtagaagttgagattctttgagaagtgcagttggattgctgatcccacccactgatggtagctgattggtcactagggcaaagtcaccaagaaaaagcatttcagagtcattggcgtcctgctccggagggccgggagcacaggagcttttgttgaaggagctttttttctgttctggtgaattctttccttgggggccgtagggtcccagccactgacagcaggatggctttaaggtgagaaattgtgaaggtgtcatatctgctgatccttctcttgttagcctaaacttggggtgtagatttattccctgagagggtcagagattcctccctgagctcttagactgccccagatcttgtgaaaatctggctggtccatgttgtcaggtgacagtgggctctggccgcccacgtgggctgggccctgaccccggcctctgtcccgtgcttcatggagctgccaggatgggctgtgggaagagggtttcagcttgacactttgattcggttccgtttcacga

SEQ ID NO: 13625 - DNA, 1048 bp, Homo sapiens
tcttagggtgtgccttagacatctacactatctacctgtgtatagtttatgaataaacatatacaaatagtatctatgcagaaaaagctttatcagtaaaattgcaagaggccaatggtgtggggaccttggcctcatgtgaggggcttttctgcttcctgggcagaaaggggagcccagagggcaagtggctgtgaggagggacctccaagtgatttgcgaaacatcaagatcagccttgagtggttgttttttttggtttgtcctcaagcttatttaagagctgcctcagaataacataatgaaaaacatcaatggctaatgcccaagctatgctctgtaaagaatctaccttctgggcaatgaattaatgctgtgctgaccagattgaaatggcctgtagtacagacagttctgaaagcaaactagggagacaacaaataaaagcagcttcaaggaaacgtggctaagagtcacttctgtggagactttctgccaatgtagagacttaagaagctgatctcagaagaagcggccagaacgtgaaaacatctccacattttcaagaaaggtgtggtttttttcaaatccccaaaaaataaaacgtagtgtaacagatgtattttaatacatgtatatcgaagtgaaattttgatatttttgacgtgtggagttgaactgcagtattttgaagctcagcacatgaagaaatattcctgttatccctggagaattctcaaaccgttggtgaaagccacatgtgtacgtgtctatcaccacagacacacagacaattacagaaaaggcaaaactatttacataaagaagtccggtttccagtgcattaaacttgacaccacggccccagcaactccaaggctgtgccgggcgggccaccccttccaacagacactcactgggaagtgcgaccggcccggcgcacctgcgtgggagcaagagccgtcttaggcctcggcacggtcgttggcaggtccatgttggctgctctgagccagattttcggtgggtgttgctgaaatgcatgttc

SEQ ID NO: 13626 - DNA, 1050 bp, Homo sapiens
agctttgctgtgcattttttgtgtgtttttatttatgccttgacagttgtgattgactaaatccttttaaatgcaataaaaacttctcagcattcaaatacacaattctctatcaaaagttaagtttaagggccaggcatggttgctcatgcctgtaatctcagcacttcgggaggccaaagtgggaggatcacttgaggccaggagtttgagagcagcctaggcaacatagcaagattgtctgtacaaaaaatttaaaaaattaactgtttgtggtattgtgcacctgtaatcctagctactcaggaggctgaggcaggagggtcatttgagatcataggagttcaaggctgcagtgagctatgatcgcaccactgaactccagcctgggagacagagtgagactctgcctctaaggagaaaaaaaaaaagttaagtttaaaagtactgacttaatatgtgactcatcatttttccaacagataaagagttctatctgtcttctacgcgggaaaatctatgatgctctagataaccgaaccctggctacctacagctacaaagaagctttgaagcttgatgtctactgttttgaagcgttcgatcttttaacatcacatcacatgctgacagcacaagaaggtttggaaactcaggcttttttgttttatgtttagcaaaattaatattgtttggattttttgcctctgaaatcttctaagtcaacaacaggccacatacaggtttaaatagacctactcactttcttaatgtcttcaaatgtaaagcacgttgcagaatgcagtattgtacggtgccttgtgctgtccgaatctagggattgtgataggaagaggccatctttttgagaagtgattgagatagtataaaccaggatttcagtatctcatgcagtgattctcaaccgtgttgctctttacatccttgggaagacagagaaacatccatgtccagttcccaactccagagcagatgctttaaagctcccaggtgatcctaatgtaccacaggcactgagaatcagtccaa

SEQ ID NO: 13627 - DNA, 1055 bp, Homo sapiens
tggaatggtgttgcatggaaatgaagatttttttgttatgcttcctgaatgtttactttgagaaatacgtcccgctgtggaattctgttctaaaattgagaagggaattaaacttactgagaggagtacttataaaacctaaagttataagttttcagaggctctcacatttgttcttgtaaatgttttaaccacttgggccaaacacaaattgaatccacattttattttgtttttgctcattgagtttatgtttacatttctatgtgtttcagtataataagcctagtgaaacggtcatccctgaatctgtagatggcttgcaagagaatctggatgtggtagtgtctttagctgagagacattattataactgtgattttaaaatgtgctacaagcttacttctgtgtaagtatatccatccatttttctgtaggaacatggagttcactccatcttacctaggtgattcacggacgtgctctctgaataatcttgaactagatgataatttaagttatctttaccaattgtagagcactgaacagggtgctgtcttaaaagagcaatttacagacatgaatttgtgcatatttgtagatttattacattaacttgggagggatatacatgttgctcttactgatcttgataatttgcaagtttgaaaattccattttggcacattgttttgtaaaatttattctcaattatgagactcacactgtagatactaggtgtttaatatgctgcacgcagtagctaagccatctcccacatgtatcagttttccagtgtacctaatttaaactttagctaaatgacatatgctattttttgtagatcttggttcggtttaaaatccttgaaattacaaaaattttaattggcaaatacacataacctatttattagtttggtgcaaaagtaattgcagtttttgctgttgaacgtagtggtaaaactgcagttatttttgcaccaacctaataggatttcctgttggttttgattcttttaaataagcggcctacttattttatgtattacaatt

SEQ ID NO: 13628 - DNA, 1026 bp, Homo sapiens
ccttcatctaactctccagttagagagttaattttttatctagaaggaaagacaagtatgaaatcattgctgtaagagcagaattatatgattgtgaagagttgtaatgaaatcatgtcttaaattacatgtgatacgaacaattgttctttttctgctttttcctgaacagaacttttctatctttctcataaactggtggatttatatcctagtaatcctgtaagtaatataacttttagtcttagtttttttttttttacctgtactttaagaaaatgcttaactcgtatttagacaatagcttaagttcaagcaaatgatgttttattaaagtgttgcaacagaatctcctagtgtttattgtacttacaaaagcagcattaacttttcaacccatgaaggtattttttaattataccaaagcaaaaaggtttttaaacccttttttctgattatagaagttatacatgcttattttaaaatacttagcgtatagcaatataaaatactgaccatgacagtcacgcctccctttcctaagaaatgtggataattgtttggcagctttctcacattgcacatgtaagacaacctgttgaattgtgtactgattccaaactgtcatggatcggaatggagaactaggaatggaaaatggaatcagggactgcgtctttaaggacaaaatcaggaatcagggtgtaagactcagacgacaagaatttgcaccctatcccagtgtgaaaccagagcaagagaaaaccagctaaatagtcagaactcggacagagagcaaggaagagccagggtcaggctgggggagatgagcagtgcaggggagtcaggactcacaggctggtttttgaaacagggactcctcaggggccttgtcttgtgtagacgtctccttgagaaagagccatggagtgtctgccctcttctcttggaccttagtagactgtattagagaaatgtctaacttaactagaatatgtgataaggaacatgtagtataccctctgt

SEQ ID NO: 13629 - DNA, 1890 bp, Homo sapiens
tagatttttggagtccttatgctgccattttgaaagtacttctaccaggtgtaaatatttttaaagaatttgtcatgaccttctgtagaggatataatcttaatttgagttatgactctagattagaaccaaagcacacaccaagcaatcagtatttattgatgttctgagatcatcatcaaggaaagattgtcttattacacttgctttaatgcaatcactgatcccaatcgtgtgaacagatgaaaattcaattaaaaagtagttctgactctgcctagaactgtctcagaaggtgggaaaattgaatcaatacacagggcattattcataactcttctgcatagaactgattataatgggaattcacagaagggagagcatttatgttagaaaagtcagaggtagcttcataaagggaagtagaagttgaacccaatcttgaaggataaatggtggtgagtaaataagaggaagaccagtgtcggctggggcatgacattagcatcaaggaggaagacagcaccacagagacctgcccttttgctttagagagtttttgtttttttactgtggaataataatgaaaattaaaggtaaataagttgcagatagattctagaagtggcagctgattagtccaaagcccattaggcattcattaaatatttgtaaattaagagaaaaaagtaaatgctgtgttttggctacctttaaattattttgcagataggatttgaagttgacagattaatttctgctaaatcacagtttttggtgttgaatatgtgaaattttccaattttttaggtgtcatttgcctatgctgtatattggattagaatatggtttgaccaataactcaaaactagctgaaaggttcttcagccaagctctgagcattgcaccggaagacccttttgttatgcatgaggtcggcgtggttgcatttcagaatggagagtaagtactggaagaccagaaacccttctgttaactagtgattgtaaatacagtaggtgatcactagagttcactgacaaaagcgactcttcagtagatttgtacttttaaatgttctattttaggagaaggagatagaaaaaaaagagagaaactgttatcttggatttccttaaaaattctaaacccaggttttggtctttttttgatctgagctaccacttcttttcttacatgattggacagttcagattacacataccccacagtgtggctgggggcactgtggaatccttagttatctctgtgttgataaggagttgaatttacgtatttgagaagaatttgacatggtttttgaaacaaaagtgttttctatttagttactagtaagtcagaaaatttaattcctggtcagtgtaggctttactgtactctagaatatttgtagaataagtgatttggtgttatactcaaagagaaaaatgtatgtaatcctttgcatttcatgatatacaaattttaaaatggtaaattagtttcagttttttttggtttttgtttttgtttttttgagatggagtctcgctgtgttgcccaggctagagtgcagtggcgcattttcagctcactgcattctctgcctcccaggttcaagcgattctcctgcctcagcctcctgagtagctgggattacagatgcccaccaccacgcccggctaatttttgtatttttagtagagacagggtttcaccatgttggtcaggctggtctcgaactcctgacctggtgatccgcctgcctcagcctcccaaagtgctgggattacaggtgtgagcctccacgctcggctgtaaattagtattaatactactacagtgtcatttatggcatgtatgtgttctaaaaaatgggttatctaggta

SEQ ID NO: 13630 - DNA, 1075 bp, Homo sapiens
ttcgtgcctgttttgtttcattctattctgattttcacttctcagcttcctgctgttactgtttgtgcacacctgcccacagttttcttctcccttggctgttagctctctctgctgttacagacacagctttgcctccctgccaagcgatctgcctgtccccatagacacagctttgtttactttggtctctcatgtcatctgaacttataaacactatttctgtgtttgcacatgcgtgtatataaagcaggtgcctctgtcgcatagtcttgggtagttctggataatccaagtgttttgttaataggggattgccacttgccaccttgtcagttttctaagaagtgactgccttatgccccagacgggctcagcagcatcagcatcacctagaagcctgctagaagtgcagaatctcagaccaactgaatcaaaatctgcagttttagcgtgatgcccaggggattatcacgcacagaaaagttttgagaagcactttcctaaaccatacttaagttgagcctgtattctttgatgattaaggggcactaaatttagagtcttacagaaacttaatggttttaagtatgaaagcacaacactattgaaatgtcaaaatgctcattaaaaagttatacgaagagggggaaaatattgactttattagaaactgcagcaaatgtcaaagagaaacagtcatgcctaagagtcattaaatgatttgtttttcattcacatgggctgtgcctcctagaactggtctcaatagagttagagaatctgtggctcaggtctgttcattcatttagttgacatatatttaatgagtgtcagccatgccataggctctgagctaggccttgggatgcaaaggggaatgagtttactatttcctgacctcagatcaactggcgaatgtaagtacgtaaattgacagtgaaaatacggtgcaattgaggaactaaaggtgcccacagagaaaggcagttcacccagaaatgagccttttgcatacacctcagtcctgaaagtcatcagacatcagctaggcaaaaattagggcaagggtatt

SEQ ID NO: 13631 - DNA, 1070 bp, Homo sapiens
aatttagtgcttttactgtagccaataattgtgttctctcccacagaaagtatgctgaggccttggattaccaccgtcaggcactggtgttgattcctcagaacgcatccacctactctgctattggatatatccacagtctgatgggcaactttgaaaatgctgtggactacttccacacagtatgtcttttctttgtacctaattttaaatctggttaacattgaccacttccttttttgaaaatattttttctaggtaatattgacttactattttaatattctttaggcaaccttacgtgttattcttttctttgcagagaaaagcatgtgggtgttgtacagtattcatcaaattagaaacaaacatgaatcctgtccttagtgtttgcagtgaggtgcgcaggtgcccagtggcactcaccagtgatctgagtgctgagcacggggttatctgtccacagtagcccctttgggaactcgcagtctttctgttcatgactgtccccttagatcacattagtagatgaacaaaacagtctctgcagtcatcacaaggaaagaacctttcattaatccatgtaccatattccatcaaatttaagacaccatgagtaagcaggatgaccacaaagaaaaaagtgctgccaattaaactttaacataattttttcccggcacttaatttttttgtacttagagaaaatattcttgaacatatttaggcagatttgtattactctagtacatacatagaaatgtacatataagtgaaataaatggttacaatattcagcccagagggccagtatctgtgttttctcaaaatagtgccctggtgctagcacacacgcccagttcctgactctgggtttcctcccagccacagacacctgctttccaactctctctctctctcgtccctctcagtctgctaaagtgtcaacagaaggtttttagaaaaccacaattcccgcatctgtttaagtgttcctcgcatggtttgtgatctagtctgtgctgccaacataaccaccaagttcacgcttctcaggcaggttacccata

SEQ ID NO: 13632 - DNA, 1080 bp, Homo sapiens
tctgtttctataatgggaaaagaaatcttagcaacatttttctgataaacaattgaagaggctctgtcattattttataatgcagggtataacaatataaatctttacatttcaatagaatgttgagatgccatacatttccataacagtgaataagtaatagtataagtttggatggaattgctgtacttgggcactcgtttagttataaacattatgtgataaggaggatgtggtgaggttattgagatctaggataggaaagttgcaagcttgctaactcccgttcctactaaagtaattttttttttttttgagatggagcttcgctcttgttgcccaggctggagtgcaatggcgcaacctctgcccaccgcaacccctgcctccctggttcaagctattctcctacctcagcctcctgagtagcttggattacaggcatgtgctaccacgcctagctaattatgtatttttagtagagactggtcttctccatgttcaggccagactggtcttgaactcctgacctcaggtgatctgcctgcctcggcctctcaaagtgctgggataacaggcatgagccactgcgcccagcccctactaaagtaatttctgatgtaatttcccccaaagtcaaaaagatcaggtaatgtgatacaaaacagagcagagccttagattttgagagggatctgtctgcttatgtgtcttggggttccctgaggaaaacagaggtttctcctaaaacggggtctgtggcaccctctggttttcccaaggagcccgaggctgtcagaaattaccttgggtcctctcatgtggacatccagagtggcgagaagacagactggggaactaatctagccaactgagaagaaaaacaaaaaatgagtaatacccattgtaaagttggataaactgaggcacatcacagtttaaaaatgcatgttcccataggctccacagctcactctcttaaccatcctgtaattgtgcctgctctatgcccagtcactgatgcacttgtgtggtagctcatggcacacctagcaaacagtttccctgcccccttagaac

SEQ ID NO: 13633 - DNA, 1035 bp, Homo sapiens
gcctcggcctcccaaagtgctgggattataggtgtgagccaccgcgcctggccacacagtgcagttcttacctgtaacagctgaggagaaagttgtccacaggcctcatacgtatttaggaggccttggaaatgggcaactgttgaaacactggagctgcaactgcatgtgcttctgaaagtcttctgacacttcctttgcaaatggtggaaaacaaatgaaaaagaagattggaatgttgttttccttctgctctcaacttgtgctcttaaaagtataatttgacttaaatgatagagatggtgtataatgatggaaatgataaatgatggagttttgtattttattctaaatagtataatctgacttaaatgataagagatggtgttatataacaatagaaatgataagtgatggaatttcttattttattctaattatagtatttctttttaggagcagacattaaagacaaattaaaatgttatgactttgatgtgcatacaatgaagacactaaaaaacattatttcacctccgtgggatttcagggaatttgaagtagaaaaacagactgcagaagaaacggggcttacgccattggaaacctcaaggaaaactccagattccagaccttccttggaagaaacctttgaaattgaaatgaatgaaagtgacatgatgttagagacatctatgtcagaccacagcacgtgactccagtcagtggtcctggtcccactgtcccagtgtaggttagtattccttcacatcctctccatggcttaagaatgtcccacttcctaacgtgactccaaactgcatctctacatttaggaacagagacccgccttaagagactggatcgcacacctttgcaacagatgtgttctgattctctgaacctacaaaatagttatacatagtggaataaagaaggtaaaccatctgttatgtctttttttttcttttccaataaacttttattttggactaatttttgatttacagaaaaatggcagagatagtacagaga

SEQ ID NO: 13634 - DNA, 1016 bp, Homo sapiens
aagaaaagagtacggaagtaatttataatcaacaaatatgtgttcactgagtaagtgatactgacatggcatatggcatacaagcatcctgagagtaggatcatggggcattcaatggtgattgtccctagagctggttagggcccagctttccactgtccttgtactgctgcgtgtacaatcggtgtcttctttaacttcacagagatgccacaaggcaaatagcattgtcttcactttctgtgtaagaaaactaaggctcggtgagagtatgcagagctggttcatggatttgtttgggtccttctagtttcaaaacccgtgaatattttcctgtctctaatgctaatcttagcaatatatttggaataagcatataaacatataaccacagtccactcaggtaataggcaactaaattataaataaatgctcaacgagattatgagtgattgaatgagctatatacaagaataataactggtggaagtgttattcataggataaagtagaaatcatttaaatggctaatagtataaggagggttaaatcaagcaggtgtggaaatagctgatttacatatatagtttatgccatgtaaaacgtttataatctaatattggatgaaaaacagatacaatattttatgtacagtataatctaaaatttctatgtttagttaaaaatgcaggaatataattatcaaaatttgagtgataaaattatgaataatttttttctttgataactcattttatatttaccaaagatcctccaaagagattatacactttttttaactagaaaaaagttatttgttaaagagatcataaatgacataatattttacagaagttaagagctgagattgtgagaatttccagggactcctgccatcagcccacctcgcatcattgtttacatggaaatgttgggactgaggtgacctcatgcctctcaattcccagccagccttctctccctctggctcttagctagcctgttaaacagaaaat

SEQ ID NO: 13635 - DNA, 1023 bp, Homo sapiens
tctaatctcactagagtacttcctgttgcactgacctgaaggcattttatcatgtactcactgtaatgaaacaatacattcttaaactggcttgtgtctgaactgcagacatattcaggagatttttcttctgcttctttcttgcccagttgtataaccattcaccagcttgtgtcaatgctggagaggaagtactgccatagaggaagttaactcaccatggttgtaagctgttggtgtctaaacaaagattggaaacaaagagggcaaatacaagtagtttttcaaattgccctgaatttgccactgaattaaactgtgtgtctgcaaattagctatacgttttctgtaatggagctgcccagggccgaaacaaaattagacagattaagcaaggcaagcatttccttctttccccactccaaacaaaataaagcaggttttcattttattttatttttaaattacaaagtctcattacatagatataggaggaatttgcagtagtccctgtgagaaatgctggtgtttcataccagggggatgatattggatttatagtaaaagctggaatcagtgcttggctttgacatcatatattcattcacctgatactcagcaagtcactaaccctctttaactttcagattattcaaatgtaaactggctatgatgcaatctatgtactggatattgtattgtaaaaaattagtaataaaacgaaaataacatgcaaaaatactttgaaaactctgtagttctgtaaataggttttattctaaaaactgaaaataatgtaagagttcattaaaggaaaatctgaaaatacaatcaacaaatctaaccacatatagtcattcttaaactttgatgcatgcacttctaagttctttaggcatatacttttttgtttacagatatgagaccatacttattcttttgtaaataaccttattacttaatgacatcatgactatatttttttgttaatatatattcatgtgcacttacaacattatttgc

SEQ ID NO: 13636 - DNA, 1046 bp, Homo sapiens
gctattgagtccaagtgtggtggcccacacttgtaatcccagcactttgggaggccaaggtgggaggatcatttgaggccaggagtacaagaccagactggacaacatagcaagaccccctctttttttaaaaaaaaaaattagccaggtatggtggtacacctgtaatcacagtgctttgagaggctcaggtgggaggatcacttgagttcaggagttcaagactatacagtgagctacgatcgtgccactgcactctagcctgggtgacagggcaagacctgtttctaaaaataaaaaaaaattaaaaaaaaaaaagcttttgagaggtatagaaagataaggactaaaaaatggtttttggagcaggtgtggtggctcacacctgtaatcccaacactttcagaggctgaggcaggaggatcacttgaagccaggggttcaagaccagcctgggcaacaaagcaagaccctgtctctctctaaaaacaaacaaacaaaaaccccaaaaaagtggtctttggatgagaattttggaatagtgctagacagaaggaagcatgagataatactagtgagagagtagactgcagagtgagataggaagataagccaccctggacaaatctgtaaaggttaggaatgaacccagtgacggctgaagggcaggtgacaaagtgaggttgagagatgcgtttttttctttaatttgtttaaaatgggaaatgataccaattgctcagttgcctattccccttgcccagcctcaggtctgagtataattctcaggcctgatggggtttgcagtgtgggctttatctccttgtagtcctggggaggaatggaggagtagcgttggtgccactagggtgtcgttctcttaagacagatacaatgctgtttctttacaatactggctaagttgctgtcacaaaaatactccaaatatgcagtagctcaaacaagataaagcatatttctttctcacttagcagcctgaaagtgggcaggtggttctgggtgagtaggtgtttttgttccatttc

SEQ ID NO: 13637 - DNA, 1042 bp, Homo sapiens
taagacacaggaatttaaaattaagtcatctgtgcttttgattagaagaatgtacttttcagtagtgaaatacagagtatcttaccagaaaaacaggaagctgaaatttatcattcagaactacagcttgtacactacacggtccacagagccgagcaataacttctttacccaaaaagtttgcatggaagataaacagcaggatgccagagcctgaaaatgggagatgtgtgtgaattacttcaaaggcaaccttcagtccccagaggaacactcaacaccagatggaagcaggcccctgagctgggcctggtcagacaggcatcacccactctgcctggaggctcagaggaggctggccctctcaaagctcgtgtcacctggcatttttcaaccacagaactctttttaccttttgcccaagtaatctctgctgacagttcctggaaaagacttacgtatgattttctacactgaagttatttaactggtatttaaacactgctgctgaatgtgcacacgtcccagggacattcctgtggtgggcatctttgggtgtgggtctgagtggttttccattttcttccacatacccttttgccccttccaatttttctgattaatacataaccaaaaattggccaggcatggtggctcatgtctgtaatcccagcactttgggaggcagaggcaggcagatcacttgaggccaggagttcaagatcagcctggccaatatggtgaaacccccatctctactaagaacacaaaatttagctgggtatcatggtgggcacctgtaattccagctactcgggaggttgaggcaggagaattgcttgaacccaggaggcggaggttgcagtgagccgagatcgcaccactgcactccagcctggggaacagtgtgagactcctgaaaaaaaaaaaaaaaagttggtggatgcagacattgtacacatgctgagaaaactgcaggcccagcagttgtaggtgtcagtgggggctcaggttcaccagggccagctcagggcatcgttct

SEQ ID NO: 13638 - DNA, 1070 bp, Homo sapiens
agcagtgtgaattccatagtggtcttgacttcttagcaaggatttgggataagtctaaaacttcagacttaaagctttgaagcatgttaactgcatgaaatattaaacatttcgaacttctttagcctttgtcattttgtgacccaggtttttcatagtctgctctatgtctcctgcttttccttgttttgctaatcatcctccttgagctccactgttttcattctgggcatccaatccagcctttcatggtgtgtgcttcatcaggcccctggttcacatgctgagtgccttataagcctggccagcactagtatattctcattaacaaacaaacagtcagcttcgtttgggagggtgcttcactttcaaagctacccagtataatgcatacaatgcagtacaagcggaactcactcagaagtagcacctgagcttcaaatagactctcctgatcattctactgagtaagattctccacatttaagaatcaatacaggatttacttgcgaggatagtgtataaaaatggaatagtttttctatttctggactgaaaccaaactcctcatatctaattgtagttattcaacattatcagaatccctatttattttggcagaacagacaaaaggacgtggaatgtactttctgctacagccattacagtcaactagatttgagtgctgccgctggtaagttaattgaatagccaagttatgttgtccttacccaagtagacagtggaaaggaataatggcagaggccatgatgcgagtctggccacagccatgcatcccatctgtggtgatcttagtcctgagatcacctatgtcctaggccacgaactgaatcatgtactagtaccatatcatctgacttcgtagctttccaggggaaaagactaggagatccggacatgactaggtctgtgtcctcagtcacataagctgtgctgcgtacacttgaactgcactacacaacattgccctgggccttgacctgtacttctaaatgttataataaaccttttggtaaggtgctgcctgagaactgctttgttttccagag

SEQ ID NO: 13639 - DNA, 1067 bp, Homo sapiens
gttcagtttgactgttttcataaacgtaaggtcttatgagctcctttgtagtcagtccatcctgcgtcagaggacgtcactgttgtgtattgatcaccgttgataaatctgtttttgaatttcatagaaatggaatggtacaatatgtactcttttttctctccggcttcttccacttcacataatgtttttgaaattcatctgtgttgctgcatttatcagtacgtggttctcattctgctcaatgacatatctttaaatgaatatgtcacattttgtctgtctagttttctattgatatgctcttggggcagtttttatttttggggctattgtgaataaagctactatgaacactcttgtacaagtcattatgcattcattcctcttggggaaaattcctaggatcagtattgctaagtatagagtagcttatgtttcttagaaactcttagagtatagggcagtttctttctttctttctttttctttttttcttttgagacaggatctcactctgtcacccaggctggagtatagtagtgcgatcatagctcactgcagccttgagcttctgggcataaaccatcctccagtctcagcctcccgagtagctgggaatacaggcatgtgccactgcatctggctaatttattttttttttttagtgagagacagggtctctcactatgttacccaggttggtcttgaactcctgggctcaagtgattctcccacctcggccttccagaatgctgggattatacctgtgagccatactgtcagtctagggcaggttctattaatatgtttcttagaaactgccaagtaattttctaaagtgcctgtcctgttttcttttcccatgaacaatgtataagatttccgttcctccgcatccttgacaacactccatactgtcagtcatgttaattttagccattttagtgaatatatctcattgtggttttaatttgcttttcctcataactttttttagtgagcctgacgttgtgaacattttccgataacttctgatgttgagtaccctttatatactgcttttt

SEQ ID NO: 13640 - DNA, 1048 bp, Homo sapiens
aaatatgttgataccagactttttcacagtttttcctgttatgtattactaattgtcttcagtcaagaaatgattatttttaactcctgtgacaccaaaatgagttacatctctacaaaaatcagtgtttaacttttattcttggtacatgaatacagaaaaaaaaatgataaaaatttaaaaagggacctgccttgagtttttactttgtgtcatcttatacattactgaagtcttctgattggaatgtggttccctcccccaccagcatgcatatttaacggctctagcattaccttactgggcagccatagaactttatatttgatctgttgctaatatgtagatttatgcatgatgattaattgggaaaaataagactacttcttttgtttcttggctgtgtattgtgctacattgccctttatctgaagccattaaatttttttaaaaaattagtggaagatgggcagtttgtggaaaataacatgctccaagttttagggctgggaagtacaatgtagaaaagtgtgtttacattcttagattctgctttgcaatagaatgtacttaacttatgttctgctgtttgtgctacaggccttaaagtcaactaaagtctaggggttcatgtcatgaactttttgacatatgaatggatgaaatattccctaggttggctgaaaatatagatctcatagtttgaattattttggaattacttgaatgatatagaagactaacctatcacagccagtttctatttcttttctgtaggtcataaacacagcatagatacacatgttaaataatttagcagtgcttgaaaccctcttagttacatactgacttcctacagtttgctatgtagactgtagtttcttgcagtttgaagtgtgaacacagtggacccatcctttgccctgatagcatttgtgtaatagagtgacaaataatatcttaccatgtagcgataaaggcagtagagaaaatgacagctactcttttagttaaggggcctagaaaatagctatcttaggagacaaag

SEQ ID NO: 13641 - DNA, 1034 bp, Homo sapiens
ctgcttgtacacataaataaaatttcagttctgtcttgtggaatataaatcactcaaatttcacatgaggtagttcagtctcaaaattaagaatagaattagaattaagtaggttcaagtggaaatgtacttagtttgaacacatttcattttagattttcttcatattttaatataaatttagtcaataagacaaattattcattaaatacgaggtcctacattgtgttgatagtaatataagtggaccttatattttttaaatgctttgtttaagtgttttgttgatggtgttgaagactttgaaatagataccttaatctaaattttatcttaatttttatttttatttcattgtctaaatttttatctaaaattttttctagctctttattacaccaagacagcttcacatttttatttatatattgtacatctcatgtaaggaattaccgtatataagctagtgtcataacttaagtagccacattcattcagtatgttttatgttttctctctgactggatctctgatacattctttcctgttctagctgcttttatgcaaaagggcattatatgtttgtcaatcaaccaggcttctgtgactgtttagaagaattatgtaaatatataatcctgtgcctgttcactttgccatgtttggaatacaagttatttacattattatctttatggttatttaaataatttactttttgcaagttatttgtattatttattacgtgaaaattgagaaaacatcttagtgtacctttcgtggttaacttttcctcaggatatttttacattattagataatgtaaatcagtattaagtttcagacattctttagatttaaatatgttgcctggtgtttttatgtattgagaaaaagtaaactaaattctacatagtcattctgtatgacttttagtaatttctgacctttttggtgttagaggcaataatagtaagttgcttagttgttaatcactgtatgttaattctttgagttgattagaaaatatgttc

SEQ ID NO: 13642 - DNA, 1031 bp, Homo sapiens
atatttctgaggtgtcagaggatagcagtgatataaaaagtcagacttcttattttcaagaataaggcagtaaatatccatatacatatcttctaattcaacagttattcatgttttcctgtgttcatagatgtttttaggcatggactttttggggggatggcaaactactttaaagtaagtagcaggcttgatgttacttgtcccttaaatatttcaacacatgcctccaaaaacaacatttttaggttaatttcatactgatgaagattcatttcttgaaatcgaagagtccacctcttatgtagcccagcatggaaacatttcattctaagcaaatcatataattcaatgaattgggagtagtcttatactttacaagatcattttgtttccagcagctttcattactgaagtttaaaaattaaaatcatttttctctgttcactttacatgtttttctggtggtgtaaaatgaagtatgtctgccatttcctaagtgagtatccatcagttaatttatggactgttactctggggaaataatgaaaaaaaaatgcagaaaaaaatttatagtgtctaatgtttaaaatctggagttttttaaataccaaaagctgagatgagcctgggcagttgtagtgagacctcgtctctacaaaaaataaaaaaattttaaaaataaatatcaaaagtagtgtcttctatgtgttgtgagaatattttgaatttgtttttgtttccttgattatggaataacaatattaatgattgaaatttgaagcttgtaagacagtgtttaaaggcttaccacaaaacttgttttctgattttatttgacctttttttctgtaaaaccgtttagaatataaatacctctaagggttcctctttgttgaaacttactatttgattacacttttttttacctgatgaaattaacagtgtatgtgttttttctattttatgacattttttccttttgaataacagaagtctgttatttccagattgaagatactgaaattctt

SEQ ID NO: 13643 - DNA, 1031 bp, Homo sapiens
tctaatatttctggctcctaacgattttcttttttgttttttttgagatgcagtcttgctgtgtcgccaagcttttcatagagatggggtttcaccatcatggccaggctggtctcgatcccctgacctcaggtgatctgcctgcctcagccccccaaagtgctgaggttacaggagtgagccaccgcgcctggccaacagttcttatttaatctttctcatgaaagtttaattggttataaccttattgttctgttatgtaaccttctttagtgaaggaaaaggtaatagaatatagtttgctcacactaaaatattttcaattgctaaatatagttttttttagggaatttatttttaggaatatttagatattcctaattgattaaaaaggctgaatcctgttgtcagaacttactatatttttctctagaattatatattttttagtggatttaaatgttctacattattttagcattttcgttttttgagacatagaacctaaatagcatgtggtgattcctggacaattcttaaagctttttttgagataaacatgagaggtctttatcaataaagaattttgactgtgacctaaaaaagagtattgattgtgcccattaagattgcattcactcaaacaagagttatattgataaagtgttagatgaatacctctcgtcattgatcattaaatggtgttccagttgacacagttaaagcagtttttatttagttcagtgagtgtatccccaagtttaggtggtcatactacactttagctttacctgagtactgtgttaagtcattcctttaaattaggttattggtaatacacacacacatatacacccacaaaatatacgtgttgagtatcccttatctaaaatgtttgggactagaagtgtattggaatttggatttttttgaattttgaaacatttgtgtattatgtaatgagatatcttggggatgggacccagatccaaatatgaaattcacttatgtttcatatatgtcttatatac

SEQ ID NO: 13644 - DNA, 1028 bp, Homo sapiens
attctctactgagagtgtcattaaatagtcttggtacttttgtgtgtgtatatgtctgtgtttataaaatgatgtgatttgtttattattcctgctgtgttgtaggtatacctcatgtcttttcatttgaaatggtaagttctaataatttttggttcagaatggtaagattttttagctaatgttaactcttttttgagcaatcggagaagaggagagtcaagaccggcaaatagacatggttaactaatgtaaacatatcttgtgcattgtctagtgtataatataactaataataattttaattattagtttgaattagtaacagaagatcctcagaaggcataaaaatttaacttgttacttctgctttgtgacttgtttaatgtatttggagccaccttacagtgcttgttctacatagtgacggtaaattatattttaggctagtcagtatctaagatcttctatacttcatattgaggatagtatctctgtagtatcatctaaaatgttagaattttgtactaaaactaaaaaattataatgtctatgttcagtattaagtaacaactagtgagatgtaggctgtaggaactctggtttgtaagcatctgatgagatgcagttatgagttagattggtaattattataattataaactttcaaaggcttttacttatttgagttagattgataattataattacaaactttcaaagacttttacaattcaaagtaactgaaagtttatgggtaagtttgtttcttttcttaatggtatcttatactatattgtgcactatgtgtcaaaccctggcttttctggttgttttaccatagttttcttaagataacttcttcatttgatttattcttgttttttctatatatgattttaaccaattgatatgattgttacagtagtttgttttataatggcaaattttaaataactttgatttttattttggtaccacttaaatgtgtaaaaaatgactatgtatttaaacctgtagctttgagt

SEQ ID NO: 13645 - DNA, 2447 bp, Homo sapiens
cactgcaacctctgcctcctgggttcaagcgactctcctgccttagcctcccgagtagctgggattacaggtgcctgccaccatgcccagctaatttttgtatttttggtagagatggggtttcaccatgttggccaggatagtctcgaactcctgacctcaggtgatctgcccgccttggcttcccaaaatgctgggattacaggcatgagccaccacacccagctgagaagtttctttttcttgtatggtacatattaatgtttgccttttcaataaagaaaagaataattcttcatacccttttcaggtttcctgcattgaactaaatatatacctgacttactattaaagcttattagtcccatttgagtagttgggaatagccctaggtgtttcaacacagtttattcaacacacataataaacttgagaataaaggtatgttgtatgctaaggcaacagtttgactcagttgtatttctttgcttgtcagaggcattccattgtagcacccgagggactgtgaggccagaatgattaagggaatgttggcagaggctagcagtgtagtgcttcttccaaggacaatgtaaaacattttttttcttttagagatggggtcttgatatgttgcccaggctgggctcaagcagtcctctttcctcatcctcctgagtggctgagacaacaagcacatgccactgtgcccagcagaacagtgtttttccaatgtacgtaataaacactcaaggagcttttaaaaaatgtgggttcttagatcatactactaataattgatttgttttgtgatccaggtagattgtaatacattgatctttgatcacatttttttgctaaatccagtagttttcaaccttgcaatatatttgtggaacttaaggaaaaatgcctgagattcagtcctccaagtattttgattcagtgtgtctaggttggtaccaggagatatacgtgttaaagaaaactctacaccttgcttatttctttttggtagcgaagattcaaaactactggccttgtattgaaatgagacatactgaaatgaaaatagttgaatttttcatggatcctgggagtgttagtggaaggcatgcttgatgtggttcaacatggtgtaagatttatataggatgcaatttatttatttattgatggtatcttgctgtgttgcccaggctggagtgcagtggctattgacaagtgtgattatagcacactacagcctcaaactcctgggcttaagtgaatcttcctgcctcagcctcccaagtagctgggagagtaggcatgctgctgtacccatctttcttcatttttttctttcttttgattgggtctccctgtgttacccaggctggtcttgacctcctgaagctatcctcctgtctcagtctcctgaatagtgggactacagttgcctaccactgcatatggttatatatccatctttagaacacggttcaaacagtatgacattctacgtgaatagtaccctgcagaatttgggtgtggcaaccttgatttgggctttcagactatatgtgcaggacatattatctcaaactatgcattaattttgcgtgcatagttctaataattttaattgtctcatccagtcgaggggttgacagactagaacagaccaggctcagttcacatgctgcctatttttgtaacacttttttttgtttgttttgttttgttttgtttattttgccctacaaaaactgatttgagtagttgtgacacaactatgtgagactgtattgagactacatggcctgccaagcctaaaaaatatttacacctgaccctttacctgaaatgtttgctgacctctgaatccgagagttgaagggaatctataaaagtggctcatattaccaaactcgtagagcttgtgaagaataatgcaaatctattcatttatatattcttttccagtgtttttagaaggctcactgagcacagtacctcatattccagatccaaggattcctgaggaatccaaattagtatccagaaggttcattggtagtcatggttataaaccagagcaaaagttaatgggaagaaatggtaaagagtcactgcattgcagctgacacctgggattttaaaatctttttttcgtttttgagatggagtcttgctctgtcgcttaggctggagttcagtggcgtgatcttggctcactgcaacctctgcctcccaggtgcaagtgtttctcctgcctcagccttccgagtatctgggattacaggcacgcgccaccacgattggctaattttttatttttatttttatttttatttttgagacggagtcttgctgtctcgccaggctggagtgcagtgacatgatttcggcccactccaacccccgcctcccaggttcaagtgattctcctgcctcagcctccc

SEQ ID NO: 13646 - DNA, 1063 bp, Homo sapiens
ctcttactactgcaaacttaagcactaaaagcaatatgaatgaaagctctacctatctcaaatattttgtgttaatgggagtatattaataggaaagcattgtattaagaatgcattgaggccattctggcagttgttcttcatttactttgaaaactgtctttggagaaaattgttaaacaattttaatgctgtgtgtgtgtgtgtgtgtgtgtgtgtgtgtgtgtgtgtgtgtgtgtttaagctttgaaattaggccctcttatgtgctttctctttatttcactgttcagtttaaagggaggaatcaaatggtaagtgttcaacttgtccaagtaatgagtaaagttgattttctttgttaattttaagatgccacctctctcttcttgccttcctaatagaaatattccaacaaaactaagagttatgggacttttaagtataaaataaatattgatttacatatttcacattttaaataataatttcatgtaacaaagaaagagtgaaaacacttgtcatatctggtcatctttttgtttgtcagccttcaacttgatcataattttatgacacatgggaatatatttttaagagtttcaaggatgtaagccagtacttcatcaatatcagttgtcagttttatttaatacttgatttttccttagaagacaaactttttgataattactgttgtaactataaattaaacaacattttttactcatttaggataacattcaactgccttaagaatgtatacattttaataatatgtcttaattgcatttaggtttgtctttaccataatatagagtgtattcaatttttttccaggcagtatttactaagtggaaattttctacttatcacaatttttggacacattaaaagctattattctggaagcaatgagaattttatgagattgttttttataattgtcttgtgattgttttcatattaggttactccaccaactgtagattaagtagtttaaacacttcagtacttaccagtctttatgggaaaaatctgcattggactaaatgacagattt

SEQ ID NO: 13647 - DNA, 1108 bp, Homo sapiens
ggctaatttttgtatttttagtagagatagggtttcaccatgttggccaggcaggtcttgaattcccgacctcaggtgatgtactcgcctcaacctcccaaagtgctgggattacaggtgtgagccaccatggctggctgagattttttcctttctatagtaagagagtacatgtttcagctttttttgactctcaatttcttgaatatacgcaaataactatcctagttatgattttactttgtttttctggtttaccttagctaagttactttatttctttggcttttttgatttattaaaggcttggagtgacatagaaggaaggtaaatttaggatgccgtggtcagtcgtgattacaggtttggcataatatgattgcataaatgatttcattttacatgaagtaaaatgtccaatggcagcccacatgttatgatgctgaaatttttatttgaaaaattttcagacatgaagaggagcatcggcggcgtgaggaagaaatgatccgacacagagaacaggaggaactgaggcgacagcaagagggctttaagccaaactacatggaaaatgtaagtaaactactagttaactaaaatgattttatattttcaggtttatgatgcatatttagaatgctttagattttggtttatacagtagtcttttctaatctttctaaattcatcatgtttgataaattagtgattttcttaacctctcataggtggtaaagtaaaattagtttctgaagatatctatgttttatgaagtggatgttatattttttcctattattttggttgatctttaaaaaaacatatgctattaagttagaaatcttgatatatacatcatttccacttgactgattttcaccacatactaatattgaaacatctctattttggaagatttcagacatgtacagaagaattgtagtgaacacttataaacatatggccaatcttttacatctttaagtataaccactttatttcccaatttatgttatttgaaatacctgatttcatataattttattttcagtatgtatctctaaaagatgaggactttttaaaaaaatctttatcatattttaaa

SEQ ID NO: 13648 - DNA, 1060 bp, Homo sapiens
cctactccctgcttctgggttcacttgtgccgaagtacttgtacttatttgatccaaagtctgcaattggtaaatttcagttgtagtttgtttaaaaatttaaaaagttacaactttctcccatttgttctacaattttgtatttctttttttttttctttttttgagacagactcttgctcttcgcccaagctggagtgcagtggtgcaacttcagctcattgtagacctacctcttgccttctgagttcaagcgattctcctgcctcagcatcccaagtagctaggattacaggtgtacaccaccacgcccagctaattttgtatttttagtagagatggggtttcatcatgttggtcaagctggtttcgaactcctgacctcaagtgatctacctgccttgacctcccacagtgctgggattacaggcataagccactgtacccggcctacaattttgtatttcatccagcatttctaaggatgtattcaggttgaggagagactgtaattaatcttagttgtgtggttccgcagaaacatgtatcatgacatatcatggaaggagaaatctcaaacaatacagaaaaattgtccccctatttactaccttctgcttttttgtaggaatcactttttgtattttaagtctcttttgtattctttaatgaaaaaaaatttgcatatgtcattagatgtttttgtgtatttgtaagcaaaaaacccaaaaatcgtaacaacaaaacaaactggctgggtgtagtggctcatgcctgtaattctagcactgggaagctgaggtgggaggattgcttgagtccagcagttcaagactaacctcagtaacacagtgagaccccgtctctaccaaaagtacagaaattagctgggcatggtggcatgtgtctgtagttgcagctacttgggaaggcttaggtgggaggatcacttgagcctgggagcttgaggctgtagtgagctgtaattatgccactgtactccagcctggatgacagaacgagactctgtctctaaaaaaaagctgtttaccttttctgt

SEQ ID NO: 13649 - DNA, 1030 bp, Homo sapiens
ttacgctgggcacggtggctcacacctgtaatcccagcactttgggaggctgaggcgggtggatcacgaggccaggagatcgagaccatcctggctaacatggtgaaaccccatttccactaaaaatacaaaaaattagccaggtgtgatggtgggcgcctgtagtcccagctacttgggatgctgaggcaggagaatggcgtgaacctcggaggcggagcttgcattgagccgagatcatgccactgcactccagcgtgggtgacagagtgagactccgtctcaaaaaaaaaaaatcattgatattaataaagtttcagggagctgacaagatccaattagtgagaaaatgtggtgggaaaattagtcttagagaggcagcaggttgttttagcagctatgagataagagtggcctcaagttacaacaggcagtttattcagcagctggacgtacagagaactacatttttggagcaatgttatgtgcccctgagtgctttttccctctggtctcttcactctgttttgttgaatatgacaagaatgtctcaattagtatgatcaactttcacaaaatcgggatggaatttgccttttcagtggttgacatctgctctgacaggtacaaaagaaattaaggaggctgagcatggtggctcagcctgtaatcccagccttttgggaggctgagggcgggcggatcacctgaggtcaggagtttgagcctagcctggccaatatggtgaaaccccatctctactaaaaatgcaaaaattagctgggcttggtggcgcgtgcctgtaatcccagctactcgggaagctgacgcaggagaattgcttgaacctggaagcagaggctgcagtgagctgagaacgtgccattgtactctagcctgatgaacagagaaagaccttgtctcaaaaaaaaaaaaaaagaaaagaaattgaaactgccagttccttggtattaatcaagaatcaaagaagtgaatgcaagtctccattgtattcttcaccaacacatga

SEQ ID NO: 13650 - DNA, 1080 bp, Homo sapiens
tgctcaggctggtgttgaattcctggtctcaagtgatcttcccgcatcagcctccaaaagtattgggattacaggcgtgagccactgcaccaggcccacattgaagttgagttcaattttcactggactcttttgcatattgcaatagtatgttactgattaaaatctgcccttacctctttagtatctggctttatctctgatatagcttttttgaatgtttgaaattttcataagattgggataaaaattaaaacacacacaaaaaaaatagacacatgtaccagctatgtcagagtaactggtattgggctttcctccccctataaacaagtagaaaactggggctggctgcggtgactcacacctgtaatcccagcactttgggaggccgaggtgggtggattacctgaggtcagaagtttgagaccagcctgaccaacatgatgaaaccccgtctctagtaaaaatacaaaaataatagccgggcgtggtgactcatgcctgtaatcccagcacttcaggaagccgaggcgggcggatcacaaggtcaggagttcgagatcagcctggccaatatggtgaaaccccgtctttactaaaaaatacaaaaattatccaggcatggtgacaggcgcctatagtcccagctactcgggaggctgaggcagcagaatcgcttgaacccgagaggcggaggttgcagtgagccaagatcacgccattgcactccagcctgggcgacagagcgagactccatctcaaaaaaataaataaaataaatacaaaaattagccaggcgtggtggctcatgcctgtaatcccagcactttgggaggccgaggcgggtggatcacgaggttaggagatcgaaaccatcctggctaacatggtgaaaccccatctctactaaaaatacaaaaaattagccgggcgcggtggtgggcacctgtagtcccagctactcgggaggctgaggcaggagaatggcgtgaacctgggaggaggagcttgcaatgagccgagattgcacaactgcagtccggcctgggcgaaagagcgagactccgtctcaaaaaa

SEQ ID NO: 13651 - DNA, 1046 bp, Homo sapiens
tctcgaactcctgacctcaaatgatccatccaccttggcctcccaaagtgctgggattacaggcatgaaccaccgcacccgaccgtcgtcgtctttttgattggcatttctttgatgcctaatgatgagcatgtgcttattgagcatttgaatatacattaatttttaaaagtttaacctaaaataaaattataatcctctttgtcctcagatgatggaaacaaaatcaaaaaaattaacagcatcagaaaatagaaaaaggaatgcttttagagaagaaaatgagaaacaattatatggatcgtcaaatacacttttgaaaaaaatagagggaatcccagaaaaaaaggaaaagacttcacagctacagctttcagtagaatgtggcacggatacattactgatccaagagaatgtgaatttacctccttcttccacgtcaaccatagctgatacatttcaagagcaactggaagagaaaaattttgaagactccattgtaccagttgtgctttccgcagatccaggtacgtggccccgaattttgaatattaaacaacgggacactcttgttgaaaatgttccgcctcaagtaagaaattttaactttccaaaagataatacagggaggaagttttcagaaacttattatacacggattcttccaaatggtgaaaaaaccactagatcctggttactttattcaacctcaaaagattctgtgttttgtctatattgcaaactctttggggaaggaaaaaatcaactgaaaaatgaaaatgggtgcaaagattggcaacatttatcacatattcttagtaaacatgaagaaagtgaaatgcacgtcaacaatagtgttaagtactcaaaattaaaatctgatctgaaaaaaaataaagctattgatgctgcagaacacagattatatgaaaatgagaaaaatgatggtgtgctgttgttgtacacgtaatatacctgagttgttttttggcatgatgatcagaatcttacattactcagaaaacatctgtcctgcaatagtcagt

SEQ ID NO: 13652 - DNA, 1051 bp, Homo sapiens
agtaagctgtgatcatgccactgcacttcagactgggcaacagagtgagaagctgggactgcaagcgagcgccaccacacccagctaattttattttttgtagagatggggttttgccttgttacctaggctggtttcaaactcactggcttccagtgtcccaaagtgctggaattacaggcatgagccattgcaccctgcctaggctgagtcttaaacctctggcctcaagtgatcctcccgccttagcctcccaaagtgctgggattataggcatgagccacctcacctgtccaaaagctgtttttgaagatagattacaaaataattctttatcatagaaccttgtttctcaaagcttcaccatcatctgagagttggttagaaatgcagagtatcagatttcttctcagacctactaatttagaatctccatttaaacaagattcccaagtgatttaatatgcacaataaagtttgagaaggatctcgcctataagtaatactgtaccttttgaagctaacagtaatttatgatactgcagttgctatgtaaggttaggaaagctgagtttttcctgagtaatccacaatctatattaatgcctgataagtaatattttagaaggctgggaaataataatagatttatattaaactactgcgtctaaagtattttgaaagtaagtgtactaatgtctacaatttacttgaaatacatagaaagagatggattgattgtttagtggtatgagtagacagaaagatgtgattaggctgggagtggtggctcacgcctgtaatgccagcactttgggaggctgaggcaggtggattacttgaggccaggagtccgtgaccagcctggccaacatagtgaaacaccctctctactaaaaatagaaaaaaaaatttagctgggtaatcccagctactcgggaggctgaggcaggaaaatcgcttgaacctggggggcagaggtagcagtgaaccgagattgtgccattgcactccggtctgggagaaagagcgagattctgtctcaaaaaaa

SEQ ID NO: 13653 - DNA, 1049 bp, Homo sapiens
tttggtctcagattcactcttaaaatgaagaccccaaaggtttcttttatttctattattagatatattaaaaattaaagctttagccaggtatagtggcgtgcacctgtagtcccagctattcaagaggctgaggtggggctgggcatggtggcttacacctgtaatcccagcactttgggaggccaaggcaggtggatcacttgaagtcaggattttgagaccaccctggccaacgtggtgaaaccccatctctactaaaaaaattaaaaagtagccaggcatggtggcatgtacctgtagccccagttactcaggaggctgaggcaggaaaatcacttgaacctgggaggcagaggttgcagtgagcccagatcactccactgcactccagcctgggcgacaaagtgagacttgtctcaaaaaaaaacaaagaggctgaggtgggagggtcacctgagcccaggagtttgagtccagtctgggcaacatagcaagacctaatgtctttaaaaaataataataatggatggacgtagtagctcacatctgtaattgcagcacttttcgtaggctgaggcaggaggatcacttgagccgaggagtttgaggctacagtgagccatgatcacaacactacactccatcctgggtaatagagtgagacccggtctcaaaaaataataattacctgggtgtggtggctctcacctgtaatcctagcattttcagaggccaaggctgtcggatcacctgaggtcaggagttcaagaccagcctggccaacatggtgaaaccccgtctcttacaaaaatacaaaaaacaacaaaaaaaaattagctgggtatggtggcatgctcctgcagtcacagctacttgggaggctgaggcatgagaattgcttgatctcaggatgctgaggttgcagtgagctgagatcatgccactgcactccagcctgggcgacagaaatttttttgtttcaaaaaataagataaaatcttaagaaaaattaaaactagtccgggcgcagtggctcacgcctgtaa

SEQ ID NO: 13654 - DNA, 1044 bp, Homo sapiens
cgcgcacgaggctgaggcgggcgcggcgcccctgctgctggatgggagcggcagcagtctggaggggagcgccctggcagggacccccgaggaggaggagcaggccgtgaccaccgcggcccagatgcaccagccgcccttgcccctcggagacccaggtcgggccagcaaggccagcagggccagcagcgggcgggccagaccggaggacttggccatctagtgcccgggtgcctgcctccagacagctgtgtagtgatctttttcttagaaaccaaaaccaaagtgcacttcccaccagcagatagaacctgaaagtcccaggaggtgggagcgactggagtcccaggaggtggacgatggaggagagatcaggtttccgtgttcaatgcttgctgttcttagcactgtgagttacagtggggataactcccactttctgagtttgggggtggcggggacaagggttgtgggcctttaagatcttcacagcagcccagaaatctggtcgctgagggctgtctctgggggtaactgttctgtagtggtaaagcaacaggtatcctgcagtccctttagctcctgggcaattgggtttgctattcctaagctctccagagcctctgggcggcccagagggtcttagctctgggccagagcacttagctctatctctttgatacttttaacttagagttgaatttcatttgggatatttgccaaactgcactaaaaaaagatttacagcaagtctatgtagtgtcatttgagtttccgaaattgcatgtgaagcccaggatatcaagcttcaggcctcatgacaagtgacaaagagcagttgccctccagaggcaggctcagtgggcaagggccccagaggttgctggcagaaggcaggtggaaacgcagccacgcctgaggccatttttaaacagttgaggaaattgacataaaagtgtgtcgggtatgccgtaggtatttattttctaaatgattattttgtgctttgaatggtgcagctatgcctattttctcccactttct

SEQ ID NO: 13655 - DNA, 1022 bp, Homo sapiens
agcagcccatgcaccggtcagcaccttgtcccgggaccctgcggggctgagctccctgcggtgagagggggcgcaggaggcaggacagagggggacgcggctgaacgagaccctcgttcagccaaggaggcctcgggctggcgaggagatggcccagcgggacttgagaggcctttgggctgcacaagggggcgtgcgcatcgtcggtgcctcctgagaggtgaagccagccaggcaggggtgatgcggggcagcgttgcgagagagggcaagtctctggagtccagagaaggaggaccaggaggacgcaggaacattccaggcctggccccagcaccgacccgacctgttccgcaaggtggtgcctcccggtgcagtgcgcccaacccctccggctgactgcgagagtcctcttcctgccttccgctccacctcacctcccttccctgcccacccctcgcctcctttccccaccccgacccctcgcctcccttcccctccacccctcgccgctctcccctcctccttgcctccctttccccccaacccctcgccttccttccccctacccatcgcctcctttccccaaccccgacccctcgcctcccttgccctccaaccctcgcctctccccctcttccttgcctcccttcccccccaacccctcgccttccttccccacccagacccctcgcctccattccccccacccctctactctctcccctccaccttgcctcccgtttcccccaacccctgtccttccttcccccccaaccccccgcctccctttccccctacccctcgcctcccttcctccccatccccctcgcctcccttcctccccatccccctcgcctcccttcctccccatccccctcgcctcccttcctccccatccccctcgcctcccttcctccttgcaccccctgcctcccttcttcccccaaccccttgcttcccttcccggctttcctgagccagccttagcagggaggagcctcgtgactgcaagcctggtg

SEQ ID NO: 13656 - DNA, 1050 bp, Homo sapiens
ttattttctgaaagagattgtaaagattggcagtagttctttaaatgtttggctgaatgtggcaaaccctgggcctggagttttctgtgttgatagattttgaactacaaatttaattactttcctataaatagactaatgaggttttctattatttcttaagtgagttttggcagtttgtgtctttcaagtaatcagtccatttgttctaagttgtaggatttcttggcataaataattattcataatattgctttattattcttttaatgactataggactggcagtgatgtcccctctttcgttcttcatattggcaatttgtgtcttctctctttttattggtcagtctgccttgaagtttgtcagtgttactgttttttccctaagaaaccagatttgatttcattgatttgtttctgttgtttttctgttttcaatttcattgatttctgcttttacttttattgttttcttcttcctttctttgtatttaatttgctttttttcagtttctgaagatagagggttggattaacgatttgagatattcttctttattaatgtaaatatataatgctatacattttcctctcagcattgctttagttgaatccaatgatttaatatattgtgttttcattttcaaaatattcaaatatattagaatatttcaaaatattcaaatatattagaatatttcaaaatattcaaaatatttcaaaatattctaatttcccatgagaatttcaccttgactgtagattatttggaagtgtcttggttaatttccacatatttggggatttcctagatattcttttctcatagacttccacttcaattcaattatggccagagaacatactttgtttgatttctattcttttaagttttgtttcatggccagactataatctatcttggtaaatattacatgtgaacttggaaaagtcaggcattctactcttgggtggagaggtctctgaatgtcaagtagatcaagttggttgataatgttattcagctctgctataatcttattgatt

SEQ ID NO: 13657 - DNA, 1034 bp, Homo sapiens
cggtgctggccctgctgcatgtttttcttccggcttgggctccctgctgctcacctagcggtatcagcacgctgggagcatatctgctgacgcagagctgccttgctgtgtttattttcatttgaaagtcaatattcaaagacttgttgcccagtaagtctgtttgaaccactgggggaaatcaaaaggtttctttcaaggggcggcctttcacctcttatgggtctggttgacctgtatcagtccctgctgcccagcagagaccttcctgcctttcgtttttcctttttttttttttttttgagatggagttttgctctgtcacccaggctgtagtgcagtggcgcgatcttggctcactgcagcctctgcctcccgggttccagtgattctcttgcctcagcctcctggtagctgggattataggcacatgccaccactcccagctaattaccttcctgcctttcagaggccctggcgttcagcaagtatcgcattgcacatttgtgtgtgggaagacacctgggacactggagtagctatttctgttgttttggcagaggaggctgctactgtggtttcctctgagagacctactgtggtttccttccttcctgccgcgtgcgcaggacctgccccggaactgccgtgtgcgtggggcaggtgacacaggccaggatgaggctgtggccttcctggagcaagtccactttccactgactgagtacacttacacagccttcctttaacaggctctctgcctgtgatttgtggatatgtcaccgggactcgtcctgcggccttttgcttcttgctttgctcgcgtttgaaggcacttgctatcttgccatcctagttggtaggtggtgggtgggaatcttccgctgaaagggtccctggtttctctgagcctggccagagccagttgcacagcatcaggtgattcccctctgttcccaaggcctcctgaggctgatatggctcttctttagtcttggcctatgacccgcagctaatgggaactactgtgcatc

SEQ ID NO: 13658 - DNA, 1027 bp, Homo sapiens
atttttcacagaaaaaaaaaagtcctgaaattcctgtggaacccaaaaacagcctgaatggccaaagcaatcctgagcgaatagaacaagggtggaggcatcacactacctgagttcaaatgatgttacaaggctgtagtaaccaaaacagcatggtatcggtattacaacagacacatagaccaatggaacagaatagagaacccagaaattaatccacatatctatagccaactgatttttgacaaaggtgccaaggggaaaggacacctcttcaataaatggtgctagaaatattagatatccatatgcagaagaatgaaacaggacccctatctctcaccatatgcaaaagtcaactcaagatggattagacgtaagcatatatcctgaaactataaaacttctagacaaaaacataagggacacacttcagaacgttggtctaggcaaagatttcatggctaagacctcaaaagcacaagaaacaaaaatagacaaatgggactctatgatatttaaatgcttctacacagcaaaggaaacaatcagcagaatggagaggcaacccattgagatgtgtaaaatatttgaaaactattcatctgacaagggactcgtatctagaatatataagaaactcaactaaaatttcaaaaccaaataatcccattaaaatgggcaaaggacctgaatagacatttctcaaaagaagacatacaaatggccaactggtatatgaggaagagctcaacattactaatcattaaagttatgcaaatcaaaaccacagtgagatgtaatgttatcccagaatggctattgttaaaaagattaaaaataccaggtactggtaagggtgtggaggaaagggaactcttatacaccgttggtgggaatgtaaattactatagctactgtggaaaacagtatggtgatttctcaaaaaactaaaaccagaattaccatatgacctagcagtctcactactgaacatttattcaaaggaaaagaaattagtatatca

SEQ ID NO: 13659 - DNA, 1048 bp, Homo sapiens
gacgagacccccgtctctacaaaaattagctggacatggtagtgtgcatctgtagtcccagctactcaggaggctgagctggggtaattgcttgagctggggaatttgaggctgcagggagccacaatcgcaccactgcactccagcctgggcagcagagtgaaaccctgtctcaaaaaaaaaaaaaaatttatatgtcaaggataaatatatatgcatatgtgtgtatgtatgtgtctgcatatgtatatggacacactcatatacacacacaaacacacttttatttttctttcagttctaggcagtattgtggtgcagccttttttaaggaacttgtactcttcgattttgccaggcaatattggcttttactagttgcctgatttttctcctgaatgaaaagaactcacagttctgaaataccaaattgaaaccttttagttgtttgcagatcattttgccatgttttctcagttcagcatgcacacaagctaatctttggaatttttacttggaaattttccggcctgttgggttctggtatgctttcctgaaaatgtgtttttgtgcttatgcttattgcagtaaactagaactattcatttcaagcatttgtaccattctttggtgggacttctatagacaaccccgtgttgactgaaattatttttagttctaagtataaaaaccttaaaagtagataatccatcacttttcatcttataaaactgaacagtacacccattaaaccctattctcccctccccccagcccctagcaaccacaattctactttctgcctctctgattttgactactctagatacttcatataaatggagttatgcagtatttttttaaatgactggcttatttcacgtagcataatgtcctgaaggtttatccacattgtagcatatatcagaatttccttcttttccaagggaatcatattccattgtatgtatttatttcattttcctatattcatgcttgctgattctcttctgcctgctcaaaactgcttttaattcctctagttagt

SEQ ID NO: 13660 - DNA, 1033 bp, Homo sapiens
tgtctttgaactttctcttttaacaaaaatgtcaagtctttatagttgtaatatcaccatgtttcccatttctgttaatacttctatgaacccctaaagtattgaagggaactagctgtcagtttcaaggattacaagtttgagtctcctagtattcaacatcattctgaaccctgaaataatatttttctctgttaaacaatttttatctgtttgccacctctgttgttagaggtggttgtcaattgaccttactaagttagctgtctttgatgaggaattattgttattggttcctgaataaaacattaaccttttaagtcagaaggaacctcggtacttcttaaggtttgtttgtgttttctaaaaccagagaataaggaactgatttggctatgaggtttaacattataattttctgtaagctttcccacaaaaaaacattgttgatttgaggatataataatgttttaatctttttaaaatataagtggttattctctgacttggtaactatgttctgaaaacactgcatttaagaatttttaaaaattggttttctaaaattaaaatgtccaaattaggcatattgctgagctcaaattgatgtgaaatgccatggttccagttgaattttaagcatattttcatttagatataaaatatatgaagtatgctttgttgattatagtgagaacccatgacatagttaaccaaagaatatgtttggttcaaataaaaatagaagcttaatactgggcattcatactttttaaagagaatgaatgaagaaatcggtttcctgctgtagttctctatgggtaagtcttagtaaagacgagaatgctgaagtcggccgtggcgattccctcctaggaactgggaggtgtggcttgcccattacccgcttgaagctcacatctttaccctcctctcccactgtggtttgatcttcacctattcccaggccctcccagcaattggagaggtgtctttttttttggttttggttttttttctccccgtctgcatt

SEQ ID NO: 13661 - DNA, 1077 bp, Homo sapiens
ctggcacaggtgcactcatgaaactctgcttccaccatgttcctgacacctatctattaaaccattctgcaaatacggtttttctacctgattgcatatagcatatgtgtcattacatgtgatgctgtgcaaaactttgtataattctgtgttattaacagttaacaaaactggagcatctgaattacatccaacctgtgcatgtgatgttaggtagatgtgaatgcagggccttgggccataacttacatttctctcaatttgattagctttgagtcacaattaaggggaagcaaaaacatcttgaaaagactgctaggaaggaaattaatatcagtcatccagaagtacacgtttctgtattttaaaaaatactttgatgcatttatttttaggtgttttttttttccccttaaaaaacttgaagtgatatgcagcagtaatctatttgttttgcattgttcttggtgttttgtgtttcccagatccctcaagctttctcagctgttgtgaattatgtgtatctgtgtgtgtgctaagtacagtctctttaccaaagggcactgaaacacacaattgactggacaggtccacgcgccatgacaaaactataatcaagttattaaaactaaagaggagtgggaaaggaatgccttggtaagtaaaaaggcatctatatttaataacttttatccagatggcaacatatttgcaaaatttgcccagatcctattacaatactaaaaatagaaaatttcacctccatattcctgaggtgtaatttcattagactagttttagtttaaaaagaccttcttcagattggaccaaataatacttataagatcagcagaatgttgaatattagctcactggggtggggagaagccactaccattttttaggtgatggggatgccactgagttgcaacggctagaccttttcagggtggttgtgtccatgtttgcctgattggatgcttattcactttgtgttttcttttgttttattttgtccaattttgtctttagctgtgtttattaacttctccggtcttgttttgttttaatgctctt

SEQ ID NO: 13662 - DNA, 1811 bp, Homo sapiens
catgcttctcagtaacatgggcccttacttagtctctgtttctgccccaaagtcctgcaggcacccatacattagtgactcgttttgtcagggagtgctacagaaaggagcctgtccttttagaaagtacattctgttagcagttttgattacctcataatttgtcactaagggaataaagtaagttaaaagtttcagtgttttcctctgatactttctgaacatcattctcaagttaagggattgagcaaaggaaggcattttccaaggggcaccatgtaaaaatgggatggtatgcttccaagactgatgctgttttaaagtttttgcacattctgactacattatgccttggttttgtcagttaatattgagggtgtggtggcggtgaggcaacttttttctaccatccgtaagtaccacagagggaggtctcttgtcatgagttgtcatagcaggataagggtggggatgaggacatgggtggaaaggaaaggaggagtttgtgtgtgtatgtgcacatgtgcatgcatgcatgcgtgtgcacacacacacgagataaagacaaggagtaggaggaagtaagatagtagaggctgggccgggcgcagtggctcacgcttgtaatcccagcacttttggaggccgaggtgggtggatcacgaagtcaggagatcgagaccatcctggctaacatggtgaaaccccgcctctactaaaaatacacacacacacacacaaaaaaaaagccgggtgtggtggtgggcgcctgtagtcccagctactcaggaggctgaggcaggagaatggcgtgaacccgggaggcggagcttgcagtgagccaagattgtgccactgcactgcagcctaggtgacagagcgagactctgtctcaaaaaaaaaaaaaaaaagtagaggctgagaagtgtccagaaggtgagtacatacgagaagaatgagtcctgtttgattgccagcatagcaggatctaaccgtgtgcttccccctccttgagagcgtctctaactattggaaacaatgttgatgacccatggcattcacacagcagccagccagcaggatgaggaagtttagtcaactctccatattgatttgcatttagggtttgtttaaacaaataagccattaaacatttaagtgtgtatttttcttaagtgtggttaaaccagattacttacttttacctcagttctctaggatagtacaactggaaaaatgtttttggaagtgtaaagaccgaatactctgctctgtgcatagtcttaacaatttgtattaaccttcttgaattttttcagcatgcttgaatggaaatacatttacaaaaaggttttactcctaagttatttaataattttaaatctggctgccttgtttactttttccgggtaaacacagaatatcaggaattgaccttagattttattaactatctagaagataattgttttgactgtctgttactttgtttcatagtagttactaaaatatgccctttatttgtacctgtttttacatttaatttggtcttcatgttttctatatcttgtacatgttttaaagaaatcattatatttagaagcttgtcagttactttattttattgcattgatgaaaatagaaattggatactaatgagcatccaaataattgaatatttctttttcagtttccaaccctttgtaatcagtactacaaattaatcacatttatctgtgagatttttcctgaaaaaataccacagcttcctgaggatctgtttaaaagtctgatgtactccctagaattag

SEQ ID NO: 13663 - DNA, 1052 bp, Homo sapiens
tacagattattatttgggaatagattatgcttttttgtatttggtttaatactatgttaattttttaatactatgggaataatagaagttgacgggaaaatcacactggaaaatgtgagtggattgaggatgtctttttttttgaccagtggaaatgagtacatgtgtaaagttgatgtgaagtaagcactacttcagattagatactaatttcagttcgatttttctctgttttttttttcttgagttgatctttcttgcttaccttaaaaaatttgtttcctctcttaagataagtctgccattcagtacagcgttcggagcagatacagagggttctcagtggataattggctacctcttacaaaaagtcatcagtaacctctcagtctggagtagtgagcaggaccttgcaaatgacactgtgcagctccttgtcactttggtggaaagaagagaaaggttagcccattgttggaggctgactgtgtgtgtatgtgtgtgggtgagaaactctttttcacttcttagtgtagtcctttgaactggcaaatggttacacggtcctaattccagatagagcctacatttttggagtaatgggttttaaaaactatgtcacagtactattacaaatgcaaatggagctttcccatcttataattgagcattacattgactccttcaggatttggcatcaaagccctatgagtaacacattagtaatttatcgtgttgcaaacacttttatgtggaatatgctcatttgaatttttagacatccccattttaaagattaaatactgatatttaaaatttaatgttggaaagtaaaatttttagtgctttctacaacaattctagaaatgttttcgttgttcttactgtataggagtatcattgttattattaccattgtcattgtctggtttattgaattcttataatttactatgtactcttctaagcatgtcataggtagtatctcatttaatcattatatcagtctcagccccaggagactgttattattcctattttgcagattatag

SEQ ID NO: 13664 - DNA, 1029 bp, Homo sapiens
aatattgtgataataaaactccagtgcataaatttaaagtgttaatgtaaccattttcttttgaattttgttaggctggaatagatatttaaaatgatttaatcttaccaggaattttgacatatctacaacttaaatgtattactgtactgggagattgttggggttttatttgtttgttttgttgttgttcatataccccctaaaaaatttttttaaaaaactcaaacgagcactggtggtataggaagtgtgcagacagtgaagaaggttgggcatggtggtttatgcctgtaatcccaacacttggggaggccaaggtgggaggattgcttgagctcaggagttcaagaccagcctgggtgacatgacgaaaccctgtctttacaaaaattttttaaatcggcctggtgtagtagtgtgtgcctgtagtcccagctacttgggaaactcaggcaggaggatcacttgaacccaaaaagttaaagctgcagtggaccgtgactgtgtctgggcatactgcagcctgggtgacagagcaactctgtctaaaaaagaaaaaaaattagaagagattctggggtggaaccttaaaaacctcctgatttaaagaagaagttcaggagaagaggatgctgccatgaagactgggaaagaggaagcagatggctagatgaagagaggaagggcagtgaccccagggaggctgcaggaagataagggcagtgacagtgggccatccagtggggtaaagaactgaaacacgtgtgtatgatttcatgatgagatcatttcaggcttcctgagagcactagtaaaggagcataagccgaatttgagtgattagaatccttttctcagcactgatattcattagtgtgtaatggggtctttccattacctcctttgcttccttgccttttggctaaagtcaggttaaatatatatcacttctgattatgtgccctcctcaacaaagacatttctgtttgtctgcatgtcacgctatgtgattgacaccacacgacc

SEQ ID NO: 13665 - DNA, 1052 bp, Homo sapiens
gggacgtgtatagtgtacaataatttattacaagcaataacatgtagaataattttttaaaatgagcctttaaaataatagcttttattgaaaacctgtgtgcactcttaccacataagaacaactgttgagttttgtttggtgcaaactaattataattctaattttttaaaattattttttaaatgatttttataattgtaattttgtgaaatattgaaagcttctttttccagtaggaaaacaggttccacatgtaagactttgttttactgtgagaatacttttttcagagctgtgtttgtttaggaatatatacagattatcatcttttttaatagcaattcatgtctttgatggtggtaacgttgtgtagcaagggaagaagagcatcttcataggaagaagcattcttgataccagtgtgtgtttttgaaacccatgtcataaagccaccttgctgggtggctttagcatgtgagtgaagagacatatttatgagtactctgacttgcagttaactgagagtctgtgttcacaaagagcaattctggtattcagccaagtttctctgtggctgcagaagtttcttgatattatttgagactttttggagataagaattttttcattatacccagaaatcaaattattatctattgctgaactgaagaggtaagaatgaatgtggagatgaaaaagtattgccttaaagattaaaatcctgctgggcttggtggctcacggccgtaccttgggaagctgaggtaggcagatcacctgaggtcgggtgaggagaccagcctggccaacacatcgaagctccgtctctactaaaaatacaaaaattagccaggcatggtggcacactcctgtaatcccagctactgaggaggctgagacaggagaattacttgaacccgggaggcagaggttgcagtgagctgagatcatgccactgcactccagcctgggtaatacagcaaggctttgtctcaaaaaaagattaaaattctatcaataattgttcatattaatacaacagctgtttt

SEQ ID NO: 13666 - DNA, 1061 bp, Homo sapiens
gaatgttgcatagtcgaagtattttagctgggcaattgattaccaatggaaggggcataaccactgttttttgtttgtttgtttgttttgagacagagcctctccctgccacccaggctggagtgcaatggtgtgatctcggctcactgcaacctctgcgggagagtgttttcaagcgactctcccgcctcagcctcccaaatagctgggattacaggtgcctgccaccatgcccagctaatttttgtatttttagtagagatgggtttcaccatgttggccaggctggtctcgaactcctgacctcaggtgatccgcctgccttggcctcccaaaatgtggagattacaggcgtgagccaccgtgactggccgagttttctcatttcttcaaagcctcagttactgtggcagtatcaatgaatcgtattcataaaaacctacaaatatatgatggttactttgtttatggtaaaacagtattctgtttgaagcatgtttgaaattgaatgcctgaacaccatataaattgctttttagtctgtgggaattttaaataagcatctataaagttttttgtcaatagattatttctttgtcttgatatttagatactgtgacctgtgggagttttttttctttaatattatatgtgtttactctttttgttcttttgcttttccagtgaatatatttcttctggaaaaatgctatttttccaagtagactatatgaaactcacattttgtatatgtggtgttaattgttgcaagatattgggggaaatgatgggataaacttgcagaaattgattctttttacatgaattttggcatatgctttgcagtaagtgtatttccttctgttgccaccattaaattctctggttctcaaagtttctgtatgcctacagcatgacacataattacaatgaaagcattaccttacattcctgtaacattctttttttccccaggcacttaatgccttctattccttagcttcatggatgaattatgtagcatatgtgaagaggcttaaactgttaccattacaaattct

SEQ ID NO: 13667 - DNA, 1007 bp, Homo sapiens
gatcatggtcgtggttgcacacatctgtgaatatgctaaaaccattgagctgtacactcagtgggtaaattgcgtagtgtgtgaattatgtcttaatgaagcctttaaaaatacccatcatgtcacggtgtagaaacccacttcacacaggtcaactgcaccattagtagaattatagagggagattaggggtggagataaagttgtgggagagtggggccattgaagttaaggaaataggagaggtggtccaagaaggagcagaggatccatgtcaggacctttaggtgcatcagtagtgaaaaagcaggaagaagcaaaagaaaataagaaagccaattaagacaagtggatgggagaacaaggcaaggagtgtttggaaagcaaagatagatgatgtttcaaggaatcaggtagtcaacatcgtctgttaccgataggtaagatgtagattgtttttgatctacaccgaatatcagttagaacatagttggtcatatggaagtctgtttatgtgaatgacaggggcaaaagccgtatctcagtgatcaggtagtaattagtaattgatgaagtatagagtgaagtacaattgacccttgaacaatgtgagggttagagacaccaacccccatgcggtcaaaaattccagtataactttttactccccagaacgttttactaatagcttactgttgcctggaagacttactgataacataaacggtcagttggtacttattttatgttttatatgtactataatatattcttaaagtaagttagagaaaagaaaatgttgttaagacaattataaggaagataaatgatatttagtgttcattaagtataagtggatcaatcataaatgtcttcatcttcgtcttctagttgagtaggctcaggaggaggaggaagaggaggggttggtcttgctgtctcagtgatagtagagacagaagtggaggaggtgaaggggaggtaaggaaaggaaggcacacttggtg

SEQ ID NO: 13668 - DNA, 1043 bp, Homo sapiens
attttaaagtgtctgttttaagggaaaatacagttggtagagagtgactattttataaaaagaaatagttctctgggagtttggaaacaaagcttgtctaaaagatacacacacataaaatattttataaagtacttagataaagctttggaaaatctgtcatctgaaaatgataagcaatactgcagtgttgccaaaggaaataattccttgtttaaagaaagtatatcttggtttttgacttgaggatattttgcttcatggcttatgagtgagttcttgtgtgaccttttcatatagtgccatttgttggctgactgcactacagctaagtattctttgagtggattagctttaagtgtgggagaaagaacttggcagtgagattaaactaagctacagatttagcactcattagggaaatcaatttcaaggaactcaattctgactaatttctaattttggaaattacctggagatctaccattcaatcagtaaggaaaagaatggaataattatgcagccttgtaccatggagagggtctaaataatcaaatttaacttagtttaaaagtgttgaattgatgccttttaaaagatggtttatctgctgggtgcggtggctcactcttgtaatcccagaactttgggaggttgacatgggaggattgcttgagtctaggagttcgagaccagcatgggcagcatagcacaaccctatctctacaaaaaaatacaaatattagctaggtgtgtggtgtgtgcctgtagtcccagctgttcgggaggctgaggtaggaggattgcttgagcctggaaggttgaagctacagtgagccatgatcatgccactgcactcaccctgggcgacagaagagaccctgtctcaaaataaaaataaaataaaataaaataaaaggtgatttgtctcttaggatagacaaataataaatcatggaaaatttgtgtatttagtgttaaatattttgataatttagaatggtatgttaaatgaggctgtgttaaattatcagtaacaatcc

SEQ ID NO: 13669 - DNA, 1051 bp, Homo sapiens
acagtggaagatctaaagttagggagaaaatgttctattatgtttgaacaaatgcattgaaacaaagcgttgaaacagtaatgcctcacaattatttcttatcaaataattacagcaaactctggcctgttctattctgactgcgctattgagtgaattttcaagttcaagtaaaactagcaacattggattgagcatggaattccatggtaactgcaaaagagtttttcaggtattggtagttttgttcttgagttttaattattggatcattcactttttactcaatctattcctaatgacatgagaatatttattttatgtagttgaatggtagcctgtacttcaggatttgttttgtgatttcaaaggatatagtaaaatgataggtttggtgaatgtagttgatggtttaaaattacttgtttaattctagtcttaaaaacaatacttctataaagatctttagtttattatttatttcttattgtgtttagatataactaattcaattgaagggactctgctggccttaaaaataggtctggaagaatgccagaaggccgtgtatttcaaatgttattgcagatggtgcgggctctttgtcttgtatgtattgtttggctctggagtaaagttatgtgaaggcattggcttaaatcctagggctctgcactatagcaactgactcctctggctccgcagtagttgtcaaagactctcttctctatggaagtagcatttatattcaagtaaaagtattccatctggcgtcacttgaaagcatactgcgatgtaaattacaagtagaggcctaaaaatggaacacgttcttaaggaaatggtgttttccattggaaattttaaggtgtttgttttgtttcatgattctaaaaggggatacattttgaataaatttttcatataaaatatttgtgatttattgactataggaagaagaccttcgtcagatcttcatgttaactgttgaagttctgcaggagttcagcaggcgggaaaacctcaatgctcagatgtcttcagtatttca

SEQ ID NO: 13670 - DNA, 1089 bp, Homo sapiens
ttataggtgtgagccaaccatgcctggcctaaagtcaaatttttaataccagggctgagaactactgtaatagtaggaaatcagtatacttcagtgggaagtagaatttaatttcaggattgcaggatgaaatttattttggtgactacattaaaaacattaaatgtgaaaaatattctctatatggcaggttaaatgcatacactgtccctatttgtccttgcccagtagcttgaaactagctcaataggaaggcctaaaaaatgaagttcagacattttcttatatcatcctctcttcttcttggactgttaagaatttgtaagtggttcaagaatttacttaatgttttcatagtctcagatataaatgacagtgaacaagatgattaaaacctctgtaagaaaggagaatgataactgatcagaacattgatttagtattggctataaactttctttataaaggtgacttttaagagagatttgaaaagtagaaaaaattaactaaaggttttctgtagatgaagaaagggttgacttcatgaaccattaaattagataactaattttcccctcacacctcttctagaaggacatttccatcaaccttcattggccagaaactgtatgtagtctggcttttcccccttcgcttttgaagcatattggtttcatttgtttgttttgttgttttagaaacagggcctcgctctatcgcctgggctgaagtgcagtgacatgttcataactcactgctgcctcgatcacctgggctcaagtgatcctcccacctcagcttcctgagtagctgggactgttggtacgtgccactgtacctggctaattttaaaatttttttgtaaagatggggtctcactatgttgcccaggttatcttgagctcctgacctcaaggtgatcctcctgtttcagccttataggtgtgagccaccacgtccagccaagaattgatttttgatggtccatttccctgtactagtctcatgtttgcatttatacaggtttaggggcagtgtagtataatagaacactgattttggattcacacttgggtttaaatcccagct

SEQ ID NO: 13671 - DNA, 1002 bp, Homo sapiens
ataattttaattcttgccagtagagatatttaaaactatgtttgtgtacatttgtagtcatagtcttcagctttatgtacattttctagtagtagtcagtgcctatgaaactattctgtccccctaaaagtacagaaattccctttggccaactaatattcttatgcatagtaggatctctgcatttatttgcttaatgagtgaaagataaatggttcaagtgtatgttttgaaggaatgttttttcacttcagtcttgacgatagggagacatatttattcatctgtataaatatctaataaatgcatgttatgcagcaggtagtgtgctttgcatatgctagtgtgcatagagtgggtggctgatctgggagctagtgaaccagtagtaacagatatgtcctgtcatgtgagggtgccgtgggagcccttagtaataactttctggagaaagtgacgtcataatcttgggagagggaatagaagttcagaggcctggaagtcaaaagagtgtggagtgaggaactgaaaggtcaatatgtctgcagttgtgcgtgtgtgtggaagggcagaagtcaaggagaggagcagccactggtggctataggtgggtctccaaactgggacacttttgagagtgaaataaagaacgactaataattatttggggcaacaggtgaattgaggctgtcccaggaaagctagaatggttcccactgcttataagccatgttaaggggtttgggtttattccaggggcacttggtggttgtatctttgtgggattccagaggctagattataaagtttgggattatgttttctgatccttatctttcagaaaagattgtgaaaagtcaattaagtttctgtgcccttgtggtcaaatgggcttggtaaaatgcctccacttgggatgggtgcttctgtcatcacatggaggaacagaacctagatatgaacattttgaatgtttgtgtgtgtgtgttttacaattttatg

SEQ ID NO: 13672 - DNA, 1053 bp, Homo sapiens
tccacctgctgggtttacgccattctcctgcctcagcctcccgagtagctgggactacaggtgcccaccaccacgcctggctaattttttgtatttttagtagagacggggtttcactgtgttagccaggatggtctccatttcctgacctcgtgatccgcctgcttcagcctaccaaagtgctgggattacagatatgagccaccgtgcctggcctaatttttgtatttttagtagagatggtttcagcatgttggccaggatggtcttgatctcttgacctcatgatcttcccatctcggcctcccaaagtgctgggattacaggtgtgagccaccgtgcccagcctccttttcagttttttaaattgagacagggtcttgctgtgttgcccaggctggtctctaactcctgagctcaaacagtcctcctgcctcagtaccccaaagggctgggattgcaggaatgaaccaccgtacctggcccaaattaatctcattttaaaatcattttgataatttagaagctaaagtaattagtttgattgtagagttgattgtagggttccacattgaaatagctcacatatatatatatatatatatatatatacacacacacatatatatatatattttaattttttctttttttgttttttcttgagacgaagtcttgctctgtcacccaggctagagtgcaatggcgcaatcttggctcactgcaacctctgcctcctgtgttccagcgattctactgcctcagcctctggagtagctgggattacaagcatgcgccaccatgcccagctaattttttgcatttttagtagagacggggtttcaccattttggccaggctggtctcgaactcatgacctcatgatccgccctccttgacctccctaagtgctaagattacaggcatgagccaccacacctggcttacatacatattttttatctcaaacattttttttaagagagagagtcttgctgtgttgcccaggccagaatgtggtggtaaacacaccctttttccagtagaggctca

SEQ ID NO: 13673 - DNA, 1056 bp, Homo sapiens
cagggcgggatagtggagaattggagagagctgtagttgtaggggagagcagccttagggagctgtggcttttggtgggaaaaaggaagcactgggacagagtgaggaagcctgagtcatgtggtgtctagaggtcagcctctcggggctctgagtacagcagagaatggatggtccctttattctcttacactccctgccttttttttttttttgagactgagttttgctcttttgcccaggctggagtgcagtggctccatctcggctcactgcaacctctgccctactggttcaagcgattctcttgcctcagactctggagtagttggattataggtgcccaccaccacacctggctaatttttgtatttttagtagagatgggattttgccatgttggccaggctggtcccaaactcctgaccccaggtgacccacccacctcggcctcccaaagggctaggattacaagcatgagccactgcgcctggccaattctcctagactctttatgatgtggtttggatgttttgtcctctccaaatctcatattgaaatgacttctgatgttggaggtgggcctagtaggaggtgtttgggtcatgaggtggatccctcatgaatggcatggtgcctccctctgagttcaccggagatctggtttaaaagaatgtggcacctccccccacttgctttctttcttgccatatgatatgctggctctccctttgccctctgccgtgattgaaagctcttggtctcaccagaagctgagcagatgttggtaccgtgtgtatggcttgcagaaacatgagccaaataagcctcttttctttataaattacccagtctcaagtattcctttatagtaatgtgaagggactatcatgcttcatgtttgtgccttcctatgtttgtaataatttcccatatctgtcttcagtttttcccaattttcttttctttctttcttttttttttttttttttgagaccgagtcttactctgtcgcccaggctggagtgcagtggtgtgatcttggctcactgcaac

SEQ ID NO: 13674 - DNA, 1088 bp, Homo sapiens
gccgagggctgttttgttttaaattagtccgtcgattacttcacttgaaattctgctcttcaccaagaaaacccaaacaggacacttttgaaaacaggactcagcatcgctttcaataggcttttcaggaccttcactgcattaaaacaatatttttgaaaatttagtacagtttagaaagagcacttattttgtttatatccattttttcttactaaattatagggattaactttgacaaatcatgctgctgttattttctacatttgtattttatccatagcacttattcacatttaggaaaagacataaaaactgaagaacattgatgagaaatctctgtgcaataatgtaaaaaaaaaaaaagataacactctgctcaatgtcacggagaccattttatccacacaatggtttttgttttttattttttcccatgtttcaaaattgtgatataatgatataatgttaaaagctgctttttttggctttttgcatatctagtataataggaagtgtgagcaaggtgatgatgtggctgtgatttccgacgtctggtgtgtggagagtactgcatgagcagagttcttctattataaaattaccatatcttgccattcacagcaggtcctgtgaatacgtttttactgagtgtctttaaatgaggtgttctagacagtgtgctgataatgtattgtgcgggtgacctcttcgctatgattgtatctcttactgttttgttaaagaaatgcagatgtgtaactgagaagtgatttgtgtgtgtgtcttggttgtgattggattctttggggggggggaactgaaacatttgtcatatactgaacttatatacatcaaaagggattaatacagcgatgccaaaaagtttaatcacggacacatgtccgtttctgtagtccgtatgctctttcattcttggtagagctggtatgtggaatgccatacctctgaccctactacttacctttttactgacagactgcccacactgaaagcttcagtgaatgttcttagtcctgttttcttctgttactgtcaggaaactgagtgatctaatggttctctca

SEQ ID NO: 13675 - DNA, 1383 bp, Homo sapiens
gtgttcgagaccactctggccaacatggtgaaacccgtctattaaaaatacaaaaattatccaggtgtggtgtcacacgcttgtagtcccagctactcaggaggctgaggcacgagaatcacttgaacctgggaagcagaggttgcagtgagccaagatcgtgccactgcactccagcctgggcgacagagcaagactctgttccccgaaaaaaggggaagggggcttttgaggaaatgccttttctctgctccctgaatgacttacctttgtgagtggcgcaggtcctaggtgggctctaggaatcactggctacttgcgtgctgtggtgttggtccctgcagccctttgggagctgggtccctccactgcgagcaacctgctcttctatcccagtgtgcagtacagatattagcattttttatgtgggctataatgtgaaaaatattggagatcataaatattgttcacttaatgcctgttgtgtcacaccaaacgtttactgctgagattatttgctgtcatgtggttgtagagatctaggcgggaactcatgtacagtctagattgatggtttttgttgcctggaaccccaattttgcctggcttgatggatggggccctgggagaggggctccgagttctgggtctccagtctgcatgcaattctgtgtgggggcttcatttaaactgtttctgtcattgccaaaccatttgtggatgtaaatagagaaaaccaacaaggatgtaaataggggaaaaaccaacaaggaaatagaatgttttatggcatttaacaatgctctcttttagaactatttttactagggttatgatgaatttcaaaattaaaaaaaaaatgccacatccattatcatagtcactacccagcttctctttattttggccttaaaatttacttgccagaaattcatagctcttgaattaaagccacattcatcatgcaattttttatatattaggttttactcgttttagatttcttttcttgcttttttgttttgttttggttttgtttggtttgttcttgtcaatagagatggagtcttgctatgtttctcgggctggtctgaaactcctggcctcaagtgatcctcccgccctggcctaccaaagtgttgggattacaggcatgaaccactgtgctcagccccatcttagatatattttgtagtagtgtatttagaggggagatttttttcatagttaaatttttacaatttgtaatcttctataattgacttatttgttagcggatgccttttttttcctaagagttcttgatgactttcctgtactgtgggaaacggcaggaaattcttctcccctctgtatcctcccccagcaacgagcctagctgtg

SEQ ID NO: 13676 - DNA, 1034 bp, Homo sapiens
gccttgcctggcctcagaaatttatttctaaccccaaggatgctccatgcattgggcattgtgttggcagattgtcatgttcccgtcttgctctccctgtcttaggcagtgtctctggaggcctggatcttgggagtttatccctctgtgcccacaaggcctcccatgttgcagagcatgtgctcaatcagtgcttgctcaccagtgaaagttctgtgtactagtccagccaaaaccctcacctcagttgtcagacactggaaaagatgctaaccagaaatgcagatctcctcgggatatttatttggcttaattctaacaatatgcatcaccaaaaaagctatagagaaatggtaacactaatctcctagccctttgtcttggtgacaagatcctgccacaggattcttcattgtactaaagatattttgctaatgaaaaagataaaaggaatttagataacatgtacatttcctctttctcacttcctcttgaaagggaaccaccgtttggtgttactgaacacgcgtgctgaaatattaataagaggagaaggaagaaagaaacacttaagtttaggaatgtcggtcatgtaacaggaaattgtattacaatggcttttgggtgtagcagttccttgccttttcccctttttttttcttagtggctttcaaattaaatttggctcttccagaaggcacaccacatacctttttaatgtaggaatttaaattactttgacaagacacaagcaaagcatacccctctgtgtcataatcccctctccccttaagccttgctcctagtttttgtttttgttttcttgagatggaatctcactctgtgcctaggctggagtgcagtggggtgatctcagctcattacaacctccgcctcgcgggttcaagcaatgcgccatgcctcagcctcccgaggagctgggattacaggcatgcaccaccacgcccggctaatttttttgtatttttaatagagacggggtttctccatgatggtcaggctggtctagaact

SEQ ID NO: 13677 - DNA, 1511 bp, Homo sapiens
tccagcttttagggatgtatttacagtgcatttctggagggtagcttggcagcataaatcaattgctctaaaaaatatttttcatacctttaaaccatatctctgaattttttctaaggcaaattgggacaaagatttaaacaagttatagagtaaggaacagcattatttataagcacaaaacatgggaaacagtataaatatcgaatgatatcaaagaactaaaacacagcaaggcatatccataagatcaggtgttacatatactatcatgttttgaaaaacagatgagagcatataaaaagaatgttttcaagaaatattaatcatatggaaaatgatgtgtgtgtatgtacacacacacatatatatacacatattttaaggaaaaagtggatagaaacagcagtgtagttatctctgggtgataaattatgggtgattttgtgcttttttcccctaaattttaccaacaaataaatttaatcagatttcatcaaatcaaaaccttatccctctttagtcagtatggtcacttaaccaatgctatagaaaaccaatactgtattagggtatccaatagaattttctataatgatggaaatgttttatagtctgcactgtccaatatggtagcctctaatcacgttattgagcactgaaaatgtggctagtatatctgaagaactaatatttacttctttaaattttatttaattttaattagcttaaaatttaaagagccccatgtggctgtggctactatattggacagtgcagctatggatgaacacagggctgtgttatcagttgaagtatcaggttatctgcctgttagtacctgccatttacaattcatctactccttatgttcacgtggaaggtaccctactgaggtgacactctatcgtctctctctcttaactctgacctgagagagatgaagcgacttacccaattggctgatttagcatgaataatctgcatactaaacttacctctgatctgctttcttccttttgggagtgcatgtggtaacatttgttcatgctgtgattttcgtctgactacactcactgttgcctgagatggggtgggagtatccatctaaatctttggttcattctatatagttatgacattaagcgtttttttggtttttgttttgttttgttttgtttgtgacggagtctcactctgtcacccaggctggagtgcagtggcgcgatcttggctcactgcaacctccgcctctgggttcaagcaattctcctgcctcagtctcctgagtagctgggattacaggcaggcgccaccacacctggctaattttttgtatttttagtagagatggggtttcaccatgttggcgaagctggtctcaaactcctgacctcatgatcggcccacctcggcctcccaaagtgctgggattacaggcatgagccaccacaccttgctgacattaagctttaactcagcctttattagtaatgagatgatattttgtc

SEQ ID NO: 13678 - DNA, 1035 bp, Homo sapiens
agatatgattaagatgggtcatactagattagggaagctgtccttgtaagaggaaaatttggctgatacaggaggaggacagccacctgaagatggaggcggggactggagtgatgctgccaccagctgccagaagctggaagcagcaaggccggatcctcccttagcccctttggagggagcacggcccagctgctgcggtgatctcaaacttccagcctacagaactgtgagaaagtccatttctgttgtttaaagcctcccagtttgtgtactttattagggcgatcctagaaaacaagtagagattcaagtcttattattttaataataagatattgatttgttggcccacagtttgaaaagatgctgaattacgggagggacaatcagtagttctaatgttgggatataatcagaaaaattaacctcttattccccagaatttctaaaccaataggactcaagacaaatgaatgtgatcctaggttagagtgtgaatggaatttacattatgtatatacgtagaagagctggatatatagttgtttagttttttatataataccaaattatatttcagagatacttatttttgtgtttcttggaaacttagacaagttattttagaaaaatcctaatgatttttttctcttcacccactcccttctcactaaaaaaggattgcttcattgtcatgaaaattaaatctagaatcctaaaaaaaaaatcagaattcttttttaaccactcatttcaaaattactaaaaacattaaaattatcagattttattgaactcataattaagcagctgatcatttggtaaactttggataaactattttgctagttttactataccttttgagatactgtttcaaaagagaaaatataaagaatataagcataatcccaattagaagagtcaacaggtgctgctttctgatgcagggcagttcaatcattataattctaaattacaaaccctttcaagtctggcagaagaaaatgaattgccagcgcattttccttt

SEQ ID NO: 13679 - DNA, 1079 bp, Homo sapiens
atgtttgtttcaattaatgaaccaacattgacacatctctatcacccagagtccatggtttaccttagggttcactctctgtgttggacattttatgggttttgacaaatgcattatgacatgcatccatcattataatatcagagtagtctcactgccctacaaatcctctgtaccctaccagttcatcccttcctcccgctccccccttggcaaccactgatcttgttatactcttcatagtttcaccttttccagaatgtcatacagttggaatcatacagtatgcagccttctcagattggcttctttcactcagtaatatgcatttaagtttcccccatgccttttcatggcttcgcagctcaattctctttggcgctaagtaatacgccattgtctgcatgtaccccagtttatcccctcacctactgaaggatatcttggttgtttccaacttttagcaaatacggataaagtggctctaaacatccgtgtgcaggtttttgtgtggaaaaggttttcaactcctttcataaataaggggcgtggctgctggaagttaacgcaacttttactttgccttgatggctctcaagcggggctgcccattataaccacctggtgagcatttaacaaatccctgtacccacccccacccaggccactttaaaccagactcggagatgggtggggcttgaacaaagtgttaaccaacccattgggaggtcctgaagtgcagccggtgttgaggatcaccaattcagaggctgacactagattcccgagtttctgcagatttctagtcagcttctctaccaagagatatttagacattgagagcaataagaaaatggttaaatgaccaagtatttatgttttataaaacattttttaaaaaatttatatatatgtgtgtatatgtgtgtgtgtgtgtatatatatgtagagagagagagagagagagagactcactctgttgaccaggctagagtacagtggtgtgatcatggctcactgcagccctgaacccaagggcccaagtgatcaagtgattctcctgactcagcctctcaagt

SEQ ID NO: 13680 - DNA, 1058 bp, Homo sapiens
cgcttgaacccgggaggcggaggttccagtgagccaagatcacggatcacgccactgcactccagcctggcgacagagcaagactctgtctcaaaaaaaaaaaaaaaaagaaaagaaaagaagaaaatatggtttatatagaagggggccattattatttcagttttcagagttggaaacaaattggagaaattatgcaactaccgaaggtcacatacttaataacataggaagaatttaggccgggcgcggtggcttacacctgtaatcccagcactttgggaggccgaggcaggtggatcacgaggtcaggagatcaagaccatcctgactaacatggtgaaaccccgtatctactaaaaatacaaagaattagctgggcctggtagctggcgcctgtagtcccagctactctggaggctgaggcaggagaatagcatgaacctgggagacggagcttgcagtgagctgagattgcaccactgcactccagcctgggctacagatcgagactctatctcaaaaaaaaaaaaaaagaaagaatttaaactaaaatctggctattccagcatccagctactttccactataacttgctactcatagttaggaagaatataattataattaaagaatataattaaagtaggagatacctactacattttagaaggatttaaacatcattagatgtttaaagtttgggtatgtaaaaccaggggatcctaacacttacaatgcctttgcacatattagaagagaacacccctacctgtgtggtgtcagcctcatgaattttggcttttgatttcccccttagctgggcacctttgttcagttcacaacatactaaccataccccttatttaaacagatttagtgccagatagatgaaatctaaattacctaatttcacatttctctatcagaaaattcagcaatgtttgtgtgcaatgatttattaaagaatgaataacttttttggattaattctgagtaaaaaaagacttgtaaacgtaaatatacctttttcttcattcaataaatatgtatttagt

SEQ ID NO: 13681 - DNA, 1029 bp, Homo sapiens
ttcaaaaatgcattcccagttttattgtttatctggggtagggatggcagataaaaagtgttttttttttttaataaaactatttcagaatttcaaaaacaatcccacaggatgccttaaaagtctaaattttgatattactgtaggcattgtggtataatagaaaaaaacactggacctgggacttactaaatcttgagttctggtctagttctgctactcaccctggtgtttgaccttgtatgagtcatttatttgctttgcatctacttttcatctaaaaattgctgagcaaactacattctgatgttctcttttatctcttgacattttgatttgagaagctctctagtataatacattttggtattgttggtattgttttaaaattattagttatcaattacccagagttattttttttagaaaatcaagttttaatgtcaaattagttaagtttgtacatccttcagcatcttccttttacttctttcatgtagctatcagatattgtgaaaaatgtcagctgattaaacctgatcgggcgcatcactgctcagcctgtgactcgtaagtgttactcacacatatgcttaatatctagcactggaaatcagtgatgggaaagtgcaaggggaaggaacattttatatgctttacacttgacaagaacacttcatcctctcccattatttgctgtgcatacagggcagacaaaaatattgataaaagctggaatatactcacaagttgtatctttgataacagttcctataccagttaatagaattttcttggactttatgctgtctatgcttgtgcttaatgtaagtctttgtgtacatgtaaggagataatatgttgaaggaaagatcgttagtttggaatcccagataatccttgacttttagtaacacagttacttaactttctaagtattagattactcattttgttattttttttagatgatctgtggtctaccttcatataagtatagaatacatattctagtagggaggcaaattt

SEQ ID NO: 13682 - DNA, 1032 bp, Homo sapiens
tctagaaccagaaataccatttgacccagcaatcctattactgggtatatacccaaaggattataaatcattctgtaaagacacatgcacatgtatgtttattgcagcactgttcacaatagcgaagacttggaaccaacccaaatgcccatcagtgatagactggataaagaaaatgtggcatatatacaccatggaatactatgcagccataaaaaagaatgagttcatgtcctttgcagggacatggatgaagctggaagccatcattttcagcaaactaacacaggagcagaaaaccaaacactgcatgttctcacttataagtgggagttgaacaatgagatcatatggacacagggaggggaacatcacacactggggcctgtcggggggtggaggggaaggggagggatagcattaggagaaatacctattgtagatgacagattgataggtgcagcaaaccaccatggcacatgtatacctatgtaacaaacctgtatgttctacacatctattttataacaaagtataataataaaaacatagaaaagcacaaataacagaaacctggttgaaatgcttaactagagtcaattagatgtgcaggagtaagtagtataagaagaatcaagtccaggagtgatcgggaaatgagtattaaacagtatttgaaaaagagaagatgtcccagggcccaaaagtcagaagggacccaccagccaggcaagttgcttagatgctgtaagtaggtgtagccaagggaagccaggagtatttgatatatggcagcaggggtttatggctgccagggggaaataactggtcaagtgttgggctttcagttaagatctgatttaatttcctttccctcattctgcagcaatcagaatacacaatcttaaccactcagtccttagtggttttgttccattttacgttggatgttttcactgcctcacagagtccgtttcaaatgttttggctgaaagggctttttgcatttgtatgttctgagttcagatcctg

SEQ ID NO: 13683 - DNA, 1021 bp, Homo sapiens
gatttagcctttcacccaaagcaagtaaatctttggacattcttgcaaaaattaaaaatctcttgacagtaacttttaaacaactaaaatttttactaatggagactatatattaagcctttcctgtgtagaaatttaattttatttgtgaaaaacgaagatggaaaaatatttagttcatattctttgccatctggtgtggagggcaaatattttttaatatgccaaaggtatacagtttttgttaaaatgtacttgatttatctgcttttttttgaagacaagttttgtcttcataaaatagtttttggttttcttttttctagataaaactttttctgagcatgataattaacatcatgggattaaaaaaatttaatagtcctctttccttttatagttctacttgtccaattctgaaaaggaacgttatgaaaaagaattcagccaagaaagacaacaagaaattttgagaagagcagcaagagctttacctatctataccacatcagcttcaaaaagtaagaaaaagaataagttttccttttcaaatgatttttaaagtatgcttattcctgccaggatatatttgcatggtttgactattaaatggatactatgattgccataaataatatctgtagcaacaagactttcctgtttccttactgtatttcagatgcagaaatagatatataaaaataataatcaatataaattgtttaaggggcccgctttaatatgaatctcttctgtacttgtttttttcccccaactcaactttcatggctaaaaattttaattattattcttagtaaactgtcatttggaagtctgaatttgagtattatgtgtcatcactgagtaattaaaaaaaaatccaaaagtgtgctaagaatggggaacagtaagagacacaaataggaagaaacttgttcagatgtataaggctaatattctgagagtcaggctgtgaactcaggtttgtctagttccaaagcccttggtgtttcctctgtac

SEQ ID NO: 13684 - DNA, 1002 bp, Homo sapiens
taagttttagggtgggttgttaatgccacattatcacctatattgtagtatccttgtaaacctgtctcttcctgtgctccacccccacctttattccatgtattctccaggaagcagtcagaatggtctttttcaaattaataccagtttgttactcctattctcaagatcttgactggcgtcctttcttgctcagcaagatatctaaaagccttaccatggcctttaaggcattgtgtattcattacttcattacttctctgacataatttcctttccactcttcctctaattttatctctagcttaagaaatctattttctatagacagaggtgtgggagggtgtgttgtctaagggagggagccctccacatcatcaccatgtgggattttaagattaatacctgacgctattcctgtaagcatataagcaacacatttagatactgctcaaatatgtagaacatatacttgaacagatgggcattacacttaaatgactgatataataaagaataaaggtgactagttttatggagaatagattcccttaaatagagatccataggtctttaaaataaaatttaaaaaaaatttggttttaaaacatctctattttggctttcccaatgcattttactatcgtaaactttgaaccactcattggaatcataggaagaattaatttttatggacatactaattcaacagcatataaaaacaaacacaaacttattaaatgtgaagtcttctgggaagcttttaaaactaattgcatgaaaaggatatcctcagcatctgaaggaaataataccaaatacaccaaaatattaacagtgtatgttgctgggtttgagattatactgattttttccttatgcaatacatagcctcttaatagactttcatattttccccttacagcatattcttcccttatcccccgaagagctaatgaatctgctaaaaaaatacaagtcatgattattactcctctgctc

SEQ ID NO: 13685 - DNA, 1050 bp, Homo sapiens
aaatatgtggaaattaacaacccactcaaacaaccaatgcctcaaagaaaagggaaatgagaacatacgttgagacaaataaaaatgaaaacacaacagcaaaactatgagatgcagtgaaagcagtgctaaagagggaaatttttttttttgggggggatgaagtcttgctcttgtcccccaggctggagtgtaatggcacgatatcggctcactgcaacctctgcctcccgggttcaagcaattctcctgcctcagcctcctaagtagctgggattacaggcgcctgccaccatcctggctaatttttgtattattagtagagatagggtttcaccatgttggccaggctggtctcaaactcctgacctcaggtgatccgcccaccttggcctcaagtgctgggattacaggcatgagccatcgcgtccagccttaagacagaaattaatagctataaatgtttacatttaaaaagaacaataatctcaaatcaacaactttacaccttaaggaaccagaaaaagaacaaatgaaattcaaagatggaaggaaataaagaaaacctaaactgtgatttaatgtattgacagaggctccttacggacaagtttgagagttaaaaactccaggctgggtgtggtggctcacgcctgtaatcccagaactttgggaggccaaggtggatggatcacctgaggtggggagttcgagaccagcctgaccaacatggagaaaccccgtctctactaaaagtacaaaattagccgagcatggtggcacatgcctataattccagctacatgggaggctgaggcaggagaatagcttgaacctgggaggtggaggttgcagttagttggttgagatcatgccattgcactccagcctgcgcaaccagagcaacactctgtctcaaaaaaaaaaaaaaaaaaaaaaaaaaacctccagagggccctgacatggtggctcatgcctgtaatcccagcactttgggaggccaaagcgggaggatcacttgaggtcaagagttcaagaccagcctgacca

SEQ ID NO: 13686 - DNA, 1048 bp, Homo sapiens
tcttagagaagaaactccattaatgtgtgctcagtctggttccactccctagtaaccttaagcatagttacattcactttttgtcttttacccccattttcagttctgttgtgatcatcttttacaacataattcaccctcaactatttttggaggagtgtgggaaggaaataaacagtaacgtaaagtatatatgaaatcatgtttaaccttgaagacaatgaccccttgatttttactttcggttaacaggtaccacaacatcagagtatacaagaatactggaagtgtgtgaagaaagaaagcattaaaggagtaaaagaagtctggaaacaagctggaaaaggtcttttttaataaaagatataatagtatggcaattatattgttccaaatgtcaaaatttgtgattttttagaagtacttgctatttatcttcttaagtcttcattgatattctgtgtgaaataagcatgtcttgtacttgctttctgattcataattttattaaagaacttagtagaaagaaaagtaagtataaaaatagatattggattctgtcagaaggcctagatttgaaataatgttttgtacttcggtaagatggaaaacttagtgattcactgatttcttagacactctaatatgatatgctttctggaaggataaaacaaatacatatgggaaaaagtacttgagaccaaggccagcatcaattccagacatcttcatgttcctaataggctaaatgaagttaaaaacttatttcagatttttctcatctgtaccttatatctcataaatttattgcatattttatgtcagtagcttagctgtttattgtctttaaaataacatgtaaacttcaatgttctatctggaagcagaataaaatatttacatagatacaaaaaatactgaggtgctttttattttacatgtgtttttaaaactactttaaaaaaaattgtaaatactctcatcccttgccagcctcattagttcttaaaacctggtgtagctgggagaaattttgaccccaaggtca

SEQ ID NO: 13687 - DNA, 1042 bp, Homo sapiens
ccgtttaagtaaaaaccacagtgtaatttaattctgtctcccagaattttggtgtgcttttattgttatgaaagcagcagataatttaaattctgaaaattgagttttctgtcaacctactacgtattgttctgggggaaagcattgactcttgggctactcaggcagctcctgatggcatttacccgccctgcatcagtgccttctgattttgttgtgtttttctggtcttttttactcttctctcctactctctttggtgatttttcttcttctgcatttcttttctcttcttttaaactccatgattagccttaaagatagtgaccagaaataatccctgagtttatttctattctgacacatttgacctcattttttattccaatgaattttttaaactgaaaataaacctgtgacttaagatatataatggttagagggaagaaaattggcctcaagtcttctcgtcaggaaaaattggggaggatattgatactgatgtactttttagggctgagtttgttaaaaattctgaaataccaattattagttgaggatttctgagtttcatgaagcgtttttataaattcagaggtgtctagaggcagtggtgtgctagtaaatatgtttaacaatcatctgtctcaggaaaaacagccttgatttgtagtgtttgccaattagtagtataaataaataaatactctaccatgccaatgtcaagctcccctgcatgaagcagaggtgggaagacatgcatgatagactcacagcctgtacgcgccactccagtacaacactgcctaaacaattccaataaggaaaaacagatctctcccattgtttccaattaacccactaatttataaagtatgtaatttgttcacaatgtgtctggcagccttatctactataaattttccaattcatatatgcatgttcagctcatgttccagagtttcatgttataacaagataatatgattttaggcttaaagggaaaagattatcatcataaattgatttatattcattaaaa

SEQ ID NO: 13688 - DNA, 1050 bp, Homo sapiens
tagaaggactaaatagtttaaagcaaaagaaaatctgaaaacgtactatagtctttttgttaaagaaaagtacacctgctccaaaatagaaacaacaaaaagttggtaattcaaaaaaaggaagccattgaaaacatttaaaatatttacttatagttaaaacatggaatcatctaataataccatgtttgctttccttgctctgaactacctttggccctgactccctcctttatttgcttgggagtcattagggtatgttgtcctgcacagaagggtaaatacattcccaccgtcatcaccctctgcagctctttattcttcctgtccgaactaccatagtagtttttttttttcccattgctgcttccacatgagcattatttcagacaatcactttgcagttttcatattcagcttcatctgtcttaaatagctttcccatttataccacatccgcttaattaaaatttttaccaatcattcaaagtttactgttagaattacctcctctgtgacatctttgatcatctaaactccgtaaatgcctgcacatttttctaaacttttgtaactcttactattcgtatctctctatggtatctagtattttctgtaaacatctgcattttggcctcctaatggaagtatacaatgccatctgtgaagaattcttgtcaaaatcaaacctgaatcttagcacacatctggatttaagtaccatttgtagaaaatacagaaggtagaggaacatgtgaaatgataccaaggacatacagtcatcagaattttatagactattagaaattttatgggaccaatgaccacctttttcaacaattaaattgaaaggtaggggcaaaaaagacaagggagaaaacgtatatattaagagagacataagagacaggaaagctgggcacagtggctcacacctgcagtcctagcactttgggaggctgaggcaggagcatcacttgagcccaggaattcaagaccagccagggcaacataggaagaccctgtctctccaaaaaaaaaaaaaaaaaa

SEQ ID NO: 13689 - DNA, 1029 bp, Homo sapiens
acacacattttcctcattagatagttttctttctttgttatttacatagatggaggactgtttatgttctcagaatgaacaacagcattaatcatatatttccaggattttttttttttgaaggagaattaagacccagtatttcggatgattgggagaaagaccttagtgatgaactattagaaaaataggattttccccccttaggcaaagtctatgaggatattcatacgagaaatagaggaatgagcatgatgagaggggaaggggtgagggaaggaggctttaaaaggaaccagaaacagtaaatggctgtaaggatagagaatatacatagcattcattacagagtcaaagataaatttttaaaatgcacatgcagtggctgtgggaggaaaatcaacttacattcctacattcataaaggactggcagggaaatcaggactgtaagatgtaacttaaggatgacaagaaaattaagcaattggcaggtaaaagatgaggcagaactggagagttacagaattgggaagcgttagaagtatcatgaaagggcaaggtgtaagatctgctctctcaccattcatccaaatgctggccacccttaacttagacttttctatacttagacttctctgtacttttatcccacgctgattggggtctcaaccctgatccttccccttctccatccctccaacacatctactgtaccacattctagctggaagaagagtgtccctaattgtgagaagccttcacaggctgaatatatagagtctcccagctcctgtgtagcttgtggtttatgagctgctttaaagcctacttcatctgtaaaatagagatgataatatctacttcaaggttacagtgacttacatgaaacttctgacacagtgcctgagatcatgtcaacgaaagatctgttaattaggcaaatgtttgtgtcacaagtcctcttgatttctctgaaaccacactgtcctagtctctctctgtcattggccctcttccacctcctgcc

SEQ ID NO: 13690 - DNA, 1071 bp, Homo sapiens
tcttctccggagtatcactttaaccacacagtgtacccttcttcagaaacccttcttcagtgtctcattttgccaagagtaaaatgcactttttttttgttgttgagatggagtctctgtcacccaggctggagtgcagtggcgtgatcccggctcactacaacctcttaactccccggttcaagtaattctcctacctcagcctcccaagtagctaggattacaggcatacgccaccacgtccagctaatttttttttgtattgttagtagagccggggtttcaccatgttggccaggatggtctcgatctcctgacctcgtgatccgcctgccttggcctcccagagtgctgggattactggcgtgagccacagcgcccggccaaaatgcacattttaaaactttgtctttcagagccttttatagtcacactctgacctgacactactcaggcaccttcccactaaagtgattcactcactatccctagaacaagacttaaataccgctcacccgccagctgcaatttgtagactcttgatttcacttatccatctaattgttttttttttttctggcccacttctaatctttctcctttgaaatccctgacttgattctaaaagcttcacactagtgtagttattttggattctcttcccaactctcagctctccttccctgcagctttgtaagtttaatcttagctaaagtaatacagaaaccattttattatcaatcgttttataaggtctgttggcatagcatttgcctgatctgctattggaccgagacagtggttctcatccttttgccaccacggtggacattcctttcagcatcagtggctgaatacaggaaggattgagaggacctataggttgaaaactttgccttcgcctcagtgattttgatacatttccctaagaagtgggcctactaccactactttagggacaggtgtgcatagttgagctagatatataccagaattttggcttgtgatgaatctttcattgcaatagaattttatgcattaatatagttacattggtattccaagttggta

SEQ ID NO: 13691 - DNA, 1030 bp, Homo sapiens
gtgcacatgtaccctaaaacttaaagtataataataataaaaaaaaggtatttttcctttatgaaaataaacgatgttcattattaaaaaaaaaagaaaatgcaccacttaattgatatgtatatatacatatacaagagcaggtctgtttctctgaaatttatgttgtattttggtgagagatttgaacttcgaatgtatagccatgaggtgaactttgacgagatttgaccatggacaagatgaattattgacaagctgttactctgaaaaagcccccagtttacacagagtcccatgttatatcgaatatattttctattatgagtcattaagtcatatataaataattctgaggactccctagtgatatttggagaatatgaaagctttcatggtggcaaagtcaattaaatagagtttctaaaagagcagtattactgtcatttaatcccttccttacctgtttttgactattttatcctttttccctattatccttttcatgacttatccctgacctgtaaaatatttttttcttcttctgcctctttagacgttagcatttcctacagtgaaaacactgatttaattggtcatcctttagtctgatttttcactggaagccagagaacctaaacaattttagcaaggttttaattattttctgtattgtttaaattcgtttttcgttgtgtttcattctatttcgtttttggagatactatggagataataatcactttcaccttcattattttaattactttttggcttttctctcttcctggaaaataaaagaacaccgtgttataaaaaagttccctctaaagtagctttttgtatataacctttaaataattaaaacttcaaaatctttttatagaagttatacaagaaggtgcgatatttacatattcttaagcaaatggaactgtgctttagaataatagattattccattctgagcagcatttattatttaaagttattggaaagttggcactaaacctgtactgaaccaataagc

SEQ ID NO: 13692 - DNA, 1043 bp, Homo sapiens
tttagtagtttatgtctttctaggaatttgtcaatgttgtctatgttgtctaacttattggcatacagttttttgtagtattccctcagtattctttttatttccataaggtctgtagtaatgttccccctttcactcctgattttaataatttgagccttctctctttttctcttgctcatccttgtgaaaagtttgttaattttgttgatgttttcaaggtaccaacttttagatttgtttattctacctattgtttttgtattctctcctttatttttcacttaacattttattagttctttccttctgctcactttaggtttagttgctcttctttttccagaattgtatgtggaagattgggtttatttatatgagcccttacttcttttttagatacaaacatttaaataataaatttccctttatgcaccatttcactgcattcaatacattttcgtttgttgggccctcattctacataatcttaaagtattttctaattgactttgtagtttcttccttgtcccattatttatttaagagtgtgctgtttccttctgttatttgtaggttctggattattagcaaataattgttaccactaaagtacctattttttgcactgctagtcattccttggaatgatattaataaatacctacaatttacttataatttggcaacaaaaatgctataaactgactgttagatttgtatacaatttcctttggattctacccagtttacttttggtactcttgcaatgaaaccaaatagtatcatagacacaacctctgtagcacattttaggtggaaaacactgtcacagaattttaactaccagatctgttttaggccatacagtttgctcttagttttatcaagagaatttttaaggcttgctgcgacactgctatgtgtccttttcaaaatctgttcttttcattacttacttagaataagatctctctaaaattttaaattaatagcacagagagagaggctgggaaagcagcctttttatgtaaatgaaacct

SEQ ID NO: 13693 - DNA, 1829 bp, Homo sapiens
gaagcttatggtgtagacagtttaaaaacaagataccctgatttgcttccctttcctcagatcccaaatgacaggttcacttctgaggttgctatgagggtgatggaatgtactgcctgtatcataataaaacttgaaaattttatgcaacaaaaagtgtgaagatatttaacgaaaaaaaaggtagatcttgaatgtgttgtagcacgaataaattgctgtacttcattaagcttcattgccaattagctaggaattgttaagcacattgcagattgttcttggagaattctggagttgttatgaacatgaataccaacggaaaaccttaactgaatctaaaagaaaactattttgaagatggtggtgagctgcaaaatagctggatggatttgaatgattgggatgatacatcattgaactgcactttatataaccaaagcttagcagtttgttagataagagtctatgtatgtctctggttaggatgaagttaattttatgtttttaacatggtatttttgaaggagctaatgaaacactggacatataattggtttaaacataaggggaattaagtctttgtagtctgtcatttttttaagtggatcctcttggatgcgttattttctcatcagctggctctgatcatgaatttgttgtaattttatgttgtactcagtgcatttaagaaatggtagagtattttaatcctattacttgactaagagtgtgaaggtagtactttttagagtgcactgagtgcactttacatctttatttaaatttttttttaacatcttatgtttacaggcttcctgtttgatgaagatagcaacggaaaactcaaaatggtggcagttcttattaccagttgttagtattgtttctggaaactgcttgccaagacaacatttattaactgttagaacacttgctttatgtttgtgtgtacatattttccacaaatgttataatttatatagtgtggttgaacaggatgcaatcttttgttgtctaaaggtgctgcagttaaaaaaaaaacaaccttttctttcaatatggcatgtagtggagtttttttaactttaaaaacatcaaaaattgttaaaatcattgtgttatctagtagtttataattatcggcttatatttccccatgaatgatcagaactgacatttaattcatgtttgtctcgccatgcttctttactttaacatatttcttttgcagaatgtaaaaggtaatgataattagtttatataagtgtactggctgtaaatgatgctaaatatactttatgcaattaagggcttacagaacatgttgaaactttttttacttttattgggaataaggaatgtttgcacctccacattttattgcttctggatgtgaaatcatgtaattatttctgctgttatataaagtgccatacttttaataaaggaaaatgtacatatgaaatcatcgtaatgggtgtttcctgagaaatagttcattggaaatcaaacttaacatcttaatattaagttttaatgtgtgtgtatgtgtgtatttattggaaatattaggaaaatattttcctgtatattttcatgctggaattatagatttttaggattaatagaatatgaagtgcttgttatatactaggtttaggtgctcattgatttagttgagtttatgtcacctttttagggaatcagattagctgatatatgtggtatatatgtgtttggaaacagatacattaaatatttttttcctctaggtagagctgaattgatatttccattgcctcagggacagctgcatgtctgggact

SEQ ID NO: 13694 - DNA, 2528 bp, Homo sapiens
tcttttttaatgacattttcctctcctgacactaattgccatattgggaagctgccttgtcgtctgcagcagactaatctaaaactttttcatagtttaaaacttttagttgattattgttttaaagatgcagaagaaaatgagattgaagttgagggattgccccttctcatcacactggacagtgttttgcaaacttttgatgcaaaacgacccaagtttctaacaacatatcatgaattgattccatcccgcaaagacttgtttatgaatacattatatttgaaatatagtaatattttattgaactgtaaagttgcaaaagtgtttgacatttccagctttgctgatttgttatcctctgtgttgcctcgagaatataagaccaaaagttgcacaaagtggaaagacaattttgcaagtgagtcttggcttaagaatgcatggcattttattagtgaatctgtaagtgtgaaagaagatcaggaagaaacaaaaccaacatttgacattgttgttgatactctaaaagactgggcattgcttccaggaacaaagtttactgtttcagccaaccagcttgtggttcctgaaggagatgttctgcttcctctcagccttatgcacattgcagtttttccaaatgcccagagtgataaagtttttcatgctctaatgaaagctggctgtattcagcttgctttgaacaaaatctgttccaaagacagtgcatttgttcctttgttgtcatgtcacacagcaaatatagagagccccacaagcatcttgaaggctctacattatatggtccaaacttcaacatttagagcagaaaaattagtagaaaatgattttgaggcacttttgatgtatttcaactgcaatttgaatcatttgatgtcccaagatgatataaaaattctaaagtcacttccgtgctataaatccatcagtggccgctatgtaagcattggaaaatttggaacatgctacgtacttacaaaaagtatcccttcagctgaagtggagaaatggacacagtcatcatcatctgcatttcttgaagaaaaaatacacttaaaagaactatatgaggtgattggttgtgtacctgtagatgatcttgaggtatatttgaaacacctcttaccaaaaattgaaaatctctcttatgatgcaaaattagagcacttgatctaccttaagaatagattatcaagtgctgaggaattatcagagattaaggaacaactttttgaaaaactggaaagtttattgataatccatgatgctaacagtagactaaagcaagcaaagcatttctatgatagaactgtgagagtttttgaagttatgcttcctgaaaaattgtttattcctaatgatttctttaagaaattggaacaacttataaaacccaaaaatcatgttacatttatgacatcctgggtggaattcttaagaaatattggactaaaatacatactttctcagcagcagttgttacagtttgctaaggaaatcagtgtgagggctaatacagaaaactggtccaaagaaacattgcaaaatacagttgatatccttctgcatcatatattccaagaacgaatggatttgttatctggaaattttctgaaagaactatctttaataccattcttatgtcctgagcgggcccccgcggaattcattagatttcatcctcaatatcaagaggtaaatggaacacttcctcttataaagttcaatggagcacaggtaaatccaaaattcaagcaatgtgatgtactccagctgttatggacatcctgccctattcttccagagaaagctacacccttaagcattaaagaacaagaaggtagtgaccttggtccacaagaacagcttgaacaagttttaaatatgcttaatgttaacctggatcctcctcttgataaggtaatcaataactgcagaaacatatgcaacataacgacgttggatgaagaaatggtaaaaactagagcaaaagtcttaaggagcatatatgaattcctcagtgcagaaaaaagggaatttcgttttcagttgcgaggggttgcttttgtgatggtagaagatggttggaaacttctgaagcctgaggaggtagtcataaacctagaatatgaatctgattttaaaccttatttgtacaagctacctttagaacttggcacatttcaccagttgttcaaacacttaggtactgaagatattatttcaactaagcaatatgttgaagtgttgagccgcatatttaaaaattctgagggcaaacaattagatcctaatgaaatgcgtacagttaagagagtagtttctggtctgttcaggagtctacagaatgattcagtcaaggtgaggagtgatctcgagaatgtacgagaccttgcgctttacctcccaagccaggatggtagattggtaaagtcaagcatcttagtgtttgacgatgcgccacattataaaagtagaatccaggggaatattggtgtgcaaat

SEQ ID NO: 13695 - DNA, 1058 bp, Homo sapiens
cttgcattcagatgtgagcagtcatcttgtatcatggcttttcccctttactggcactttgtttcacagccagaagctcttaaggtcaacttatttttattcatttttatataatgagataataaaaggctcagattgtcaaatcacatgcacaagaatgagagctctcacccagtataacacactttactaaggatttcaaggatacagctgattataagacacaggggaaggaagcacggagagtccctctgtgctgcactaggacacaccttggcctggatctcacggagttggtttctgagtgatgcacacagaccagcacttaacagagggagctatttcagtcataaaacatgtacatgattttctctgataatcaacataacttgtgacattttcaaggggattatgcctcttaaatatataaattccaagcttatttccaataagcaacttctgtaaagtatccagtagctaaggactcttcctagtaaacaccgtgtatgtgcttgcctagaggtctgtcatcagcatgttaacaaggagatttggctgggtcatctctttctttcttgggtattccctggggaaagggggaaatagactgcaggcctgctcccagctctttccttcccagacaaccttttaatttttctctcaggatgtttattccttttttttttttccttctttttcgaaacggagttttgttcttgttgcccaggctggagtaaagtggcgtgatcttggctgtctgcagcctctgcctcctgggttcaagggattctcctgccttagcctcctgaatagctcggattataggcttctgccaccatgcccagctaatttttgtatttttagtagagacggggtttcaccatgttggccaggctggtctcgaattcctgacctcaggtaatcttcccacctcggcctcccaaagtgcttggattacaggcgtgagccaccatgtctggccaggatgtttgttcctttcttatcttacttttagaaccaagaacacatcgttttgatcagagtagatacaggccatt

SEQ ID NO: 13696 - DNA, 1395 bp, Homo sapiens
aacatagtttataagtttaacctacaacctatgactccttttgttctgtttagatgataaccagattttaagtgcatcatgaagacaggaacaacagaagcaagatcagtagagacttgcacatcactgggacttgccctgcattctgatgctaccatgttagagaaacacaaatactttaaagtgctcagagttgagagccacagcagccattgctgtgtttatggtccacttgccccatgggtaaagtcagaataagccacgagatcacccatcttaagcattttcacctgcctttatatccttgacttctctttttactttagtagcactgattttttaatctgtccttgaactgtttactcactggcgtttaagcattttgagcaaacctgcagtaagaaatgcattttacattatgatctattgtacagatacatgtatgtacatttaggtgtatatgtacatatatgtgggagtgaaactgaaacaaaagtaccacaaatctaaagttaccctctgtgctgtgcactatatattttctgtcccattttcttcttttttttttttaatgcaggtcacaagctactgtacagattttacaaaccattagtagatactggtgcacagtttgaaaaatctccatgttaacttatcctgcccagtgattttgcttattctactttctttcccaagtcaaccataaaacctttttccgatagagatgttttagaactaaattatttagaacactaaaaccacaacttttatttaatcccaccaccacttctcctcatgtgtgttaattcatttgaatgacatctttcaggatggatgatatatacatgtacaagacagtgtgaaaaatgatacaatgcagtgctgtgagaacactattataaatagagaagtgttgaattttgcctcgtggagtcagaaatgaccattaatctgggcttagttgcttctgcttcagattttaccctagcttaagccacagtagggaggagggagtgaggaacaggtaaggtatgatagaaagtggttagagaatatattagtcctggttgcttgatgatagggaacttggaacagaagggaggggctgttgtttgggggttgaaaatcagactgggatcaagtcctgaagagttctttatgtctgctcagaggcttatatatgactggggagggaatagggaggccttagaggtttgaagtttgtaagcagagaagtgacatgagcagatataagctgcaggcaaaaagttaaggtttcagtatgggtgatagatggggggtacagagattgaaggcagggagaaaacaatctatccaagaaatagatgaaaacaaatagaaaaatacagtgaatatgaccatatacttaaaaac

SEQ ID NO: 13697 - DNA, 1068 bp, Homo sapiens
agtgtagcaccacgtattgacctcatgtagcatcaagtatataatgattttaccttaaaagcgttaattttagaatagttgataagacatgaagataagaaaataattatccattaagtgatttctgtcatctagattaaaatgtcaatcagattgttcccattagttatttttaaactaagacaggtaagtaaccgtgatcatatggggagtccttatacagaaatcttagggttgctttggaccttggctatttttatcccacacttgttcagatgttggttgaaagaatggcataagggtctgtttttaaatgtataaacaaatatattgtctattaaacaataggactggagccccaggcgggttaaatatttactgctctctctccagagtattcaatttaaactatttggtaaaaatgcttattcctcctattctttttttttttcttcgccctggggaagaagtttcctcctattcttatgccccagctctcctgcaaatggaaagtctcttccatgaggtgaagttagtgcctgggctgagctagcttggaatatttgatgttgctaagcaaacatcaggttaaagaaaacaatatttatttttgtttttatcttaaatacgaagaaagaccatatggtgcatatctagaaacacctaagtggttaattgcatgttaaatttctttcctctttgcctgcataaacaactgaaaaaatatttactttctgtgtcatgctaggtttatttatgactttgtaactaaaacacagaagtgttataaattgaaactttaatctcatgattgactcattttctaaaaatttatatggtttcagtttgtgggacagctgcaactctagatttcagtgatttaaaacatgaggaaattatgactacccggttgtttttttaatatggtcctttgagccaaatcaccaactttcatttttgtcttggttttcatgaataatgctgccctttttttcttctcggcctgcaatttgacaagctagatataaggaactaaaaatccaggctattagtagaagttatttcttt

SEQ ID NO: 13698 - DNA, 1076 bp, Homo sapiens
agagggtggggcccccactccctagtgtcctttaaggggacctttcacacagcaatggctgattgtgtctcacagtctagttggggctctagaaatctaagtttaagtcattgaatgcatcatcgggataggatgaatcaattagctaaatgcttgaaataggagcatttggttacccaaccgtagtacagccttgcggggtggggcaatgtgaggcaaccactccagggcttttaagtcagttctttttagtttataggcaactttagcatattagacaggctgcattgtcttgttatagtcatatagtcaaatcttgagtttttaaaaataaacacagaaattactgttttaaatacagtggtaattgtggaaaaattcaggttggattattacagtaagcacattaggtcactgtagttaattactggcatattatattccaatagtagaaacaacatttctaccattttcctattttaaaaaaccacccacgatgtttgatctctgcttttgaaataccactgttacggtagtacaaatggcaccatttattgttagggtaattgcttttccaacactgtgaatgattactctcttctaaattcctttattgctttatctgcacctcttttgtggctcttggtgcattttcccatgctttatgaatcctgaaatacatttggcccttctgtgtccacacagtcaactaaccatgggtcaaaaatacttggaaaaaatagtaataataacaacacaattattaaaatgcaagtaaaaaagcagtacagtgtaacaactatttacatagctactttgtattaggtattacaagtagtctagacatgatttaaagtatataagaggatatgcatctaggttatctgcaaatactatactattttataccagggacttgaacatgtatggattttgttcttggaggaaggtcctggaaccaacccccctcagatactgcaggttgtacattccttttctggttccaggtagcaggatcaggtgagattcattgtgtattacccagctgcttagtaggatgccttgcacagggtggg

SEQ ID NO: 13699 - DNA, 1034 bp, Homo sapiens
tccacccacctcatagtttgctagtttactaatatttttatattcttgatttttgcatttatgtttatgagagagggattgcttatgatttttctttgtcattatttgctggtgttcacttaaatatatactatttcataaaatgagttggtgagtgtttctttttcttttctttacaagcatttatttataacattgttatcatttgttctttaaaactgtcggaattcatctatgaaaccattcagggtctgttgtttcctctgtgggaagattttttaaatgactgaatccttactagtcataagcctctttgggctttcttttcttctcagataaactttgctactttgaaattttctagacatttatcaatttgagccaagttcttcagcttattcacataaagttacttatagcattcttttatccttcaaattctgctataattgtatcctttttaatttctaattctgttttctcatttttttctctctgttaatcttggcagaattttgtccactttatcactgtaatctctcagtgtctaagcaggattggttcctgggccactactccccgccaacgtggctaccaaaatccttggatgctcaagtcccttttatgaaagggtgtagtatttgcatttaacctgtgtacatcctgctgtatactttaaatcatctctagattacttataatacctaacacaatgtaaacgctatatagatgctgtattgtttagggaataatgacaagaaaaaagtctgtacatgttcgatacagatgcagtttttttccaaatatttttgactcatggttgattgaatccatgaatgtgcaaccctcagatatggagggctgactgtattttcaaagaaccaatgcaaactttgtttatcctattttgtttgtttcagtttgttacttcctacttttattattactctctccttcctccatccttgtttttttcttctgatttcataggcatttatctaattcggtttctgttttatttaacataagcattt

SEQ ID NO: 13700 - DNA, 1034 bp, Homo sapiens
ttacctatttatatttaatagctatattagtctgttctctgttccttagaatacctgaaaatggataatttctaaagaaaaggaatctattttttacagttatggaggctgagaagtccaaggtcaaggggccgtatctgatgagcgccttcctactggtggggactctgcagagtcccaaggtggctcagggcctcacatggcgagggactgagtgtgctcacatgctagctcaggtctctcttcctcttcttataaagccagcagtcccactcccatgataatctcttaatccattataatcaatggatgaattaatccatttatgagggcagagccctcatgacccagtgatctctcaatactgcctggagaaggggtatttaagccccattggggcttaaatttcaacatgggttttggaggggacagatactcaagctatagcagtggcatagtgtgctctctccccaaatctgtcataaaatcacagtggctctttacaaatattgggttcttagattcaaggaaagaagacagtctaaacccctatacccagcattgaaaatgctaagcaccttcaccgtgcagtctaatagcctgccccttgacctctgctgtggttagaatatggtttgctccaccaaaacttatgttaaaacttggtccccaacatggtggtattggtaggtggtgcatttgagatgtgattaggtcctttagatggagtaatagctctctctggaggctgggttctctctggaatggattagttctcatgggaacagatcagttcccacgagagcaggttgttatgaagcgaggttgcctcttgtattttgctctttacatatgcatcaggttccccttccatttctctgccatgctttgatgcagcacaaggctctcaccaggagctgccggatgtgttgcccagtcttgaagttcctagcctacagaattgtaagctacataagcttctgttctttataatttacccagtctcagatattctgttatagcaacacaaaatg

SEQ ID NO: 13701 - DNA, 1054 bp, Homo sapiens
aggttttcattcctccctgttccagggctaacctggatcctctctcacgacatttccacaactcccattctgttcttcctaaagcaagaggcagcacataggtgttatttttggttattctttcctactgttcaattttagacatggctgtttgatttcacattttgatacagcttaagctgaatgagagaccattgcaatagaggtctccttgctgtagtgagatttggccccagcctctatggcgagaattctgtcatctagtggcacattggtgtggtgtcatctctcactgaagtcaggcctactggtttactttcctaatccctaggatgatgatggaattgtactgtctttctttagctttgatttctgttaaccacagttttcagtgaactgtgttgctgatctgcaccattaatgaaaattatttcctggttgccaggaagtttgactggagcaattttcttgccactagcttcagaagtcaagacagaaccaaattagcaatggtggattctttatagaacagggggaaaggtcttttcagttctatatagttacctaaagggcaaacaggtttccagtatcattcagttcctttactgctaccttctctatgtaaccaaataaaacagtagctctccctgtggttttcaaggcagcatttcaaaatgtcacccagctataacatgagaattatacttagtcattcctgatgccaaaaatacagtttcatttgcttttgataaagttaaaaatagtttctctgacagtactgtcacgtgctgtgtcctttacaggtgtccattttttcctcgcccacacgtgccctccggcaggccatcttgttcattctgtaacaagcctctgtgggcatttgccatttggtgcacatgttctctgtcacatttgctctcactcactgaatagaataaggtgagactgaagctgtgtttacctgtgtttcaacctggattctctgactgtacttgattgtgttttatattttcactaagtttgaggccatggtgtttggacgtaatatccaagt

SEQ ID NO: 13702 - DNA, 1047 bp, Homo sapiens
caacaacaaaaaattagccgggcatggcggcaagtgcctgtagtcccagctacttgggaggctgaggcaggagaattgcttgaacccgggaggtggaggttgcagtaagcagagataatgacactgcactccagtttgggcaacagagtgagactttgtctcagaaaaaaaaaaaaaagcatcgttaggcacttttgtcattgtatgatcttagagtgcacttacacaaacctaagggtatagcctacacacacgcctatgctctctggtatagcctgtcgctcctaggctacaaacctgcacagaatgttaccatactgaaaactgtaggcagctgcaacacatgataagtatatatgcatctaaacatggaaaaggtatggtgaaaataggtataaaagataaaaaatggtatacctgtatagggctcttaccacaaatggagcttgcaggactggaagttgctctgggtgagtctgtgagtgagtggtggtgagtgtgaaggcctaggacattaccgtacaccattattgactttatagacactgtacacttaggctacactaaatttatagaaagatatggttctttcttcaataataaattaacttttgcttcctgtaactttttttaccttataaactttttagtttttaaaaactttttgatacttttgtaataatatttagcttgaaacacaagcacattgtatagatgaacaacaatattttctctttttttaatccttactctataaacttttttctattaaaaattttttttgtactttttaaatttttttgttataaaccaagacacaaacatacacattagccaaggcttacacagggtcagaatcatcaacatcactgtcttccacctccacatcttgtcctactagaaggtctgcaagggaaataacaggcatggagctgccatcccctgtgataacaatgccttcttctggaatccctcctgaaggaccggcctgaggctgtttcacagttaacttagaaggagtacaccaaaatagtgatagaaagtata

SEQ ID NO: 13703 - DNA, 1050 bp, Homo sapiens
tccttgtttaaaacaaagtgtgtgtgtgtgtgtgtgtgtgtgtgtgtgtgtgttttgaagaaacttttggcagtgaggctgaaaaagacttatttatttaacaaaaaaccacaatttttttgttagcaatttttattacctgttataacctggggctcatttcatttataggcgagtggctgaactgtttatgtttgattttgaaattagtggaatccatctagacaaagaaaaggtacatctttctgctgtttttttgactcttccagttttactaacatttagttgataccattattgctacagtccttgtatatattgcttgaatttgcatattgcaaaaacgtgcaggtcttttatctgttatgaaattcttctttagattgtatttgaatatagtcccctctctggaagttgacctatcacaccatgataattcagaattaagacaggcttgagccaagtggagtgttttagataatcatggaattaggatgagataggcaatatcaggaaagactggcaagtgaatgggaaagctgatgtcattgaagattggtagtacagggaatatcacataagaccttacataagtgtatttatttatattatacgtgtgtttgactgatggaacaagcatagattacacagtgtttacactgggatggaggccttctacctagtccatccccttcattttacagatgtggaaacaagacaaagtgatttgttcaagttgccatcctaactaacaaatggccagtgttcttaaaatttctaacactggccactgttctttctagcacataacatcctgagaaaccaagtgcctcatttcagttgtaaattcagagttggaagaacaggagggacttgacaccattggaagttcagcctgccccacagtctcccccactcacctgcagtctagactattatggctttttgtttatttgttttaaacagtaatacatttttcctagtaaatatggtagaattaaaccacttacctatgaagagattaagttatcaaaatatctggaaaagcag

SEQ ID NO: 13704 - DNA, 1026 bp, Homo sapiens
gtctatcatctatctcaccagactgcaagctccttgagggtagggcttggtctgttttgttcccagctgcatcctcagtacctacacattcatggcatgtggtcagtgctcaactaatgagtggactcctgtagacagttaataattacacttagctttatgctcaaagttccataattgatactatcagaaaatgtaagcaaatcgattttatctactgggaggatgtcaagatccttgtaatgatttgctttggttcattaggctacatttataaatctgcatcaaaaaggccttacttttaaatcaacatgttagaatatttgatataggaacctagatatcttatttctttgctcaaatgcaattgtgagtggagtagggtttgtccttaacctgcttataatatgtatgtcataacacagattaattttttttctcatttgtttgttcctgtttatctacgttttgttggtgggacacttcctctgacaacttgattctttctgatcctgtttccttctattttgtctccatatgtggcttattgaccccaaatgaagccattttctatagggaccaattgatcatccagtttgctgttaatctaatacatgagcagcatggtatgtgagtaactcagtctttgaggggttattttcatctgcctggcaggtatgcaggtacctagtggtgtttcactttatcagtcctgatgctcaggacactagtgaagctagctgtgtcatcacagtagtttaagctttatcgttatattgctttcattagcaaagcaaggaaaagtcgaatgcctattaattgtgccagatttatacggaactggtactgactttacataacaacaaacaatgttaaaaatagaaggttattcataatctctatttactgaagatcgacatgcccctgtttgtgtataaagaattgtagtgggctagcagaccattttagatagaaaggacttgtagtgataggatacataccacatttctagatattattaaaaat

SEQ ID NO: 13705 - DNA, 1096 bp, Homo sapiens
ctcagcctcccgagtagctgggactacaggtgcctgccacccccggctaattttttgtatttttttttttagcagagatggagtttcattgtgttagccagatggcgtattgtaattctttaatgagaattttataaacaggcacagtttgagatgcagagtttccaacagacttaacggagtttttttccttttaggtgtaaaaggaagagaatgtctcctggacctaattgccacaatgctggtactacagtttattcgcaccaggttggaaaaagagggaatagtgttcaaatcactgatgaaaatggatgacgcttctatttccaggtggctttaactatagtattatgcaacttatttatattttcaactatttatttaataaaccttagaaacagctatagggaattatcttacatgtgtacactataagtatgtagcaagagaatttgtttgcaggtgacagcttgcccatagtctcctgtggcgggcagggctgatgtatttgtgccttgggctgcacaggaaatgggctcaaagagtttcagtgcagctcccgctggaggctggcgcttctgggctctggatgtggtactcttcactgcagtctgctgatcctgggtgcctccagaagacccacaatgtgactgttgggcccagccctgttcccaacaatggcagggcctgggacaagaatacaatacaagtatttaaagtttataactttgtagtttataacaagtgtttaaaggttataaatcaaactagcaaactattagattaaatgtgttctaatctcctcccttggcaaatacaacttcataaccacctggaaggccaggttcaaattcggcccttggttgacccccagcaccctaagagggtttgcctgcaaacgtgaataccccaccccacccatcaaaatgccatccagaccccatgccagtgccccctcacaccagccaccttgtagcaccagtgagatggcaacactgttcaaactcaggatgacagaccagggaagaccctggaagtggactcagggccatgtggtcagggatgctggagttgcagggtctaaaaaggaggatat

SEQ ID NO: 13706 - DNA, 1073 bp, Homo sapiens
gtgttttgttcacagaaaaggtctggagggatataggccatagatcagataagacattctgtatggcttttattttcttctttgtgtctgtctacttgtgtctacttgtattttctaattttctcatagtgcacatgtgttgtttttagattttttttttttttttgagacagggtcttactctgttgcccaggctggagtgcagtggcaccatcatagttcaccgcagcctcgacctcctgggctctagagatcctcctacctcagactcccaagtagctgggattacaggagcgagccaccatgcctggcctgtttatagaaatttttgaaattattttcaaaattggttctaaattaatttaggttttaatacagtgtgatgataaattatttcatactaaatttgcaaatacgttggatcttaatacttccagatccaaacatatcagatgaaaaatattatccattagcttgatgacttgaaagtttatgttagctgcaataagttgtttgaacggaccatgtaatttagcaaaaatgtcaagcctctgttactcttcctcgatatctgttttaccaaaatgtggcacctgccgcattctacacggagtcattccactgaattcagtaacacgccagccgcaatagagcccggacatccaggtctgtttggtccttcccgactcgctgaagcttggggcatttccttatttgatacatcttcattgtgaaatgagaccctccagggagcgcaacaccttttctgctgggacgtgctcaggaaggacagcgctcagtgctgtgtgctcttgtcctcccacagccacgcctgggcttaggcgcagtgtcttctgcaccaaccccaaatccacttcgttccctcccgctcatgaaagcacattgagaacaagcgagaggcagagatttttaaaacatacctcctaatccaagtttttaaagtaaatcatttgtaaaattcagtgctataactcttagcaagaaattgagggcactgaagctgagggtccagagcccacgctgttccttaaatcaggggtccccaaccccca

SEQ ID NO: 13707 - DNA, 1058 bp, Homo sapiens
gaaagtttcttagtgggaaaactgcctgggggttccagctaaagggaatgaggaagaaagggatatatacaggttagaggtgatgagggaattttttcctcaggtttatggaaaatttacttttcgaatacctaatctggtccatttctattgaaattatagggttggagtgctatccttgaggaatgagagaaggacaaagaacaacaggcaaagcagtagttagactttcctgtacaaagtctactttagggtaacaaattgttgataagggaaggttttcttttttaggtaaattccagctaatacatggaaaaggaatgagaaaattagaaaatcacgagtttgctactcctcacgaaataaaggatcttttgagggaatgttttacattttattacaaaaaatttcaaagtaggcagttgggaggagaattagccatactttcgtcaggagaaaatcttaggtgataatcttgtgttggttttttaggtggaaaaggtttataagaatgggtgccgtgttatactgtttcccaatggaactcgaaaggaagtgagtgcagatgggaagaccatcactgtcactttctttaatggtgacgtgaagcaggtcatgccagaccaaagagtggtatgtttccagaggtgttctcctccatagtttaaccatctctggagaaaaggcagactgactgtgtgtctttacagatctactactatgcagctgcccagaccactcacacgacatacccggagggactggaagtcttacatttctcaagtggacaaataggtacaaacttgctccaccctctcattaaattcttcccttccttcaaaaaatatttactgtaacaactttttaaacagaaaaacattacccagatggaagaaaagaaatcacgtttcctgaccagactgttaaaaacttatttcctgatggacaagaagaaagcattttcccagatggtacaattgtcagagtacaacggtatggcaacattatgttcacagaaaaaccactcagtgtgacacctgttcatctgtgctcagaag

SEQ ID NO: 13708 - DNA, 1065 bp, Homo sapiens
ttgctgatgtgtggcagtttgggacctataaatcagtgatttcccatggtgtaatggaaccattcctgtctcacaggcacagcacagccgcctcacacgcccagcagcttgttggctgaccacctgcctccgctctcctccttcaggccattctcccgtaacatccagctctgttacactttttaacatggaggtcagattctggcacttgctcgagacccttccaagttgagtgtttacaatatgatccattggcacataggatgaaaatactggcacttcagtgtatttttagagagagattcacctcactttgttgttggtgggggcgtgtttattttgtaatgtatatgttgctggtacagtatgtgattggtgtgctggacatattacaaaaagtttataccatagccacaagggcatttatgttttaactaaatacccagttatttggtgaagccaaattccacaggtcttagatgcctcttttatctgcaccttacaccttgtgattgtctctgaaatacatttgggtctgtcaggctgtttcatcacctgtctcttccccaggattgtaaactctgagacaagatactgtctttcttggacatctaggacttaagtacctgtgtcggagaactacaaattagtaaagaaaaatattaagacatccttaactaatggataaaggacagcagttcacaggatatgaactaaggaaatgtgtgatcatactaataaaattttcaattaaatattaaatctaactcttgacaattttattctaataggcaatccacctcgaagatccaagtctgcacctcctcgtgatttaggcaatttggataagggacaagtaaatctctgtttttatatattcttcaaacatacattacttaggcttgaaatcaatttgttaatagacttaacgtttctaaaccacgtgtaaaaaagagtttttacttaacattataaatgttatattttgtaaacactagtcctagaaccctatatcagaatctggctttggaagtaagagtaggttttagctgcttgaaatgtgtt

SEQ ID NO: 13709 - DNA, 1130 bp, Homo sapiens
caagaaaaattatcttccaatgcaaggtaagaggctgcatgatctttttataaaacatttcagaatgtaaggaataaacaatttatacccaacttaataaaacatttcttaataaatgtttttgaacatttgaatgaatttgaattaataaatgtaattgaagctcctgtgcatcatcttattccgccagttaatttctaccctgataatggtccatgcttcggttttaaattattttaccttgttgcgttcataaattgttatactggtcgagcatcccaaatctgaaactttttgagggcaagcatgatgctcaaaggaaacattcattggagcattttgaatgtggattaaggatgctcaaccaataagtatttgcaaatattccaaaacttgaaaaaaaaatggagatctgcaatactgctcccaagcatttctgataagggacactcaccctgtagtattgtttcatattctgtgtgtccttctgcaatttttttctttcaatactgtatgacttaccaatcttaacacataaaacctccagttgattgattttaatagctatgtagattgcattgtatacttccacagttcagcattcctggtgatgggcaattaggtttgcatgataatgaatagggctgcagagcgtgtcttgatcctgtggcttctctaggatatatatgaagagtaagatgccaggccatgtcagctggaggttttccctttgctctgcaacatggttgtaccagttttttttactgtcagcagagtatgctcttcatacttgcaaacacttgatctggccagactttaacattttggccagttgatgtaaaatggtggttgattccgtgagctggtaaggccctgtgagcatgttttcttacatttagtcagcatttgaggttccccttttgtgaactgcctgttcatttcctttgtccatttaaaattttggatgtgtgtgtgtgtgtttctccttataaaatattccgcatagtaatcctttgtcagttacaagcactgctaatattttctcccaatctgggtttggcttttcagtttgtgttttttttaatgtatgtttttccttgtaatgttgaatttactagtcttttaaaata

SEQ ID NO: 13710 - DNA, 1013 bp, Homo sapiens
tattttagctgcatgaggacagcgtgggcccagaggctttcaggacatggcaagcactgggggtcgaggacccgtagggccatgtcagctgtgagcgtggtcaggggtggggaattaacagaataagctgcaaagacaggagcgtaatgagaaagtagcattcttctccccgccgctcccaacctttttagtatgaaagcttcccaaaatagagaataggtgaaagaatagtacaattaacacctggatatccacttggattcaaccactaggaacattttgccatagttatgtctatgtttcactgaaccatttgaaggtacttgtaggaatcatggcaattcacccctaaatgctttagcattttattaaattgcattaacttttgaagagaccaggctgattgctttgtagaatgccctaccttctggatctttgtaagtagaatgctttgaaattaataattttgtggttattgataattgcagatgttgatagtattgataatgacaagttctagggttgaccattggggtgtggagctgaggtaggacaccaagaaggatggcactggaagcatcacctcctggcagggacggacatggcgggggctggggcaagtagtattggggcttgatttggccagaaatggaggtggggtgcagagaggactcaccccacctcatcctcatggggagtgctcagtggtggtctcggagaactgggctcagctggactgtcccagtgggagtgggagtggggagcacccaggagaggctttgttctcgaacaccatgagctgaagggcctgtgtgctcctcctctgctctgtaatggtcagaggagatggttcaggtaaccttgcctactgtgtcctaacttgaatgaatgtttgtcaaaaggggcgcgcgtgcgtgtgtgtgcacacgcgcagtgattcctagataacagcttgtttgctttggcctgttgtataaatgaaaacaatatgaataaacaaaacccacagcatt

SEQ ID NO: 13711 - DNA, 1169 bp, Homo sapiens
ttttttccccttcctgtccctggccagtcctcctgccatttacttgtcatctgcgctggtcccttgtagtgctggcactgtgccaggcaccctcctgttgcttcccacacgcgctgcctcccccagctctgttcagtgacacccagcacgtgtcatcctgcctccccacacagccccgccaccttacctgccctggccactctcccgtcaccccctcacctgccccagccactctcccatcaccctcccactgtccccggcagagtgagcctcatgagatggagctttgttcttagtataataagggcctgtgacagtgcctgataacagatattttgtaaatattaattgctcttgaattctgaacccatttagacttgtattttaccattttcatattaaatccatattcctgcatgataaaagtgcttaccagaaatttttcttttattggtcataatccgtctcacaaatgggaaacctgatattcatggaggttgtggatcttaccttgttttaagcattcaagtcagaaaactcggatgtgaaccttgatgtcacccaatccaaagtccacaccctctgtggtggggcccagatgtcctctccatcctcaccaggctgccgtgtggctgccgcagggattactgaggtgcaggggcatgggccgggccgcacctgctgcctcaccactgatgggcttcggtgccctgctccttcctcgactctaggtcagtcgctatcacttgcagctgcacgtgatctcgaattgcttctagacatttccagcatattcttcccttattttagtctttctaaaacaactcatttttctggaaatttatttcttctcatgaatttcagatagttttcagggcaggtagttttgactttggaatcttttattctttagctctagtcttccttcagttattcatgagttcctattgcatttcttctttttgggatctcccccctggatccctttcagttaatagctcaggtgaggtctttcctacctcttggcagttttctgctgtcagctcccatgtgctgtctgccttcctttctcctggcttctggaattagttttgctgatggtctgcggtgagactctgatcccctcctcccgccgctgaaaaccacgacattcgtcttaaatgtcgtct

SEQ ID NO: 13712 - DNA, 1031 bp, Homo sapiens
actcagacacaggtatgcagtgtttaagagcagctagaggactgctgggcactagtggctgaagagtgagtagtcttgaacagctggagctgcctgtttttattcagtacagacataatgctgaaagcctggagaaaacacaatctgcaggtaattaacattattgttcccccttcagggaaggggtcacgtgtgtgaatgatcaacggtcagctcctggtcaacataagtaaacaagcctgttgttagtattcgatttaaccttctgaggtcttactgactgggatgttagtatatatccaagatatttccaaggagaggacatctgtaccttttcaggtgctatgattaagcctgttaactgtgtattctttttgacagaggcatataaattcaaaagtattggctccgttggggctgccagtaagatgtcatccatataatggattatcttgcaattaggaaattcttttctactggggagcaaagccttatttacacgatactgacacatggtaggactgttcagcattccttggggaagtactttccagtgaaatcagggagctgggccttcattattgatagctggtattgtaaacgtaaatttttctctgtcctgttttgcaaggagaatagtatgaaagcagtcttttaagtcaataatgactcaaaactcgaggaatcactgcggggggaagggagcccctgtggaaggggccccataggttgcaaattagcattgatagcctgtaagtcatgcagaactctccatttaccagactttatgggaatgacaaaaaatgggtgaattccaagggctgtctgctggttctatatggctggcttttaattgttcctcaattaattcatgggtttgttgtaatttctctccctttaaaggtcaccgttctacccaaattggatcttgagacagccatgtcaggggtaggggaggacttacaacagtggccactattagaaagggctctgcatagtgacccccccattgggctaataaggtcccattc

SEQ ID NO: 13713 - DNA, 1063 bp, Homo sapiens
cccactccccttaaaatgtaagtaaatatcttcaggaatttttaaaattattttttccagaattatattttcaggattttggattttagggatttttgatctttcagaattttaagagctgggattgtgtctttcaagactgcttcttcagggactatgacgggcttccctctagacagcatgggctaggaagcatgttctggaatgtgacatttaagctgagaactgaattgtacaaaaaacctagccacgccaattaccctaagtgaattaatgcaaaaatagaaatccaaataccacatgttttcacttataagtgggaggcaagcattgggtgcacagggacataaagatgggaaaatagacactggggattccaaaaggcaggaggaagggagagggttgaaaacttacctattgggcactgtgttcactatctgggtgatgggatcagttgaagcccaaacctcactgtcatgcaataaatccttgtaacaaaccactcacgtagctcctgaatccaaaagaaaaaaaaaaccaaaaaacaatattaacttttacccgaaaaccacctagccacagaaaccagggggcagtggtggagaggaggccccaggaggattctaggtgaggtggctggacatgcagaagccctgctggggaaggaagaggttttgtgtttaggaagtgaaagcccaggtagctgagctgtggcgagccgggaagaatgaagggatgagacagcagagacacaggcttcggttctgggggtcctgctgctgccccacctcctcaatggtcctcctggcccctctctgctaagcaggaagcaatggcatctttttttttttttctttttttgagacggagtctggctctgtcgcccaggctggaatgcagtggcgcaatctcggctcactgcaagctccgcctcctgggttcacaccattctcctgcctcagcctcccgagtagctgggactacaggcgcccgccaccacgcccggctaattttttgtatttttagtagagacggggtttcaccgtgttggccaggatggtct

SEQ ID NO: 13714 - DNA, 1094 bp, Homo sapiens
aacaccatgtggaagctgccaaggcttgaggtttgcaccttctgaagccatgtcccaagttctacgttggcccctttcagccatggctggggcagctggaatgcagggcgccgagtccctaggctgcacacagcataggaaccatggacctggctcacgaaaccactttttcctcctaggcctccaggcttatgatgggagtggcagctgtgaagacctctgacatgtcctggagacattttccccattgtcttggggattaacattcggctcattgtcacttatgcaaatttctgcagctggcttgaatttctcctccgaaaatggcattttcttttctactgcatcatcaggctgcaaattttttgaacttttatgctctgcttctgttataaaactgaatgtctttaacagcacccaaagtcattcaggagaagattgtttaagcagacatgaactaaataaacagtaatacgtgggaaagcaagatctcatccatgagaggcagtaaaaggaatgaaacaaataagtaaagaaaagcaagcagaaccagattctttagagatttttaggtagcagaattatcaggtacacaaaataacagtggtttatactgaacatgatagtataacatgtttaaaggaataaaagatgatattgaatgtatgaataaagaaaaaaagactatttttaaagaccttagtagatttggaaaaggaacaaataagtcttagaaatcaaaatacaatactatattaaaaagtctcaggggttagggttaaaaaaggggacaatggagacacatgatcaaaggcagacttaatatactataaagtagatatgagaaaatactcctgacacaacatagaaagatgaagaattggaaaatatgaagaagtgcttcagaaacacaaattacagggttggtggctctagcctatatcaaatcatatagtttcaaagtgagagaataagacagttttcaaagaaataatggccaaaatttttccagaacaaatggaaaatgtgactcttaaaattcagggactgtaataagtcccagggatgataaataaaaagaaacccatacttaa

SEQ ID NO: 13715 - DNA, 1033 bp, Homo sapiens
agagaatgtagagtttatataaacacaaagtatgcattgaagatctgtttctaccaataaacattaaaacaaagactgtatgtgaactatgtttttctgttgttccactgtggtttattcaccctccactaatatttcatactagatgccaggcagtgttatgggatagagtatttcccagacgacagacaaaagtccctggcttcatggaaaagacatatttgctcttagaaactgaatatcaattgataaagtgaattattattcttactttcatatttgcttattaatatatgacaggattttcttgtggtgatactgtttgggcaaaatcacaagaacagtacttaggccagattctgtgagatttagaaatatctccacatttaattttcctttctgactggtgactatgttcaattcattaggttagatgcatgcccaggaatgttaaggagtgcatttacatggagtaaaaggttttcataaaagttgtgactttgtttggagtaaattatttatgtaggtcagtttgaggatctaagactgggaaggttgatttcaatcagatttgaaggcttttcatagcaaactaaggactttttatcttaccttatagagatgttagatgtctcttgattttagtggcatagggtaggatcatttttcatggcccaggaggatgggtctactacagcatatagaacacaatggaatggagagagatgggaagcaaagaaaccaataagagaactattgtgataaaagacatcattatttttattaccagttgtcatcacttatctaccctagaatggtggcaatgaaactgaaaggaaagagaagggtgtaaaaatgttggtttttaaaaaaagacgttgtttggtctctagttcagtatgaagaggtggaagagagaatcacctaggtggaggagggagaggtagcacaaattagttacaaggtatgccaatttaaacatcttgaacatagcttaattcatacatctcacttattttagtgttaaaatttg

SEQ ID NO: 13716 - DNA, 1029 bp, Homo sapiens
ccagatcctgaaacataaatgaggacttctggatcaacttttccagatcgtcaacatggtcaaaaatgagataatcactatggtattcaggcatgagcattgtgtggtaaacccaaatccagtctgacttaatggctttaggcaaagaagtaagtgccaattgtgttgtatttcctagaagctgtttttcattttatatgtaagcttctcactgcaagatttggcaaatacagtatttgggtaggggacaacatttaaaaattaagaaaaactgcaagttaaaaatacaaagccaaatgtggtccatgacttaacaccttgaatgttgtttatattgtttgaacagaaagccaggaatctcaggatgaatcagtctagatcgagatcagatggtggcagtgaagaaaccttacctcaagaccataatcatcatgaaaatgagagaagatggcagcaagagcgtctccacagagaagaggcctattatcagtttattaatgaactcaatgatgaagattatcggcttatgagagaccataatcttttaggcacccctggtaagagatgggtaaaagaggaaacacccttttttcatcatttagatggaaggatttcaagataaggagaattggtattctttttccttgcttctctttatgaaaatatagtatattgtttttgtgagtttaagaactttttagtataataaagtagaaaatcactggcttctgtattttataaggtgaaaataggggacatggagcactattatacaaatgccaaactaagaaacaggttaatgtacataatggtgttaagtatttacatatatggtcctatttgtaatttttatacaaataaaatatgacttaaaacccaatttgaactcatttggggtattataatttatttattcagctgaattaatagctccccccaaagcccaatgtgttccataaagtttttacaaatgaactaatggaaatttgtatgtttatatattgtgtgtttgtatattgatgacccata

SEQ ID NO: 13717 - DNA, 1045 bp, Homo sapiens
gaacctgggaggcggaggttgcagtgagccaagatcgcaccactgcactccagcctgggcgacagagctagacttcgtctcaaaaaaaaaaaaaaaaaaaaagatagaaaccaagcacaggtgggtagatatttgaaaataaaacagaattatccgtgagccttctattgtggttaaaagaaaaaaaatgtcagcttccttgaaaaagagtgtcacgttcagggcagatatttaaaataagaaggccattaattcattgattcattgaataaatatttattgggcacctaatttgtgctcagcattattgcaggcaataaggaagggaatgagacacctgccctcatggaactgacctactggggcaaatgatgaatttactaggtggcgtggtaggtatgaagggaatgaacaaggccacgtgctaggatggccatgctggggaggcctgctatagactgggtgaccagggaaggcctctctgaagaggcaacccttgggtgggacttgcagaatgagaaagcgtgagcgtgcaggagctaggcggggattgtcctgggcacaggggtgcaagtgcacaagccctgaagtgggaatgagttggaggtggagaagtcctgaagtgggaatgagttggaggtggagaagtcctgaagtgggaatgagttggaggtggagaagtcctgaagtgggaatgagttggaggtggagaagtcctgaagtgggaatgagttggaggtggagaatgaggcgggggctgcttcagtgggaatcccaaacacgagtcgctttacttctatgacttcaacatcgcgagttttttgttgaatgcaaaattgaatagtcattgggtttgttttttaagtgacttaaaaattattacatctgttttgtgtgcacctcacagaaaatttgatgaaaggagtgaaagaggaaatcaaacagctagccagttgttccaatgtcattcatcaaataaaacctctcccccactggtgtgaaatgctatctctgtcatgtactgaaatcccatatgatttgtaac

SEQ ID NO: 13718 - DNA, 1027 bp, Homo sapiens
aggctgcagtagcacaatcacagtggctcactacaatctcaaatttctggactcaagtgctcctcctgcctcaacctctcaagtacctgggattataggccaccacacctagctaatttttaaatattttgtagaggtggggctgtcactatgttacccaggctgctctcacctcctgggctcaagcaatcctcccacttcggcctcccaaagtgctgggattacaggtgtgagcctcctcacctggcctaatttttcttttgttgtctttacttttggtatatctaagaaagcatcaccaaatccaatgtcatgaaacttttgccctgtgttttcttctaagagtattattttagctcttacatttaggtctttgatccattttgagttaattttagtatgtgatgtaagggtcaacttcattcttttgcatgtagctacccagtgttcccagcaccacttactgaaaagactgtccttttcccactgaacgaggtgccaaaatcagttggccatgtatgctagggtttattttaggactctcttttgtcccatttgtctgtatatctgagcttagccagtaccacactgttttgattaatgtagctttgtagtaagttttgaagtaaggaagtatgagtcttccaactttgttctttttcaagatcgttttggctacttaaggcccctcagagtttcatgtgaaccttaggtttttctgtttatgcaaaaattgtcgatgggattttcaaagattaaattgacttaacaattttaagtctaatctatgaacactgatgtctttccatttatttaggtttttaagttctttgaccaaccttttgttgtttttatcatacaggtctttttaagtattttattattgatctattataaatgggattattttcttaatttcctcttaggattgttcattgtgtatagaaatgcaactgatgcttgttggttttgtgtcctgcaactttgctgaattattagctttattagtttttttttggtgtggaat

SEQ ID NO: 13719 - DNA, 1007 bp, Homo sapiens
caattttgaaagaagttctgtggataaaatgctgtcaaacagcatcacatgctacagagaaatctgtgaaaggaaaagccagttgatgtggcagacattcttgtcttattttgagaaattgcctcagcctggatcttgcagtgagccaagatcgcgccactgcactccagcctgggcgacagagcaagactccgtctcaaaaaaaaaaaaaaaaaaaaaattgcctcagccaccccgaccttcagcaaccaccatcctgatcagtcagcagtcatcatccttgaggcaagaccctccaccagcagaaagattatgattcactgaaggctcagatgatcattttttaagcaataaactatttttaaattaagatatggacttttttcagacataatgctgttacataatacactacagtatagtataagcataacctttatatgcactgggaaaccaaaaatgtgtatgacttgctttattgcggtcttcactttattgcggtcctcactttattgcggtggcctggaactgaacttgctgcgtgtccaagatatgcctgtatttctgtcactactctgtgggatccaatgattagtgacagtacgctgggagctaagctccttgccttctcatctttcctctctcaagtctctttactctccctttattccgtgtgtgcctgaccccacttctgggaccagtcctgttcttaccaggtattgaagaagatccatgcatggccaggtgactcagcatcacattgtcatggccacagtccatctctgagtatctgccctagatttaatgattgaatggcttcctgtttgtgagatgaaggccctaccttttgcttcattttcctaactagatccatatcttattcccctgtagccagttccagtaatggtaacttgtgtagtatcatgtcaaaatcatatcagcaatagggatttgctttgctgtagtcagcatctgcaaccacctgttggcacacacacccccatgca

SEQ ID NO: 13720 - DNA, 1049 bp, Homo sapiens
aaatccccttgcaattagtaggcagtctgtggggagacacaaatacctccctcctcatcaaaatctcacccaagatttagcatgcatttatgattttgcctgatctcatctttactgtgacagttgtgctgctagtttttaataacattggaaaatagggtccacaagcaagaaagctaagagtcctgtaaagtctccatagttttgccttttccagaatattgtgtagttgaaatcatatagtatgcagcctgtttggattagcttcttccacttagcaatatgcatttaaggttcttccatgtctttttaaggcttgataacttatttcctttatttttggctgagcaacatttccactgtaaggatgtgctgcagtttttaaagttcattcacttactgaaggacgtcttggttgcttccaagttttgccaattatgaataaagctgctataaacatttgtgtgcaggtttttgtgtggatgtgagtttttacttcctttgtgtaaatatcaaggagcaggatcactggattgtatggtaagagtatacttagtttgataagaaaccaacattctgtcttccacagtggctgtacgatttttccttcttaccagcagtgaatgagagttcttgtttctccacatccttgctgacatttggtgttgtcagttggattttggccattctaataagtgtgtagtgttatctcatgttaatttgcaaggccctaatgacatatgatgttgatcatctttttgtctgcttatttatcatctatatctctttagtgatgtgtccagatcttttgtccattttttaatcaggctgtttttctttgagtattgtcgaattttaagtgggttttttttttcgggtataattttggctactagttcataatcaggtgggtctttggcaaatattttctcccagtccgtgacttgtttttcattcttttaacactgtttttggcagagtggaagttttttttttttgagatggagtttcgctctcgttgcccaggctggagcgcagtggctcaccgc

SEQ ID NO: 13721 - DNA, 1049 bp, Homo sapiens
acaggggccacagctccaactattaaaggttggtgaacattgtgaattatgctcagaaataaaactgtggtcagagtagatgcagcagagctagtagagtggttaattccatgcagcaggctggagtgtggtggtgccatcacagctcactgcagccttcacctcctgggctcaggcaatcctgccttagcctcccgagtagctgggaccacaggcacacaccaccatgcctgtctaatttttaaaaaatttatttgtagagatgggatcttgctatattgctcaagtttgttttttttttttttttaaaaatggagaggaggaaaatacccacagattaacctagcagaaaattaaacagagtagttgctcttagtgctttaatgacaacctgttttctgttactttcagttgcagatatttttgtctcagaagaatattgtcacagataatggctcttatggcagcttactcttaattacctgtcactataatttgtataatacatagaatgaggatttcctctcagcttatctcctgtagatacaatgctattcctgatattattggaagtagagaggagaaatactagtgtagcttgaggacctttggatggggaaaggagcctttggaagctttcttttgctgtaaagtatcccacttacaggccagctgttagatagtcagcaaaattcttagataacaagttgttttaacctgataaattgccttttttccttttatattgtagctggttagtacttattttagtagagctgatagagagtgatttaaaccacaatttagtgtatctttcttacttgtaatatagtctgtgcatttttttgaatagcttttttttcattgttttattgtatggttctttattaattttctaatacaggtaggcctcaacacacaagtagcctggcctcagtaagtccatttgtgagggtactgtgaaatatgcttttcctgtcttctaaggttttaggttgtttgttttaaaaataacaaaaaaagaaatgtgctttcccttcagaatcttt

SEQ ID NO: 13722 - DNA, 1039 bp, Homo sapiens
tttaattttctgaatagttttagccatgaaaatcttagttcatgtaaagccttacttgaaaacccaacagataaatttggaactgggagttttgaaaatcactgaggattctgaccccttttattttgcaagtgaagattcttaaatccagaagggttaaacgatgatgatctacagctctttccaccttactcctcttggcctgctgtcctcagacttctgaattggattatggttctgctttgttgttaggccgtgtgggggagtacagtgatgatacctctgggggccgcttcatggaattggctcttgtctgccaaactaaggagagtatctatttttttgtattatagctgtcttgttttgtcttctgatttttctcttgtcatttcttagcttttgcacggagcagaaaagatgtattactgtgactagtttattttctttttgtttgaagggaagggtaagaagaggaccaacatttattggacacctgcttgtgtgccaggcgccaccagctgccttagaaaagttaaaattctgttatagtcaccctataaagtagttgctaacatttttctttaacagttgggaaactgaggcagagagagacaatacctgacccatagttgaaactactgtgaggacaagggagtgggagaagagcttactaagcaggcatgaaagtatgtggtacatatggtgacaggtggacatgtggggtggttagaatacaaggcgagtggcatgtgattcggctaacagtagagagataaccttcacctgttaccttgttcttagtgtgtcttaaaggccagaaatgccttcctaaggtgtatggactggtattttattgttctagatgggtaagtatttgaggttgtattttggttgatggcaccttttcttctgttttggtcgggggaaaggattatactcatttgaataagccagtatcagtttgaatttttacaacaggtggtaaaaacctgggtttgttggttattttcaacatatgtcagggacttctgtgacaaag

SEQ ID NO: 13723 - DNA, 1041 bp, Homo sapiens
gacgtttctgaagttcagtaatactctaattttagtgtgtcattttggttggagaatcattgtcagctgacttggacataattgtcaactctaatctcttgttagagcaaatgaatattttgcaatttgaaaaactggaattttaagttaaaatctttgaatttattatatctaaaattgctttatatatgaagaaagaatagcattaatcaaatttctgctctgtttaggatttgaagtgctgacttacagagaagacttcagttttgttacttataaaattaggatagtatcttctaaggttattttgagggtacatgatgtatataaagttcctagtagagtccttggcctaacctaggcacttaataaatggtacctagactattacactattgttattgtgccctatagtgtctgtaggcatagaagcatgaaaaaatacttctttgcttaatattccttattgatgtagatttaagatttcatattctaaaagttttgactgtgtgttttcataactgtgctgaattgaaaatgaaaatttcacataaatgtaaacttcaatgagttttcagacaaactacacgtgtactatgcaactagctccaatattaagaaatagaacgtcatcagtacttctgaaaccactgtttcgctccctccagtcactacacaacatctttgctttcaggggacattgcatgagttttatgtctttttgtttattctgccctactcaaaacacgtagggaaaaaaaactattttggggattagaattgcattagatgagaaacttgaaatgagctttgtcaatagctttttatgttgcatagtgtaatttttaatgtaagtacaatagaaatgtattttgcaggtagggagtgcagttttaatttttattttactctgttagagggtaattagtagaacctttttgagaaacaagtatgttagaacatcttttttactatcacttgtttattgtctgtgaacaacaaaggcagaaactctgtttccctttctgtaaggataagtca

SEQ ID NO: 13724 - DNA, 1106 bp, Homo sapiens
aagttaacaagagggaattttcttgtctttttcctaatcttagaggaaaagcatccagtgttttcgctattaagtaagatattagctgtgagttttttatagatgcgttttgtcagattgaggagctcttttcctcttttattttattaattccgtaaatcaatcttttcttttgttaagacagggtattgctctgttgcccaggctgaagtgcagtgctgtgatcttgtcttaccacacccctgccttctgggtgaaagtgattcttccatttcagtcccctgagtaggtgggactacaggcgtgtgccaccacgcctggctaatgttttgtatttttggtggagatgggttctcaccatgttgcccaggctggtcttgaactcctgagctcaaatgatccgcccctcagtgtcccaaagcattgggattacagacatgagccattgtatctggcccataaatacaatttttattgtattcagagaggaattcttttctatgtttttatcatgacaaggtgttggatttttgtcacctgatttttgtgtgtgtgtgtgtgtgtattaagatgattctgtgattctggttttttaattcaattgatatgctattttatgttagcccatttcaacctacctcttttgtgctgttattattatttatattatatatatatatataattttttttttttgagtctctgtcaccctggctggagtgcagtggtgtgatctgggctcactgcaacctccgcctcccgggttcaagcaattctcctgcctcagcctcctgagtagctgggattacaggcgcctgccaccacacctggctagtttttgtatctttagtagagacggggtttcgctatgttggtcaggctggtctcgaactcctgacctcgtgatctgcccgcctcggcctcccaaagtgctggcattacaggcgtgagtcaccatgcctggcctataatatatatatatagttttatacagttgctttttaaatcaattaagagaagaaagaaaaaatacacatttatagtgtcctttataattaacaattgctgttacaggtactcttgtatgttttttcatgtggacttta

SEQ ID NO: 13725 - DNA, 1047 bp, Homo sapiens
ttctttttctcctccttctttcctttccctcccccttccagccctaggcaaccactgatttactttatgtgtttatataattatctgctttggactttggtatgtggaatcatagagtatatggtctttgggactggctgcttttactttgcgtgttttcaaggttcatttatgttgtaacatgtatcagtactgcattgcttttaatggacaaatattgttccattgtgtggatatactacattttgtttatttgttcgttgatggacatttgggccatttctaccttatgggtattatgaataatactattgtaaacattgggggtgcaagctttttatggacatatgttttgttttctcatgtgtctgtactttggagtggaattgtggtttaatcttttgaggatctaccagactgttttccagagatggaccattttatgttcctgccaacagtgtatggctgttcccatttctctgcatccccattggtacttgttatctgactttctgactgtagccattccattttgggtgtgaggtggtatctcatttcattgtggttttgatttgcatttctctgatgagtaatgatgttgagcacctctttaggtacttattggccatttgtgtatcttctgtggaaaaatatctattcgcattctttggctgttctttgagttgtcttttaattgttgtgagttttttgttgttttgtttttgttttttcaagacaggatcttgctgtgttactcaggctggagtgtagtgacatgatcatcccttgcaactcctggtctcaagtcatcctcccacctcagcctctggagtagctaggagtacaggtgcatgcctctatgcctggctaattttttactttttgtagagatgggttcttgctgtgttttgcccaggctggtcttgaactcctggccctcgggatcctcttgcctagtcctccgaaagcactgggattacaggcattagccaccctgcctggccctggtgtaagagttctttgtatattctggatacaagtttcttg

SEQ ID NO: 13726 - DNA, 1056 bp, Homo sapiens
ctctgtcgcccaggctggagtgcagtggtgtgatttcggctcactgcaacctccacctcccaggttcaagcaattcttcctgccttagcctcctgagtacctgggattacaggtgcctgccaccatgcccagctaatttttgtattttgtttagtagagatggggtttcaccatgttggccaggctggtctcaaacttctgacctcaggtgatccgcctgtcttggcttcccaaagtgctgggattacaggcgtgagccactgcccccccagcctctttctttcttaatactcataaatatccaatcattgttgaaattacctgattgtctcaaatgattatagttggatccataatgatcatcgttgcgtttcgtcactatatctcttaaatgtggatccctgtttcttttttattatagtttatcttttgaggaaatcagattgtcacatagcttttttcattttctgtactttgctgattgcatcccctttgtgatgtttaacatgttcttccatcctttgtgttttctgtaatctggtagattaagaggcctgaaccagattccttgattttttttttttttttccttgcaggagttgaggtacaagtggtggtggaaaaacttaggtgatgtgtacttctggtttgcagtggaatgtcgtgtctctttataatgatgaggctggcattgtcagaatgactcttctgttacggagctgctggcagctttttacctcatggtttttagcaactgttgataatcattgcctagatccagtgtttcattagggcttcagaatacagttttaactgcttctataggttttttttaagaaatatttttaaaaacattgaaagagaatgtacatctatgttatatttgaagctacatagaaataaactttttacattttcagaatattttcatagttgtattccgaaagtcatacatttaggcaggctaaagtttacaaattaagttgaaccttttccgcatctagacttaattttgtgatattacaagtgaatgagcacatgaagttctaacagatt

SEQ ID NO: 13727 - DNA, 1032 bp, Homo sapiens
tttgtagggataaagagtgctttttctaaagtattttgaggaaggattcatggagacctacattatatcgtgctgcatgtaggttctgagaacatgaagacgactgtgataaactctggtcttatggaacttcccattcagtgtgtcttgagtgggttatagttgtgctgaggaagtagtcctcttgacccctgggaagcctggaggtatctgggttgataggagacccttagccagtccctttctggtgagagcagacatacctgtcttacctgtagcttcttttcttttttttttttctttttttttttttttttaagacaggtcttgctctattgctcaggctgtctcctacatttaaaccatcctcctgccttggcctcccaaggtgctgggatgacaggtgtgagccactgcacctggctatgtctgtattcttgtgggctttacatatactattttctctgtgtgtcctgatgagaagattgaaaaccagctctacttacagtattgtagaagaggatggacgtataaaacaaatgcatgcaatgagatgtttttcttattggtataagtaatggtaattatatgtgaaagagaaggtggttttgggagagagaagagggcttcaggaaaaagcttcttagaagagagttgaactttgcaaaatgaatggcctttattatgtggacatggagggatgggataccagatgtaaatagataatgtgttactcttaggctctgtaggtggtttggcgtgaaagcgggtcttgtgaacagtaaggctggagagtaggaagggggcatatttaaagaagtaccaggagtttaccaagtattgattcacattaaaatgattattaaagtgtgtgtttagcctgaggaaatgtaagtccagaggacagtcatgaggatataagaaacaatggagttggtaaaaatatgctggtaaattgaattacattgatttttcaaaatttgcttgtattttttttaagaagagaaaatgacaacaaaacaagatggatgg

SEQ ID NO: 13728 - DNA, 1071 bp, Homo sapiens
ttgctcttacatagctccatccctcctttatgttgctattgctgcaaactacatcttcatgcatcgtgtgctgattaacatatatttataactattgtttatgcacttgtcttttaaatcatataaaaaacaaggagttataaagcaaaaatatagtaatactgttttttgtagttataatacctttacctatgtagttgtaatacctttactgaagttctttcttcacatggccgcaagttactgtatattgcctttcatgtcagcctgaaggactccttttagcatttcctgtagggctggtctactagtgacaaatttctccagtttttgttaatctgggagtgtcttaatttctacttcattactgaatatagttttgccagataaaattttttggccaggcttgctggctcatgcttgtaatcccagcactttgggaggctgaggggggaggattgttttgagctcaggagttcaagaccaacctgggcaacatgacaaaatcccaactctacaaaaaatacaaaaattagcccggcattggtggcttgtgcctgtagtccctgctactcacgaggctgaggctggagagtcacttgagccttggaagcggaggttgcagtgagttgaaatcatgccactgcactccagtctatactcccctgtctcaaaagaaagaatttttttttttggttgacattttttctctttcagtactttaaatgtgtcatccactaactgtggctttcatagtttctaatgaggaatcaattgttaattttatttagaatttcttgtaaataatgagttgcctctctcttgctgctttcaagatgctctctttggcttttgacagcttggttataatgcgtctctgtctggttctctatacttgaaatttgttgagcttcttgggtgtgaagagtcatgtctttcattacatttgagaagttttggccattaattcttcaaatattgtctctgcccctttctctttctcctcctcttttaaaactctctctctttttttttttttgtttttgtttttgatacaaagtgtcactctgt

SEQ ID NO: 13729 - DNA, 1032 bp, Homo sapiens
tcaacaataataaatgaagacttcaatactctgctttctctctctctctctttttttttttttttttttttttgagtcagagtctcactctgtcacccaggctggagttcagtggcatgatctcggctccctgcaacttctgcctcccaggttcaagagagtctactgcctcaacctccagagtagctgggattacaggtgggcaccaccatgctcggataatttttgtattttgaatagagatggtgcttcaccatgttggctaggctgatcttgaactcctgacctcaggtgatccacttgccccggcctcccaaagtgctaggattataggcgtgagccaccgtgtaggccattccactctctataatagataaaacccagacaaaaaattaagaatgtagaacacttgaactgtattatcaaataactggcccaactaacgcctatagaacattttaacaatagcagactagacatcttcttaagtgcatatggtacattctccaggatagaccatatacttggccataaaacaagtctcaaaaaatttaaaagacttaaaaccatacaaagtattttatcaggccacaaacaaacataagaaatattttggaaaatacaaatatatgagaattaaatgatgcactgtgttaccaattgattaaaaaagaagaaataatagaaattagaaaattatttgagatgaatgaaaattaaatacaagagcctggtatggtgactcatacctgtaatcccagcactttgggaagctgagacagtaggaccacttgagcccaagagttcaaggccaacctagaaacatagaccccatctaaaaaaaaattagtctagcatggtagcacatgcccattgtcctagctacttgggaggctgaggtgggcagttcacttgagcctgaaagggcaagattgcagtgagccatggtcatgccactgcactccagcctgggcaacagagtgataactgtctcaagaaagaaaagggaaaaaaaggtatcgaaatttctgg

SEQ ID NO: 13730 - DNA, 1041 bp, Homo sapiens
gatctccgcaaagcactggactctgttggccagctcttcctccatgaaacactacccttcctcaccactccacagtctgatttgctgattttccctcctctccctgtcctataaagactacatttccctgggtcttggagctaggcccctgctcttctctttctgtactgccttcctggttaattccatttactcctataattttaaatttcatctctgtgttgcttactaccagattgatttatgtgattccagcctttcctcaagattgctattcaacttgatatctattcttggatactctttagcatctcaacatgtccaaatcttttatttttcttttctttttttttaactgctccttgtggagcagggctatcccataggcagcgtgcctagagtagccaaaattaattgtatgtgggtactctactgtttaacatccccactacagttccccagttaatttgcttaccttctgtcaacttaaaaaaaaaatcaagcttttacataattagttttatttagaagtctcactgaggactatagaccaacgtttatacccttggtataaccttatgggatgtgttgtaagtttttatgggatgtttttaagttttagatatactttttttttttttcttttggagacagggtcttgctctcttgcccaggctggagtgcaggaacatgatcatggctcactgcagcctcaacctcctgggctcaagccatcctcctgcctcagccactgatgtagctggcatcacaggcatgcaccaccacacctggctaatttgtaaaaattcttttgtagatatggagtctccttttgttgcccaggctggccttgaactcctgagctcaggcaatcctcccacattggcatcccaaagagctgggattgcaggcgtgaacccctatgcctagctcataaaactttttattttctgccagatgcagtggctcacacctgtaatcccagcagtttgggaggccggggcaggcagagtgcttgagcacaggagttcgagaccagtc

SEQ ID NO: 13731 - DNA, 1046 bp, Homo sapiens
ggaggtagaggttagagtaagccaagattgtgccactgcactccagcctgcacaacaagaggtagaatccatctcaaaataaacaaataaacaaataaagattttgggaaatttgaaaaattaacaaactccaggaggaaggcagaaagccactcaactacccgatgattttgcctcattttctctcttcaaggagagaatagactcaaacaggcaaggacggaaggaacacggcagggcggagcaggagagagtgcgcatcccctgttcttgccaggtgtgtcccatcacactcagtcagggcagtcagaatcccggaagtgaaggggcatgggggatgcactgggacctggaagaggtggttgctgaccagttttctgcactccctgcactgtcatttagcatccctgccacttaactatgtcaaagcttaggagggatgacaagcaaatagggggtcatcaggagaccaggccgggcaaactcacctcagtccttttctgaaggggaagtcagcaggacctgtagacaaaataaatccaagaatcgtagaaaatggcaccttagactcatgcacagatgggaacccagggctcactgaaatgaggcaaagtgctctggtcacagctggcgagtggcagaacttgaacttgaacttcagttccttactgctttagtccaggggcaagaagagagttgtcatttgatgtgtgctttacatgctaggcactttgtccattttctcaaccaatccccacagcagaggcaccattatccccatattccagataagagaattgagactcaaagaggatagaaaatttgccccatgtccaccgatagaaagtggggagatgggtgacaaatgccatctcttcctactgtatcatgccctcccatttttaaacctaagcatgttcaatgtcttttaggatttctttgtgagaaagatggagaaaggtgaacttgatgatgctgtataaaaggacacacactgtctgcgagtcaggaatacagatgttctctctacagactgctctcttccg

SEQ ID NO: 13732 - DNA, 1026 bp, Homo sapiens
aggcctggctaatttttatattttcagtagagacagttttgccatgtgggccaggctggtctcgaactgctggcctcaggtgatccacctgcctcagcctcccaaggcactgggattacagaggtgagctaccaggcctggcctctttttcttttctaatatggttactaggaaaaaaaaaatttgtaactgaaagaaagaaagttgtctcctagttttctggtaagttaagttcaaaccaaggcctctgtggtcagactcctaattggattgtccagatggctccatggtgccatttaccctcccttgctccagcagcctcctcagagcacacacttacagtatttcctccaactgtaaagctttttcttctctgctggttcacgttgttcccatatctggagtgagggcttaagtgacgctccatgtgtctcactctcaactccactccccactttccttcctaatggtgaatctccgtaggcctttgtgtatgcatttcttctggcctcgatctcttgctacctagttagagttttaagtaccatctttaaccttgcaactttgagcaccactgacacctaagtctacagctcccacagtccacagcctgagacagacacccagatctcagcacctccaaaactgaaatctgtgctttcccaagcatttgcctacttcctatctcttcatctttcaatccaaactcttaagccttgagagtaacttctgaaccccaactctaatcatatccttgccctgtttaaaaatcttcatttggctgggcgcagtggctaacgcctgtaatcccagcactttgggaggccgaggcaggcagatcacgaggtcaggagatcaagaccatcctggctaacacactactaaaaatacaaaaaaattagccgggtgtggtggcgggcgcctgtagtcccagctaactcgggaggctgaggcaggagaatgttgtgaatccgggaggtggagcttgcagtgagctgagatagcaccactgcactccagcctggg

SEQ ID NO: 13733 - DNA, 1466 bp, Homo sapiens
cactgcaagctccgcctcctgggttcacgccattctcccacctcagcctcccgagtagctgggactacaggcgtgtgccaccatgcccagctaattttttgtacttttagtagagacggggtttcaccgtgttagccaggatggtctcgatctcctgaccttgtgatctgcccgcctcagcctcccaaagtgctgggattacaggtgtgagctgccgcacccggccgttcccattttttattggtgccaacatttcaaaacttcatactgtttataaactgattttctggtttatttctactgtaatctctcaatattcatagaagatgaagaaataagtctgacaacactaaagaaatttcttaatatactattattagaatagtagaggataaaagataatgttatccagttacaaaggaatttggatgataattataacttaatgttagagatggtaaagctgcacttacttgaacagcccaaaagcattaaaaatctatttccagaggaatgttttgctatgtagggaaattttgaagtagtttttgctaaaaaattatttctagagttgtgttattcttagcagtaatcttggctagaaatgtttttgtgatttatgcgattaaacgaaatgataaagataaaaccatattattaaatacctatatatcacagctaagtaggagaaagggagacctttttattttgttcaggtaggagtatttcttgtgtattttagaaacaattatttttcccattatttcttatgagattagttgtttcaagtaggagacagaaaagttctgttttgttggaaatgtaggttttagatgtatctttcagtcagctctcagtcactagactatttcatattttttgaaatgtttttgaaaattatgactagcccattttttgtcctttattcaacatacttatcctctgaacacataaataagtgaataagataaaaatatctttaccttattaatattatacatacttgaaaaaaatttcatttagaaacctagttcagaatctgagcaaatttacaagtgacctctgtaataaatggtattgataatcagagaatgtatttcagaatactacagtacaatatattatgaagcatgaccactttattttgaaacttagcaattgtattgctggggtttattgtatctgtagcatgtcactgattatttcagttagttttataatgatttttaaaaaacatatctatttggaataagatacagcaacaatcattgctactgacttgttcaaccccttagttacactgtatgatcaacatataacaagatacagtggaatggcccatacagtatattactgttgtgtgatgattggctttggaagcagtttgattttgaaatgctttgatattctaattgacatggaacaagttttttccctgctccccaaatagaattttgtaaccaact

SEQ ID NO: 13734 - DNA, 1055 bp, Homo sapiens
tgttttctgtgtattgggtttcttctcaatattataaaaattacaaagaaataataaatgccatttattattataccttatctcatcagagttgggggaactaacttttgttgcttagtttataaacaacaagatttgcaggtgaaaactcagtggctcagctcatttttcttgtttcttcatctgaacaggtgatgtgttgctaaatatcaacggcattgatttgaccaatttaagtcacagtgaggcagttgcaatgctgaaagccagtgccgcgtcccctgctgttgcccttaaagcacttgaggtccagattgttgaggaggcgactcagaacgcggaggagcagccgagtactttcagcgaaaatgagtatgatgccagttggtccccatcatgggtcatgtggcttgggcttcccaggtactgagcgctttcttgttgctttatggaaatcataatcatgcttgcagcccttatcagtgtgtagcatgataaatttactcgttgggataaaaaaaaaagctttaattcagtaaaatagcaacatcaaatcaaattacaaaagaaaaggataatttttcttaggatattacactttaaaaggtacacaaagaaagcagttgtgtccattcctgtcaaggctcctcagtgggctagccatgagattggataacccagcctcttgcttagaaaagttgtcgtttaccagcactcattccgctatgtgctgagacttcatgcatttttcatcagaaaacccaggccaatcttggggcttccccccatcccagaagcctttcttaacacctttttaaatttattttaactctcgctaaaaagggtggcatttaaaactcaatttttattggatacaagagtctattaagccaaaccattagtgttcaagaatggctgcttcacttttattttttataaatgtgaccagccaagatatgctgtggttggtcagtgtcggggtcacagaagcacatggaacctccagtggcatcccagggtacattcctttccgcggttgttgtttgacatttgag

SEQ ID NO: 13735 - DNA, 1025 bp, Homo sapiens
tatggcaaggttcagaattacttttcctcttaaaaattacagtttaatgccattataaaaagtttacaatagaaaacctttaaagaagcctctttccttgctgagaacttttcttgttcatgagatggttatgaaaccttaagttcaagtttgttcagcctgtgccacatgcagcccaggaaggcttttgggattattttttttttaagcttatcagctatcattgatgttagtgtattttatgtgtggaccaagacaattattcttcttcccgtgtggcccagggaagccaaaagattggacaaccctgctttagatgatggtccaggaaaaactaaatagaaaaaaaagggatcaggataggctgaggcatgattgcacttttaaattcacactttaacttggagggaagtttgtgtttagcacattcttatcagtattgttttttcatgtatggtgtgaaaaagcagatatatgtatttgcaaatcatgtgtattctagtatccagaatatataaagaactcttagaaatgaaaagataaatccaattttaaatgggcaaaggatttgaatagatagttctccaaagatactcaagtggccagtaagcacatgacatgctcaacatcattagttcatttttatattggattatttgtctttttgctaagttgtaagaattttctatgtattctggatactagacccttaccagatatatgatttgcatatattttctcccattctgtcagttgtcttttcactttcctacatcctttaaagaacaaatatctaatttttatgaagttcattgttgtttgcttatgcttttggtgtcatatctaagaaaacattgcccaattcaaggtcacaaaaatttacatgtacgttttcttctaagagttttctagttttctctcttataattcagtttttgatccatttggaattaattgcaatgagaaatcataatgtgtattgttcaatcctttaaattttattgaggcctttcttttcttttttt

SEQ ID NO: 13736 - DNA, 1029 bp, Homo sapiens
tactgcatgccagccattgatggcgggggttgcttcttgcccagttttctcatttggaaactgatccatgcctttatcccactagttaccctgaagtaatttgaacttagggagcatttctgcctggagacctgtaagaataggtgttacgtaggcacttagtcttcagattggtttgggatttcgtacattgtaggcacgtagcacgcaggccacttaaaaataaatgtatgtgtctttgggctgttgtattacgagctttgcatatgggcttgtctggccgaaggacccagtgtccgaggtggaggtagtagtcagggacatgtattattcatttcagaacacttggcaccttttcttgcttacattgggcactaaaatatttactgaattgacttgaacagaaaaatgaaggattttttataccagattaagaaatttggactttatccagtcagtgatactgagctgctaattttaagcaggagaatgtcatgataacgggtaagcattccagaaagatatctgcagcgtctggaggatggtgggcttccagatgggcgatatggagactaagttggaggctgttctaatggaggggttaagtgctcagggattctctattcagattacctggggtggaatcaggctctgtcatacactgaaacctctttgttccttaggtttgtcatctcagagtttgggggatagaacttgaaaaaacatgtctattacttagaatagtgattgccagatagtaaggacttagtaaatgctagtgtgctggcagtggaaggagaaatgacgtggtgtttaagaggtatgactaggaggctggactaggtaagtgactgggtaggcttaaggagggaaggatgaatcctgggttgtttgacttcaggcattgattgacatgtactgggtaagctggctgtgaaattaaaacgggtcaaattctaattctattacttacccttagaataactatcctgacagaactttgatttcctaacatttgggaaatgattg

SEQ ID NO: 13737 - DNA, 1057 bp, Homo sapiens
ggagggagggtagggggagagttgggattctctcactcactctctcgttctcttttcttaaaggggccgcgcgggacgacggggtgagcgcgcgggcccagacggggacttcgagggcgcgggcaggggaagagggagcggcagcggcaagcgggtggggaaggcggaggggccggtttatttttaaattctgcctccactcgctctctcgcgctctggttcctccgagttgtttattccattttcctcttcctgagacggccgtcgccgctgcgcgtgcgcgctgagacgcgagggcttatgggtagcgggagcgctaggggaagcctggccggcgtcgggcccccgggggcatccgcgagctatcggcggttggaccggcggctctcggtggggttccggacgcggatctggcgccgaattctcacgagacctgataccttccttatttgtatattctcttacttaaaaagccagatgtcttttttttttttttcattgaaaagagaaaattgacaaggtaaacggtcgtttggaggggccacctggggacgcggcccgagccctggctctacctgaagaatatcttctatttgccacacttcctctccccgtttcctttcttcgcccctctcctctttccccttcccctcgaaggtaatgagaactactggaccgattacgctaacctcttggccctttgtcaaaaaatggagccaaaaaggttgatttagacagaccccctgctcagtgcagcacctgttattctctgtatttatattaccaagggccttcggtaaattatgaaaaataggatgccacctgggacaacactgcttagacagcactggaagacctttataaatatactaggttgcttttctccaatcagcctagccttgatttgaaattcatttttattttttttgagacggtgaaattcatttttaaaagatagttttaacctcagcgatctctgatgtttgcgctaatacccttttaaaggctttcagaaattttaaagaattgctatgaaaggaaaagtaacattctagtt

SEQ ID NO: 13738 - DNA, 1064 bp, Homo sapiens
aatgataaactgtagaaatcaaaatttattgagaaatctgtttctcctaacagatagtaaccctgccatgatatactacttcaacaatgttataaaatttatgtgataatatacattttaacctgggatttctaaattgctttaacaaatgctaatcctgagagttgccctgcaggactcaaaagggaaaggttttgggacgtggcagaaccctgcagggacatggaattaaggccattgcaatgtatcatctttgtagcattgtcatcactcctaagctgccttcacagttttagtacactaagatgaggaaatcgaaaatgggcagagaaagctcatactgtataattgaagacagtgacagagaacgtgtcagttatgccaaaactcttttgatttctgttccaggatttccaacaagaggggaaaggaatgacttgggagggtgggaaagacattaggagttgtttttattttttaccttggaagctttagctaccaatccagtaccctcctaactagaatgtatacacatcagcaggactgactgactacttcattagagatatactgtactcattgggggccttgggggtactgctgttcttatgtgggattttaatgttgtaatgtattgcatcttaatgtattgaattcattttgttgtactatattggttggcattttattaaaataaattgtattgtatcatatttgtatgttttaagagaaaataatataaaatacaatatttgtactattatatagtgcaaaaactacaaatctgtgcctctgcctcttgaattaattctttggttgcttgcatttgggaagggaatggagaaaggaaagaaccaataaagctttcaaagttcaagaaattctcctgtttggtctgctgccttacaacttaggttactgacagttgagtaacacaaacacgcccccacaaatacatcaatcaaaactcacacaaaattatattagcctatcactacagcactatatatttatataaaaatcattacaagactatacacaaaatcatgtttttgatttatagc

SEQ ID NO: 13739 - DNA, 1057 bp, Homo sapiens
aaacaacaacttgggatgatcctttccttccattttgatgccaacctctttttatttttaagtgttgaagctgcacaaactgaataatttaaacaaatgctggtttctgccaaagatggacacgaataagttaattttccagctcagaatgagtacagttgaatttgagactctgtcggacttctgcctggttttatttgggactatttcatctgctcttgatttgtaaatagcacctggatagcaagttataatgcttatttatttgaaaatgctttttttttttttacgttaagcacatttatcttgaactggagcttctaaaatgggccccaggggtgcaagatgttggtgtaattcagagatagtaaaggtttatcgcagtgtgaattataagagtccatccaaatcaacgtcccctccctcctctcatgcgatccaggtaattatgcagttagtgccacagtagactagcctagcaaagggtttgctccttgctgtctctgactgcaccacacagctattgatggcagctgaaagaaagtggatcatgccttaattttaaatattcctgtcctctggttattattttaaggaacttcatcatgttaaaatgacagcattcaaaggtgtaccacaatcaatttatcaaggaaataaaggctattgtaaccagagatttaatgcattcttctaaatgtaaatttaaaatttgccctttaaaaaagtccactttccccatatgcaaatgttaataggatttttatggggattaagaagcggcaaaactacagaagcagaattcaaagtaatttaaaaaatacacaccagttttaaatcaagagaagttgtaatctcttgttttaagcttgcgtttgagggaaaatgactttttcaccaatttaatatgcattgttctgttgtttttatttatgattgatcattatatgtgacttgcataaactatttaaaaaaaaaaactataatgaccaaaatagccatggctgagaaacacagtggctgggcagttcaataggaggtgacaatatgacaactt

SEQ ID NO: 13740 - DNA, 1021 bp, Homo sapiens
tggaaaggaaatcagaagtcaactcaatgaaaaggtagcacagctgtatgcagatttggatggaggtttcagccatgcagcctggctcttaccaggttggctgcctttgcctagtttcagatgcagggacagagctcattgggaaatcaaggatattttctataaggcaatccagaaacgcagacagtctcaagaaaaaattgatgacattctccaaactttactagatgctacatacaaggatgggcgtcctttgactgatgatgaagtagcagggatgcttattggattactcttggcagggcagcattcatcctcaactactagtgcttggatggacttctttttggccagagacaaaacacttcaagaaaaatgttatttagaacagaaaacagtctgtggagagaatctgcctcctttaacttatgaccaactcaaggatctaaatttacttgatcgctgtataaaagaaacattaagacttagacctcctataatgatcatgatgagaatggccagaactcctcagactgtggtagggtataccattcctccaggacatcaggtgtgtgtttctcccactgtcaatcaaagacctaaagactcatgggtagaacgcctggactttaatcctgattgctacttacaggataacccagcatcaggggaaaagtttgcctatgtgccatttggagctgggtgtcatcgttgaattggggaaaattttgcctatgttcaaattaagacaatttggtccactatgcttcgtttatatgaatttgatctcattgatggatattttcccatcgtgaattatacaactatgattcacacccctgaaaacccacttatccattacaaacgaagatcaaaatgaaaaaggttgcaaggaaccaatatatgtgatcatcactgtaagccacaaaggcattcgaagagaatgaagtgtacaaaacaactcttgtagtgtactgttttttttgagtgtgtaattctaaaagccagtttatgatttagt

SEQ ID NO: 13741 - DNA, 1084 bp, Homo sapiens
gcattgtgaactggctggtgtttgcagtcccacgtggcatggcctccagcccaacccacagtggagactggagacagggcaatgagtctggtggggggcacgtggacatgccccataggggccccacccagacttaacaggcaaggtcctgggcattgcgcgacgcaggactcaatgctaaagcaagcctgcctggctctgtgccagggcccctcttctgattcacacatcccatttttacacagacccttccttcttaataaaggctgacagttctgttggcagccaagaacccacaccatgaagacagggagtgaggggcctttgtgcccaactccagcacagctgcgttctggggtgtgtgagaggcatgttcgtgtctgtgcgctggtggtctcgtgagacagttccgaggacggggaaattgcagggtggtgggggcgtgaggcttatatgtggaactgatgcagagttcgcctgcagacggatctggatatacactatgtataattgttacgtgtaatttaaaatatatctgtttgccatcgtcatgagaagattatatgtaaggctctgaagggagagggagatgtacattctgccaggctcctggggaccttatccgagtcatgaaattgattactgttgatccagtggtgcaagaagctacactccatgtgtcatcacgcttatgactcctaatgtatttttaaggcaaaaaatgtcagccgactccatcttcacccctcgattcctcgagtccagcctttctgtgccagtgcttcactgagccacaacgctctcgccatcgggacccggctgggcctggagtctcggggcacagttgccatggagccctcctgggtcattctacaaatgtgctgagtgccagctgaaaaccccacaggagatggagtaccttggccaagcttaaagagaagattttctcagggtatttattagtgtgtccagcagggtcaggaagcaggatggaaagatgcactcagactgttaatttattaacaaggcaaatgattttgtgtttcttgatgacagactattaagtttgggacttattttccca

SEQ ID NO: 13742 - DNA, 1024 bp, Homo sapiens
taacatattttgataaatactaacttattttgttggggttttggttgtctcttgtcttaggacctggtagttatttgcttgatttttttttccgttattttctacataggcaaagagaattcgagggatagacagtctccaagaaaagtgaagtggtgggagagaattgcttttttcttttttttcttttctctagtttttctttctggctgagatttccgtgcaagacagcacccaatagactatttagagttgacatttgacattttaatgggcgccatggctcattttgtagattgagaaggtgcgtctcccctgctccaagtctcatcatgacagcgtgctgacagctgggagtctgtggccttcctcacgcagaggccttaaagctggacacagaagcacgcctaggctgggcagggatgggacccatgccccctccttagaggacgggcttcctggttaggaaaggacacgtgggggtgccttgcataatagttcactggtcaccgtgcttttatgagtagtgtttttgtgcacttgccaggggttttctctctgtgtgagaggggagtgatttaagcaatggtgtctggagtaagccttacaattttaatagactttttcttatcatatccctcatttctttccctgaaataaaaatacacacaagcaaaaaaaaaatgatagtttcacatctcttagttcccttgcccaaacaagaatattcttagttccactggccaggattttcctacatagtcagaacttacacattactagaggcacacccaccaaggagtattgtgtctacttttatctgtgcaccagccacaaatacccacattggaaagacccatttgtgatgggtaaacatcccttcctgtctcccacaacccctgtgactgccctgcatgtgttcatgacctccgaaggcccaaattcatgaagcagcaaacccagcagatctccacccccctgcctcaggacctctgctgaagagggggatgaagtgggtctccag

SEQ ID NO: 13743 - DNA, 1623 bp, Homo sapiens
gtggcagctgctccagatgtggaaaggtcacaggggccgctggctgcgggctcatgccaggcaggggcaggccgcctgagagggtttgctgtgggaccgccctgggctctgagccctgcctgcggtggtgcaaccggcggtctgttcacgcccgtctctgctgtcggcccgcaggcttcatcatctactttggctatggcctgtggcacagcgaggaggcgtccctggatgccgaccaagcaaggactcctgacggcaacttggaccagtgcaagtgacgcacagccccgccccccggaggtggcagcagccccgagggacgcccccagaggaccgggaggcaccccaccctccccaccagtgcaacagaaaccacctgcgtccacaccctcactgcagccaaaggtgcaattacttgacctgcagccccagcccaccctcggctctgcagccggttctccgggccctggtcacctccagacagctgcctggccggggccactaggctgcggctggccactgtgtctcctcacttctctgaacaaagcagttcctcccctaccagctcagccccgagctgccgcagcctcaggcagaacggaggtcaccttctctccttatcttgggaaccaggccttcctcccggggactgttctgggattgaaattgtgcatactccaaactttcgcagccatcttcccgctcagccccagacacccagcaatcaagccagatgagtaccacaaaacagtgtgtccccagcagctccccaccccagagccaaatgacagtagtgcacttaaaaaggaaaatcaggcctgttgtccttctccggttgcattcagatgggtcattagggccggaccctgcctgccccttggcttctcagggctttgctctgacaccatgacagctgcccggggctgagggcagctggctccactcaaatgaggaagaagggatcactcccattagggcctgctttgcttatgcatgtgtgtgcacatgcatgtaaaccagggaccttcagctcacggcctccaggcctgggccagttcttgctgctcctgccgtctcccccgactggctgtgtcctgagtaactggaacatgagacagtatctgcaggactggccccatggtggccgagtcagaagtctgtttcctgtgagtcgccaccgttcactcagtcttgccctcccatgctttggagccagtctggtggctcctgtaaggttctcaaggctggtggcagctcagtctggggtcaggacatgtcggggtcatgcgtttctggccctgacataagctgtctggcctctctgtgacatgatgaaattgaaatcaatccacagtccatgaaattgtgacactccaccagattaagttagggcataacattaacttggaaatggccatgtcatcacccctgcggctgtcctatagctgagatgcgtgggtcgcaggggaggtgatttctaggcatattgctgtcccttttgtgtatctgtcatccggatgcttcggaccccacgcctctgcaagtgggagagacccgagcatcctccccacccccatagctccagtgcacgccacccccgtcttgcctgggtcggggcctgcg

SEQ ID NO: 13744 - DNA, 1063 bp, Homo sapiens
tgaaggcacagagaggaccagaccctggaaggaggcagcagcccttctcccctggacgtttccctgagtagtcaagggcaggctgacaccttcctgcatgacacaggccaagagagacctcgccagtccctggatattcggcatctatttctgaattctctggaaaataaatgtcccttgtgatcagtgttttatgaaatgtgctgcctcttccccagacagtatcaagggtgctgctcatgaagccacttgcccctaagtttatacataatagcagacccagtggagcagtccctccggggtggtgggatgcttctcgtaaatgtctgctcaagttgatgcatgagttttccaagccttggagacgggcaaggcttctgcatttttagattacacaaataataaaaaaggttgttgaccttagaggtaaagtggaggtccgtcttctagtcctttctttagcaggagaatcgcaacagagaaaaatgagaatggagttcatttggccattcagagcttagaatcaaatccccacctactaagatgtacccttgggtgtgtttgtgtgtgtgtttgggtgcgggctgtgtgtggggtgtgggagtgggggtgggcactccctctctcttccccacactcgcccgacggtccctgtcactctcagttgtgctgcctttactagacagttttactgaactattggaaccggcgccactgccatggattgaagccacctcctgtctcttcaggttcccttcctgccagtgctccccatcctgagcatcttcgtgaacgtctatctcatgatgcagctggaccagggcacctgggtccggtttgctgtgtggatgctgataggtatgtgatgctgctgccagcacgtccaagatcctggcttcccctgggggtctcccttgtttcagatttcataacagaatgacgcacatccagtcagcagctttctcgaagataatgctgaatccctggtaggctgtgagtcctctcctccctgttagatactttttgtttccattgcttcttgtccaaactatttattcttttg

SEQ ID NO: 13745 - DNA, 1030 bp, Homo sapiens
cctagtatctttagcatctgagggccgctgccacttctcagagcaagagagatcctctcagggtattcctctgggctgctcatggtggaggtcatgtcgccccgaaggagagaccatggaggatgttccccagaagcaacagcgggaggtggtgttcccggtctctcctcgtctatctacaatgcagcatttgactatatccttcccattttataccttgtgtcccgggcagctcactttggaggcttattgagaacttgagttggtgcacgtcattttgcttgaagcagatgtggcggtcacgcaatgcctttcttcccaggtaccagccagagcagcctaacctggtataccagatggccagtacttccgacgagttagatccagcagaccaaaatgaattggcaagcaccaatgattcccagctgggctttttaccagaggcagagatgttctctttgaaaaccatactctcacccaaaaacatggagccttccaaaatctctgggctaattgtgaacatttcaaccagcctcataggtaagagctagcccttccctggggccttgcttgttggcattgcatggtttctaggcagtggagctggagttgggggaaggtgccagagaagatgagcatctgtcttgctcctggactgggacatagttactctgtgttaactgtagttgtgccttcggaaatggagcctctctctccacaagtttaggggagaacagtggatgcctgtgggaaattgggaaatggttgagttgcagcttgctgtcttttccttcccccttagctgttctcatcatcaccttctgcattgtgaccgtgcttggaagggaggctctcaccaaaggggcgctgtgggcagtctttctgctcgcagggtctgccctcctctgtgccgtggtcacgggcgtcatctggaggcagcccgagagcaagaccaagctctcatttaaggtgagcagctcggcctagggaaggaaccctggtacacagaccctggccctcctgatgcctg

SEQ ID NO: 13746 - DNA, 1032 bp, Homo sapiens
gatgcagaaagcttagggttacttggtgaccagcaggggctatgtgcctcctgaccaggggacagtggccagggaagccgcctgcactgactgcatggtgcacccccagaacacagcatgtggggggacaggccagggctttgtacatcagggaacaagggcttgaaggacccccgacagggccctgggaggggccatagcgccacactgaacctgggcaccgtgtctcggcacaggtgtcagatttatgggactgttttctgaatgtttaagcagcctgcttcttctggactcctgagtttgtaaactgtgcttattttgcttttgcgttcatcagtgtagcaaagatgtgctgagcccctcccgtgggccagtgcccagctgtgcccgggccccacacacctggcaaaagctgcgccctcctggactccaccttgtgcatacaggcagttaaggaatgcctttgctgacaaagacttttattttagccttagtttctctggaattgtttgttttgagattgagttactggtaaatatgggacccggggtaggactggctggcggctctgcatccttcctccgaggggccctggggagaagggtgtgggactggccgcgtggctggtttctcccccatttcctgttggacccctgcctcatagtccccacgtctccctaccctagtcattgtttagaagatgcttctggaaggggcgatactctgcacccttgtgaccctgggccacgaacagcagggaggcctgcacacacggagttagcatgcagtggctggactcagcgtctgaagcccagggcctggcagcggtaacagggagggctgactgccaggttccgctcatatcaggagatgagcacagctccttacgccagactgcgcagcgagtgacgtgacatttgtttgcggctcttttttctagtgacacaaaagaagggaagcccggtgttggtggattcatgcccttcgggttctctggtgtcctgtcgggggcagcgacttgcttctatgcct

SEQ ID NO: 13747 - DNA, 1036 bp, Homo sapiens
gtctgcagaggctcgatgcacttggattctttttcagtcgccttcttatccccatccaggaaggaccttcccagtttgtggttaacactcagacaaagttttgtgtctatgcactttttcaggacttttaactcttggtgtgaaagagtcggccatggtcaacaaaatattcacttgtattaacgtcctggtcctgggcttcataatggtgtcaggatttgtgaaaggatcggttaaaaactggcagctcacggaggaggattttgggaacacatcaggccgtctctgtttgaacaagtgagttgctgcttctgaccatttttcttagttgacatttaatgacatagattgtatgggggatataactggctaggatggcatgtgcttttaagaaaacattatttgaggatattttgttaattgttttgtgtttttgcagtgaagtagctgagggtattttgtatgtatcaagtttgtgtgaaggtttattcccctgaaatggaaagactattgtatgacaagaaagactgaggaaaagaaaatcatcaccctaattccaaattgtgtatcattcaggattcttgtcagactcattaaatgatccctctttccccagattctgtttgatggccaactttggaattttgtgttcagaaaagatttttctctgcagtgccgtggtgacctcacttcacctttaaataccttcctattagattaataatgtagagggaagagaaataggtgaaactatttttgaaggttttcagaatgactgaagtgtcagaatgtgagcacaatagtctttcgccgacatttgacttgtgctgctcaagccctggcgacagtggccccatcaccctcatgtctctgacacagacatccggaactggaggtgacagctccaccctgtgccatctcaggtctctcgcccagccctcattgaaagctcagataacctaggaaaaaaaagccaaacagtcatatcttttttatctttgttgtcagatctccatgtaattctttaggtctcagg

SEQ ID NO: 13748 - DNA, 1214 bp, Homo sapiens
ctgtcgcatctggtcgggcaaggtgggcccgtaggttggaggaaagcaatctcagagccatcccacaaggcacaaggtgtcctgggccctaatggggcatgtcccatgtgagggtgggatggatgaatacatgtcctctcatgataagtgcccaagagcatatcagatatgcatatatatcatataccacagagcacattgggctgacatttcagcccagaagaaaagtgcttcctgtagtagtaacagtgacgaaaagccctcacttgtaataactcaacatttttctgcttcgacctacctctgtgttaccttaaaagtgaaaacaacttgctccttaccctcaggggatcctagaaagatctagaaaaacattgttattgccattcagggcctctgagttttaataatttaataatttaatttagtaatgaaattaagatatggtttggtttgctttctattacagcatacttgaactaacaccttgtttttcctggtgtattatctgatgactgagtgtaggaacaatgtcattaatgtgtgtttcctctactgcataatttccacccatggaagagtctccattaagaggacctgctacaaatgtggaagctcagagacctcgaaatgaagtcatctgtatctgttggcctgctgggttaattctgtatgtgctggtgaaactggagaagtctgcgtgcttctgacaattgatggtggaattctacgaattaaagcgttttagcaggaaatgattatgaaggacctgatcactgtctgtgtttccataatgtgataagattagagtaatgggtgaaatgaggagcaatcaggaaacatctttgttctttttcaacagctctgaacagcaacatggggtgcaaagtcctgctcaacattgggcagcagatgctgcggcggaaggtggtggactgtagccgggaggagacgcggctgtctcgctgcctgaacacttttgatctggtggccctcggggtgggcagcacactgggtgctggtgtctacgtcctggctggagctgtggcccgtgagaatgcaggccctgccattgtcatctccttcctgatcgctgcgctggcctcagtgctggctggcctgtgctatggcgagtttggtgctcgggtccccaagacgggctcagcttacctctacagctatgtcaccgttggagagctctgggccttcatcac

SEQ ID NO: 13749 - DNA, 1048 bp, Homo sapiens
atgcccacccattcatgatatcctataatagtaataccaccctaataaagacagagattccttagcctgatacaaacgtagaccacagtctttctcctgcgagggtgaaagatttccctctggatggctcccaccaggtgcctggagaaaggggtcgactggggcctggccattctgaaggccactgaaaggggaagctaaaagcattggcttcttaaagatcccaagatgaagattttcttgaaagaagggcatttccgagtgtcgtataacagcttgcttttgactcctcctggcccccagggaagccattaagctggaatgtatcagtggtggaatgatccgttaaattcaaggtgaaaacgtcacaccattcaccctgtcacttgtatcagaaatctttaaaatagaacataagagagtctttatctcaaattctgactcattgggtcattttactcctggtgttatgtagtggttactagaatagaatgcagagttagaattcctgtgggaaacgtgcttttctgaggatacccctcaggtaagtgttctttgataataaatgacagggagcaagagggatccgagacccttgggcttgcaagatttccatcaaaccctcaaataaaaggaggcatcaactgttgtataaattcctccccacctaatttccaggtgatgctctcaaagtattctggcaactttctgtgtaaaccccaacagcaggaagtctctaccaacctgactttgcttgctggggttggaatggttagctaagtctgtgcggagtagcttcgtgcagcctcactgttggttgaacaaccagctttggagtcctggcatgaatgtaagagctggtataatgtgtacaaaatgctgacagataaaaccacttggagaacaggtttttgcattacttccaaggagacaggatatttcttaaaataaacccaggacagagtaagtgtctcattttctcctaccctgggaagtaggaatgaacacctagcctgagacatttacattctccagattatcagccctg

SEQ ID NO: 13750 - DNA, 1051 bp, Homo sapiens
agacagcattgtctactttcggcctgtgggttatttgtttatttgtttgggcctcttcgtggtgtgagtgggtgggatcccggcgctcccatgttgctttaacctggctgaggcccgatgctgtggtctttgccatgcctgcactggggcctctgttggcagttgttcttggctgggcaacttccccactgtgcctggaagctgttctgcagttggtggctgctcagcccaaggaatggcacctgtggtagagcctcatgtcctctcctccccgcatgtccccgcctctcccccactctgtcctcctgcagaacctctgatccttgcctcctctccaccccctccctcctcctgtagaacctctgatccctgcctcctccccacccctcttcctcctcctgcggaacctgtgatccctgcctcctccccacccctctccctcctcctgcggaacctctgatccctgcctcctccccacccttctccctcctcctggggaacctctgatccctgcctccttccgcacccctctccatgtaatgttgcttttgctgtaagacttagagtggtgggctgtaaactttgtctatgggacctcagaggtccctgggaacttctgccatcagccctgttgagtcagtaggcagaagcgtgtggcggggaggcagggctctcaggctttctgattgtgaagtcagggaggcctgaaggactgaaacccctggttgagtcatcaccctggcccttgggcccccttgtgccagacttgagcagtcacattgcctgcagcttgtggattttagaagagtgtaaagtgtctttgtaaccaaggcctccagctcgatatatggaagtgcccaaatggctctgtgcctctgtacttcttgatggaaggccaccttttttcccccatgaaagtagtggccttttgagacagaccttttctttgtcccacactctcctttgggaccctagtgctccaggagtgtatgttcatagcctcgcaccccccgcaaccccaccactctgtgctttccaagaataaggactg

SEQ ID NO: 13751 - DNA, 1051 bp, Homo sapiens
catgtggctgtcacttacagcattttggggctgtcctggcactggggttgtggagtagggtacttggtgcaggtagtggagtttcctcggtgttttttgggtcagccccagacgaagtcctttgtttttacatttaattttggaaatttccaaacatgcacaaatgagaaaagcataatgaagccccgtgtacccgcttatcagcttctcctagacagactcgaggtgggcttggcttgtcctgggaccctcatgccttcctttgttctccctctttgttggtttcattacaagagattttctttcccttaattcagaagcattacatactcattatttaaaaattgtcgaaatatggaaggaaccactcataatcttctgtctagagacaaatgcctcacttcttcctgcactacaattctttgtatacacttatttttatgttataattttttttaaggattgctataatgttgttttgacactttttctctaatgtaacacgtaatccatctgctttatctgccacttccttccacataccctttccaggcctctgctatctgtatcctttccacaactttccgccgaagccccggttgggtcctgcagccaaaattacccacttttcctcagtcccagataaagttcctgttacctcacagccagcgggtcttggctagcagctggctggatgggaagtggatggattacgttgattcactccacggcatgaataataatgggcttcatttttacaggggtatcacatttaagaagaggttgtcacttaactcatgactcttttatatttgtaggatttcagacagggtaacaaataaagtaagaattatcaggcagcagggagaatgagcttggtcaaagttgagtcagtttggcacctggcagggaatagggtttcaggaattagatgacctgggttcaaatcctggcttcactattacaagttacgtgacagcaggcaatataatctgccagctacactccgcgctcttattcttacaagaggattagcaattgtgactcgatt

SEQ ID NO: 13752 - DNA, 1066 bp, Homo sapiens
aggctcagcagcccacacagagttcttaatcagaaggacttctgggggatatagccagtgacctttgccacatgtaagcaactttgagcagcctgccttgaaataagaattaaggaggaaggaggggctgcccataagcttcaagttcctggggaggattaggctataagtaagcaccttgtttatgaggctgctactaccttgtaaatgtcagaaacaaaggtgcagaattaccaggtgcaccttcccaaaggcggtgggtaaaattagctgctggccagcagggaagtgggaggacattctgcacaggccagaagccactgtgtgttggggtatgtgagccttgagcacccttttctttccttccctgtttaggtgcttaattagtagcatgacttaaattagagtgagttcattctgcattcttccccgcgccgccccagtcagatgtgtttctgctgtcttaacagactattttagaacatcttctggtgttacctaacactggggctgggcgttgacacctgagtgaatagcctaagtcagagtcttccgcttcttgggctgggcagtgcattatcaaggtgtgaggggaagcccttgggtggtgttggggcacaagtcttgaaccctgtctgaattgggggaatttatggcttactgggcaccgccatgatgtcatcttttcctgttgaagagaatcaggccaggtgccagatggtaacatagttgccacatctcctggaggcctttcggtcttggccacgcttgttgtttggtttatcacattctgtcttctctcttctgttctgttccctgctcttcctcagcctctgcaaagagggagggcacacagtaggtgcataataggtggttgttgcatggatcgatcattgtgaacagttacttgcttgcttctttctttccagactgtgcactctgagggcagggacgatgtgtggtctcatctttatagctcccataacttcctacgaccatggcccaaggaagatcacccaatttttaaaaaaatgaaataacagctacttaatgtatgccatttttc

SEQ ID NO: 13753 - DNA, 1047 bp, Homo sapiens
tgacagagtgagaccctgtctaaaaaaaaagaaaattaaaatttagaacaacttgaaataaatgtcttaatttacctaaaataacaaggattaacccattttgtgttactataagtaacatttttatgaaaaatagctattttccagaacaaaaaaaaaatcagtgagaagagtggcattgttttacatatttgccagtgtctttaatgtttagcttatggcagctggattcatatatgtgcttctgcattcagtcagtttggacgtgttgttttagttgaagtatataaggaaaatatggcttcacagggatgtacctagaaagggaggaacactttagtggccttttcaggtaattgtagatattcttccttgatactatattaaaactccacaggcaatcgtgggttccgctgtggaatctgaagccatctcggtaagctctttgttctaaaataatgggtctgtcctgcacttcaaatcagtctgcacatttaggattctgttttactgaattacgtggatcttccaaatgctggcacatttcatcatatatttttaaaatatcccatttgttaacatcacccccagtgtcatcagaaaattcaacttttagggagctgtccacatcttggtgacgaatacaagttttctgaaattcccatttttttcttgaaagttcaaattttatcactcgcagcaaatgttgtcagttgtttcccttctagattctgcccgccccccctttttttttccagagttaactttttaaactacgaatcccaatcatggccccttggcagccaccctgcagtggggcaccaggatgctgtgtccctggtgggctgtgagcctgactttatcaaccttcatggttctcggtgctctcatggtacatgatagagcatcaagaaatagcagtaactgacagttagggacatttggttgtggactgtgttttaaatactattgaattaatgttcagttccactggtgtgatcatggcattacagtttggtaacacaatgtaattcttttttttttttt

SEQ ID NO: 13754 - DNA, 1098 bp, Homo sapiens
ataccacaacaatgataactgtgcgaggtaatgcatatgttagttggccaggttcagtcatttcacagtgtaccggttgaggataccttatccaaaatgcttggaaccaggagcatttcggatttgggattttttcagattgaactatttgcattatacttaccagttggacattcctaatccaaaaaagtctgaaactgaaaatgctccagcgagcgtttcctttgagcatcatgttggtgctcaaagtttcagattttgaagcatttcagattttggatttttggatcagagacacccaacctgtgtatacactttaaaatatgatgttgtacatagtaaatacatacaattttgtctgtcaatgtgaaatataaaatgaaataatcttaaagaaagtaggggaagaactattgacattctcacgtggagacgaatccattctatgagtttgcctgggaactgttgagtaacagctggaacattcactgtcatcaggtgaaggacagggcgtgatcattgggaaactggcaggctgagaatatgctatgctgggatggaactacggaagtcaggaagtgtgggtccgtcaggaatgcaggggaacgtgatacttgacagttttggtttctagtaccatccatttgtgagccttgccattactctgtattactgcagttaacaagagtctggataaatctaagatttggactttcaggactggaaggctcaaggacagaggggatgcccccgtttctgtggtccagaaaaccctttgggaattgcagctttcagtgtgtctgcagaacagccgctgggatggtcagccattgatgcagtccggtggtgccatgtgtggggcccatcacaaaaggggcagaagggcctcagacctcgagagcctcagagggcagttctggattcttcggtgatgcctggggcctgcccttgtggttccagggacgctgaggtctttattgtgcacattaggttttgatttctgtcctccatcactctccttgaacagaaaagttatttcagtctcttagcccaatgcttttaacaaaaaactcatggaaatttcaagacaatatttat

SEQ ID NO: 13755 - DNA, 1051 bp, Homo sapiens
ttctttaaaagtcttagaagtggctggctaaaggtaacggggtgctgaagcatggctcccacacatctctgtcaccccaaaggtgctgggcacgagtattcagggaaaccttggctgtgtctgacctatgtttacttcagagctttatgcctagcacgggggtttgcacagggacattgaaagtaaggaagaagagagcaaagtagatgggtctctcggaaggctttgaaggggtcccaagcttctgtattttctgcaaacgcctgtgaaaactcccagaacattccttgatcaaaatggttttcttgtaccttctcacagggagagaagcgagggtgggggcagggtcgggatgtcatgggaatggaacgttcttaagctcagttgtatgtgatttttatttttctctgttgcctggttcattaattcataaactcccttagaaggctaaacagttcattagaaatatcctatttctgttaaatagcatagaaacatgtcatttacatttttctttaaaactcagaacttgagatcacttctgtaaaatgtgagccaaggctggctcttctccgggaggctctggcggtggtgggaatgtggggttcaggggatagagggcacttgcagtttaccctgtgactttgggtagcttttgaatttttgagccgtgtgtgtattgccttgttgaaaatcccatcatggcattgcttctttggggaaatctgatttcgtttgtatggtacctcttgcaggaatgtagagggtagcttttaatcaccttcagtctctagaaactggcatattattcatttgcctcagcaggcgttaagattaacaacatattccatgggtgaaacttcgcagttgggcccaggaatagtctctctgctttatagcactcatcaccttgctggagagggaaaatcaatcaggtaaggagacatgtcttgattgtttagtgaagcagccacgtgaggaaattaagacttgtttccaggtgtgaaaaaggcctatgaaggaggaggctctgccagccattgaaagtgtg

SEQ ID NO: 13756 - DNA, 1030 bp, Homo sapiens
ttgtggcacctaaaatagtgctcaagaaatatttattgaatgactattcttataattagtaaaactgtatttaaaggaggaatgtctttgagctaatgttttggcaggtggatgggacaatatattattttaagtttctgttgtaattttgccctagcagctcagttctggtagattttgttctttggcacacatacataccccattttgcactttggtacaaattatactgtgaatgggtgactttgacatttatatttttggaagaatccagttctactgaaatcagagtatcagatgttgtctttttcctaatgttcccagatggggtagaattacagcttcttcttacttactctgtaactaaggaacctttgggccagtttgtcctgtcctgtggttgagaatttttgcctggtttgcccagggtttctcatccttgagcatccaaggctaccaagatacactgttcatatgtcgtcctggtttctaatggatagttatctaaaaatgcagcttcccattcttacctgcactgtaggttagcttggaagatgtccatccctggtctcagtggtcttgttcagggagggtgactgtcacagctgtcctttcctctctggtgagattgtttcattcctccttcaggcacttgggattcagagccctgttggctgcctcttctgtactgtcagcttagcacaggattctggaagcccggtgctgggaaagcctttctctgggctgtttgggatgggactactggttacccgcacacactggtactcactgggtgttcccgaggatggcggcttttaaacttctttgaccgcagtctacaataagaactaaatttacattgtaatcaagtacacacacagaggcacacatattgatatatagataaaatgaaaatttttatgaaacagtactcatttttactatctgtgatacgctgagataatttttattcttttctatttcattacaagaaaaattcctcgtggcaacttggagtttgcaaaacaca

SEQ ID NO: 13757 - DNA, 1071 bp, Homo sapiens
acaagactgttgacttcagggagttacaattttctatttggtagaagaactcattctttgatggaattaaatacgtgttgattgattattctggtctgtagtttattttaaccaaagtccatacaaatagataattatgttggagggctcagaattatgtccaattaaattaatcctttctcattatcaaccatgtatttggagggattgctattaatcctagggacaaatttgaaatgtgaataagtgcatccttgttatggagaaaaatattgtttccctctaaccttggagatacttgagtctcggagttatctcttccagaggcatcttcagagatgcctatcactccacctgcctcttggtcctcactccaagcaagaccttccgataggatgtggtgtttttctgtatagttggcccctgcagacctggatagattttaaaggcagatccaataggattggccggtggattcatggaaggacgagaaaggtcaaatatgactccaagcacatcggagttgctgtattaatgagatgggaaggctgagcaaagaacgtgttggatggaagagggactttttgaaagtcacaactgacctttttagaactcttatccccagggtcagggctggaagatgtatcttcttggggcccctctcaggtgcctgcctgtgtgttgcagccacccgtccaggctgctggcctccttccccttcacctagctttactggctcctctcgccaaatctggggggtctcttcagcctctgtctccttgctgcccatggcctccctttgctcccctgccgccttctagtgggccgcctggtggtggacttgtcctgtgggatggagaccctccatacatggggttcaaaggtcctggggtattcctggatcttcaggacatctgcctaccctcaggtttcccaggcctcgggtggggaggcatcagatccctggccaacctgctatccaccccagggtttagacctctcttcccgtgagggaacagagtagtagcttcatttgtggcagattatctgccttgtgataaactttagtgg

SEQ ID NO: 13758 - DNA, 1033 bp, Homo sapiens
caataaatggcaagctattatttttactttttataactcactgttccacaccctactcaggaatctcagacccactgctgcttcctttttattatttttaaaattcgtccagcaaatatttatcaagcacttacaattacatatcctaactatccctccctcctgtagttatctgtttgtatgtctctcatagcttcaaggttatgagatcctcaaggagtttcatattaaccttttgcaatccaggtaccaagcagtgtctgttttagaaaatgtttgaataaatgaataaaagaaagtttatgaaatacgtaattaccatattttagcgctgcaattgtttgaataatttttattttaaatcagtcttacataggaaaatgaatatatcgcttcctcattctttgtttcttttacagtacagttagcaaaaattcaaaatatgccctttataaattcataactctagaaaatgtttattttaaaatttacatattaaaataagtcactgataggtttatatcttctagatcaagtagctgttttaatatgatgttattttttaaaaactattcattttcaaatgtcaataagaaaaataaccagagaccgacataaacaccaaattataaaaagttgagcacttaaaaaaaatctttttaagacaattataaattaaccatgcagttttcagaaataatacagagaaatccccaacactgttcacccagttttccctaatggtaacatcttacataatcacagtgcagtatcacaacaagaaattgataatgataggccaggcatggaggctcatgcctgtaattctagcactttgggaggctgaggcaggtggatcacctgaggtcaggagttcaagaccagcctggtcaatatggtgaaaccccatctctactaaaaatacaaaaattagccgggcatggtggcgtgcacctgtagtcccagctacttgggaagctgaggcagaagaattgcctgaacccgggagccggaggttgcggcgagccgagat

SEQ ID NO: 13759 - DNA, 1029 bp, Homo sapiens
ttttatttagctgaggattgtcttatggctgattgtgtgttctattttaaagtatgtgccatgtgcagatgagaagaatgtatattctgaagaatatacattctgaagaatgtatgttttttggtgaagagttctgtagatgtctgttaggtcttttttggtcaagtatcaagttcaggtcttgaaaatctttgctaattttctgccttgattatctgcttaatatagtcagtgggatgttgaagcctcaaactattattgtgtggagatctaagtctctttgtaggtctttaagaacttgttttatcagtctgagtgctcctgtgttgggtgcagatatgtttaggatagttagatcttgttgaattgatccctttactgttatataacgtccatctttgtgttttttgatctttgtgggtttacagtctgttttgtctgaaattaggattgaaaccccttctcccttttttttttctgttttccatttgcttggtagatttttctccatcccttactttgagcctctggatgtcattgcgtgtaagatgagtctcttagagacagcgtaccaatggatcttgcttctttatccggcctgccactctatgccttttaattggggcatttaacccatttacagtcaaggttaatattgatatgtgtggatttgatcctgtcattgtattgttagctggttatcatgtagacttgtttgcatcattcttttatagtgtcagtggtctgtgtacttttgtttttttagtatgtacttctgtgtgtttctgtagtggctagtaatggtcttctttcctttccatatttagcactcctttaaggacctctggtaagttaggtctggtggtgacaaattcacttagcatttgcctatctaaaaaggatcttatttatttctcctttgcttattaaacttagtttggctggatttgaaattcttggttggaaattcttttcttatagaatgctgaatatatttgtataagtgaatgatttgtataagtgacctgc

SEQ ID NO: 13760 - DNA, 1117 bp, Homo sapiens
ctcgattcttatgcagctcaccagtttgtgggctagggaattgagccttgagcagtgaagtgacttacccaagattatatagtcagctagtttaaaagccaggactaggagagtccaaggttcctgacttacagtttaaccttcgtttcccatacaagaagtagcaagaactgggcttgacattatagaaaatgaattatacaaatattaactttatacagtttgtggtacctaggttctctttaacaatagttgggtctctgtggaaaaggaaagaaaatatggtaaactttcagattcaaatgcccaaattcatattcttaccaattcctttttggtatcattactctttctttgtgatttcatcattctgaagtacactacatattagaataactgataattataattgaattgataaaatatggtatatattaaatattagtttggaaatacaatctcacagtaggaaagaacaagatagaggttattataaaacttaaaaattgcaccatagacacaaaagctactgaagaaagcattacagatcacaaaagacaataaagtgaattatgagtttgcacgtgtatcactgggtcaggagagatgacaaagccatggccattataatatcccttcaggcagtgatcacgtgaagccagttttggagtgaggaaaatgctttttaatatttctgaatttaagccaaagaacgcctcagtatttataatgaagcaaagatcttggtctaatttaagaaggtgttagactggggtcagtaaatatatggcactcttgcacctcagcactgcacccaccatactccctgccccccagccctaccctttacttatgacagacatggatgattaataacaactcattttccactaaacctagagatggtttaagatccttcttaggggagcatattttcagcagctcctgtaaattaatgattggcaagagtgataaaatttgttttccaggccggcattagatattttctggatatttttcttgctaaagtagactaatgtaaaagtaagtcaatcaataaccatacaagaagagctaactactcacttgctgagtaataaaggttttttctctatag

SEQ ID NO: 13761 - DNA, 1022 bp, Homo sapiens
gctcccaaagataaagctaagatagacctgtatgagttcagttccttcattgcagtaggtaagttatccagacatctttcattgagtgcttttctatttgaattggcatcttgtttaatcactttgtgaatgacatggaaacccactcatctggtaacttttagatagatttttaggcaattcagaaagcacactgagaatttccctaaaatgtcagtaacattgcctgaagttttattttatggttctgggttggaaagacagtacatatttgggaataaagtggcattcagaagagcaacaataaaatggggttttgtttgtttagtttagctgtgggttatacatattccttggcttctagacctcacaaatttatttgttcaggaagttattaacacatttctaacttggataaaatacttttaatatctttgatctatggtaggtgggtaattcatggtcatttcccaaagtatgtatttatcatttttggtatccagactagaggatctcagaagtttgaagctgatttattatatgagatatttctcccccccacacacccatttcccactcatctaactcgttctatttgaaatctcagctgagtctttagaattctctgggatgctgtttcagacccttgtaaatctgtattggtgctcactctttgtgccccagtgacacaggatttctgttgtagtacacactggattgacatttcaattgctactgtgttttgcgcagagttaggacaattcataggggatgggaactaatagttggtgaactaacacagtaataataatcttaaatatttgcccaacatatatttaatagaagaggaataaactgattttataacatttctatatagaaacaaatacctactaattcgttttctactggccaatgcagggtcagttttctagaaataattagacaaaacatttctgaaggtttggtagttttaatcccttagatcttattgcatgatttttctgaaccaggcagctttc

SEQ ID NO: 13762 - DNA, 1166 bp, Homo sapiens
aaagtagccagagtggcaggatagctgcttccatcacggattgccagcaatgtaaagcgtagactccagaggaacagtgctaacttaaattaactatgcaggcatcagtacttctggttctgatggcccggggatttctaagtagtagtgagtctcagcattatttgttatacagtctactgctagatgaacaaggctaagtctacagagaaggtaaattatagaaattaggccccgtctctactaaaaatacaaaaaattagccgggcgcggtggtggggtcctgtagtcccagctactcgggaggctgacgcaggagaatggcgtgaacccgggaggcggagcttgcagtgagccgagatagcgccactgcagtctggcctgggcgaaagagcgagactccgtcttaaaaaaaaaaaaaaaaagaaattaggtaaaaggattggaatcttagctaattggtctgaaattcagagctaggccacagaattagttgctctttcataaatttcattacctgtactctagcaattgtaagtgtttttatgtgtttctcccactaaacagactatgtacttactctgagggcagagaggcctcatctttctaaactgctgtgtctagcacagtgcctactaaataaggaaaactcaatgaatgttgaattagcactgcaggtgtctgatagaacttagcacaatcatggaaatgttctttattgtgtcgtctagtaaggtagccacgtgctgggctacttgtgtctattgggcactttcttcatggctagtgtttgaggaagcgaatttttacttatgtttaattttaatgaaaatatctatgtgtatctagtggctactattattggacagtgcacttgtatggtttatataatactttcagtggactaaaaagatctttgactttttttgtttttttgtttgtttgtttttgacttgtattccaagtggtcccagactgctaagctttttgttttactttttgtgattttttagtttttttcttctcttaatgtcagcgttctttttttttctatcattaagtaagctgtcatcagcctttcttttaacttttctgattttagtcaactatcatatagaaagacatataatcaagcttgtagaattatctttttttttttttttttc

SEQ ID NO: 13763 - DNA, 1048 bp, Homo sapiens
tttgtatttttcatagagacgtggttttgccgtattggccaggctgttctcaaactcctggcctcaagtgatccgcctgcctcagcctcccaaaatgttgggattacaagcatgattacaaagtgttgggattacaggcatgattacaggcatgattacaaagtgttgggattataggcacctggcccgggaattagctaatattctttaagtattatttctattcaattgtcttctttccttatgggactacaattacgtgtatgttaggtcatgtcactgtttccattcttttttccccttctcgtaagcctagagattttctagcaacctatcttcatgttcacttgtattttcactgtccagtatccagttatttctaattattgagtttttaattttagtttttgtattttttatcctaaaatttacatagattcaaattcttatgttttcatctgttttcttgagtatattaactactgttgcaaaattcctgtctgatgaccgtcatacctagattgtctgtgagcctgtttctgttgttttgtttttgattatttgatcctttttccttgggtgcctggcaatgttttattaacattgtgatgaaaaattatagagaatctgaattatggttatgtttctccgtataggatttaatatcctctggtgagtagttagaaaaacattgattactttgattcgtaagtgactgataagacatgagcctgaattcagggcagtcaggaaattctgatagcctcactattggtggactactggtgtatagcccttagctaaggtctcagttgaaagtttgccatgtttaccaagatacctcttccttggcaagtcctgaatttcaggtatcatgaggctgatgaaagctatttttaaaacctcttttcaacatctttttgttgggattttctgaatttcagtccatgctgtttacaattcagcacattcctggagaggaaaagttgaacagaatattgggcccctttctttgaggttcctttttattttcctgagatcctcaatt

SEQ ID NO: 13764 - DNA, 1031 bp, Homo sapiens
taatgaggacttgactcgggagcaagtgtgaatcattgccggggctgggaaaggaggaaggcgcatttaaccccctcccacccctctccatgtccgtgtgtcactcggctcggtccacctggcgcggccggtcctggggctgctgctgctgttgacgacgacgacgacgacgggggctgcctctgctgtcccgggagtttcctcctgctccggccacacagctcctggggattgttcctcttcgaaccagaacctcggcctgaccggcactttggctccaaaataactttatttttgggggagaaagcacatcacgaaccagtcaaaatcgtggtttatttctgtaacgtgaagacttctgctcttttttctttgtttgtttttttcgtaaacatctgggtgtatatcaaacggcaagatgtccagtaatgtcccggcggatatggtaagtgacggataagttatgacactgatttaattgtggtttccaatcttatttaatcggaaagacggcaggcgtggggcgaagatttgctggggactgtcgaaaagccactgtgctgagcgatttggagaagttggagcttctggtttcccccttttaggaagtactgcttttaatatgggttctctcatttggtcgtgttttctaaagcattgaagatagtggagaagtagggaaatgtatcatggtagcttgaggggacaaaacatctccctcttcgctagaagcctccgaacactagtattttaacgtttctgaaaacgtcagggacagtgggcagagctgaggacgggtgtccctacgagagaataggtagggaaacgggaatcttgctttatgacacagacgagatcgtcattgcagtagggacgaacttgatatttttcaagaacagggatgcacatctcttcaagaaaaagtatgttagaatttgctgtgaggtttttgaaatgtctgaatacggatggcaacagaaatataaagatattttgggattttcagaaacgtaggctgaccctgtattggt

SEQ ID NO: 13765 - DNA, 1060 bp, Homo sapiens
ccatagatctgtgaaaatgaccacgggaaagctcaggatactccagagaacagactcccaggggccttcctgccatgcccatgatcaaggtctgcaggaggaacaggattgtgggaaagaacaagagcatgagacccagactgttttggggctgaatcttggtctagctgttgtgtgaccttgagcctcagtgtgctcacctgtaaaacgagttgcatgaagactcagtgaaatagtgtgtattagtgatctattgctgtgtaacaaatgaccccaaaacttagtaacttaatacagcaccatgggttatctcacagtttctgtggctcaggaatcttggtgcagcttaacaggtcctctaactcagtggctcctgagacaacagtcagggtgtcttctgggttgcagtcatctcaaggttcagtgggggaaagagctgcttgcaagctcactcatgttgttgttagcaggcctcagtttctgttgggcctcctccctctgactgatgctcaggactgtgaacttcctctgggaatttccccagcaaagcaccaatatgttaggttagaccaaccctacctagtaggttttcactgtggctgaatagatatggtcaaacaatatctgtggcctcaggtccttacagcagttggctggggatggtcctcattccttgccctgtgggggtctccagagggcagctcacaacagcaaagcttgtttcctgagagcaagtcctggagaagagccagagggagaaggaattccagcaagaaggaagtcacagccttttataacctgacctcagaaatacaacctatttcacctgccctattttattgtgaagcaagacacagtctgctcacaaaaacaagggactgtagaagggtgtgaatgccaggaggcagggatcattaggagtcatttgcaagcagcctactgcatgatgtgtgcatacagtgtgtatccttgcttcacatggcgggcactcagttaatgttagcagcctccctgctctagtttacatggacttttagagctcctgtgctataatggcaac

SEQ ID NO: 13766 - DNA, 1059 bp, Homo sapiens
agctataaacagctgctaatgttagaaattaactcctataggaggtggccacattaatggcattacaggatggccctctcagagagcatggaaaaaggcatcggagaaataagaactttgctctggttatgcctatagcatcaattggtcgttttcatggtttttaaaatctcaacctcatgcaaagttgagggctccctaacaaagcaaaaaaatatttttgtaaaactagtgtttcaaattttagtgattcctggttgatctgtgttaaaattctatagctagaaaagcatttggacagtttctgaatttggagtttatgaaactttgacatacacatagttttcaaagcctaaatccccagaagcttgtcaaaccaaagtagcaattggatcagaattcctcttaaggaatcaccaggtattatgcaaaaaatttagtgtgagctatgtatttaaactctattaaaaattctggaagaaaataattatttaagaacccattagtttttaagactagagagttggattctttgaataatttttattcttcactgatttctttttatagaatacttttatgtttgttttcaaaactaagaagtaactgaagtttagtttttattctgtactggttctttcatcactattactattttatataagctaacgcattaaaatgatacaaatcttgctaatttgattatgtttgaattaccactggattttttactgttaaccttattaactcataaatgggtctttattttttactgaaagctgtgtattataaatgcactgtggaagataggttctgtcccttatagagggtaaagaatgtgtaattctgccacatgtgatagaaaatgtcttatttttattatgtgtaaacagaacagttgcttttaagcagtgctgaatattatatgtatatgtcatatgctaggttcaggaaactgagattatatctaaatatatgagaaacttgtttgttgtctagtctttttgttaggttatctctgactacctctggcttgagacattttgtgaaatttcttca

SEQ ID NO: 13767 - DNA, 1065 bp, Homo sapiens
gtgtttattaagttctttccagccacttggacattcatattaaaatgaaattttaattttaacttgataagtgtaaattacagtgccatatgaaggctcaagctccagatatgtcagtttctgttgtattctttcgttgatacgtttctagaatagtttttaaatgattacagaatgttcctagtgatttgtttgaatatgacttggtagccttggcctatctgtactataaaatttgactctagcctaagcttaagtttgttgatgttatgtttcttgtgtaggtgccaaaaatttactccttttaatattgtcagtattgatatctgtcatctggaatgcaagaatcttcgggaaaatttactaataaatttaatgctaccgccatactgcccagaaataatttatttttttgggtgaagtaccagaatactgtttggtcacttacctagtggcttgaaggaaccagagcatctgtccaagggagccatttagtttcctccagcacttatgattgagccttttgactatctcagaagtgggattggagaagtttgtcttgttctcttgtctcttttccggttgaagtttaggagattgactcattttgaccattttcttgttttgtttttactctaggcagtaactggggctaaagctctggggaggcacttggctgtgcttgctgaagtatttccatagttggactgtctctggcaaataagtgaatttcatttaaagctcgtcaaagctgtgtgaatcttggcagaaccccatagaaaccatagcataaaatttcttttaaaacaactatattattaaatgaagaatttggggtaaagcatattgctttaatggtcttaatactatttaaaaagatccttccacattaatattcaaaatgttttctagtagtggtggaaatcctctgcgtctaccagttcaaaggtaggctttcccagtcttttgggatctagcaaggatcagtttagtcttacctgcatgcaactgttcctgcaagaatgtagatttgaagtttttaataaagttgaccagttcatgtat

SEQ ID NO: 13768 - DNA, 1046 bp, Homo sapiens
taaatctgactcaggaaagacatttatatgtacacaagtgtatacaaataaaagtaaagttttactctattactttccaccccttcatccaaaaaaaaaaaattaggtcaaaaaacagtggtcacattgaaatactagaaatagagcaatttaacaattacaattttttattctttaccagactcgtcacatttttattttataggtagaatgcttaaaagactactaatgtcctaaagatgataatgtaataatactttaaattttaaaatgcctcatagccattactatgcactattttgtagttgctttcctgaggatttctttcacaagattgcttgtctttgtctcctcctagggtcagtgtggtagaggccatataccacctaatgggtgcctcagtaaatacttgtttaactggactgaactccaaggattaagatgtcagtgtatgtttacctcatagatagacatacggtttttgccggccttctagaaatttcacgatgtagtctaattccaacatctaaatatgctgtatcagactcacaacatgttaacacatttttttttctttttttttctttttcttactgttttggcccttagtttgcaaccttcatggctttttatccattttcctatctttgaattatgcatatgtgtcaccttttctgatatgaggaacggaactccatgatgagttaggtgaattataagtgtgaggctggaaaggggataataatagatatggcatgtggttaaaaatggaatacacatatgggatctagagggctacagatacatacatagctatagaaagagaaaaggtaggaaaacagaggtagagacatttcaagagagaactaagattagacacgaagtgatagagtccctttcccaagaatcaaaaagagacaaaaactgtgctgagaagcctcaaaactttaatgtttgcaggagacaagttccacagtagatgaaacaaaatatgttattttgcatgcatacttatatgtatttatcaaaatttttaatcacatttg

SEQ ID NO: 13769 - DNA, 1032 bp, Homo sapiens
ctgctttacccccagcaccaagaatattgcctgccacagtgtaagtattcagtaagtatttgttgaaagaatgagtaagtagaatgcttatttaggtttattcatgcgtttgccaatggttttgtttaccatttcttgcatttcactatttctagattcagtttcatctttgctgaagaatagtagtttttacagccaaggtctctattagtggtaaactaacagttcttttctcaaaatatctgtattttcctgtcactcttacatgatattttagtataaaatactagtttggtagttagtctctatgctttgaagatgacattagtaatagtattttgtcttctggcttgtgttattagtctgtttgttgtttgtttataggtaactttttttctcattggttttaaggttttttctgtctttgtgttaaacagtgtcactgtgaattatttaaatgtagatttatttttatttatactacttaagacttgtgcatcttttgctcgaaaatttttaaatgcttctgatcatattaaacatatttattttgtagtctatagctggcagttctcttatcaaagttattgagagtcatcttgctttttgttatttctggtgagccttgtttgtggtaaagttgagaatgtttcttcagtaagggtttaacaagtcatttcaatatgtggcttgtttggaagaagttgtcactcctgagacatctgtgtttgcttcagccaggtgccttagggatgttacctgcgtaggcccacttttaggcccactttctctgcttaaggtagtgtaaaattgagtcataaatcacatgaggatgggccctttgctactatatctagggggcactttcgcttcactccacaaatgtagaacatagacccaagtagaaaaatgtacttttatttcttctgtctttaaaattctacgcttttaccaaggtggttgtcctttgagggtcctggctttatgtggtagtctcaattcaacttctttgacttgtgtggggctacgacc

SEQ ID NO: 13770 - DNA, 1046 bp, Homo sapiens
catttctctcaggcatgtgtgggtcttcagatacctcaaaagtagaactgctgagtcaaaagacatttgcatttaacattttggaagatgttgataaattgcaccccaccaccccccccccccgcccacaaaagctgttatttatgctgtgaaacattttaacaatgattttgcaattaatcaagatttttactggtttttctttggctgtataactctatttttaaaaacgagaaattaaaatactgaaatactgtcatttgtccagagctacctgaccagaataagaaacacagagagaatcaactgaaagactcttaggacaagccactgctttatttaaactgctaaactatttctcaaactcctggcctcaaactatcctccctccctcctcggccttgttgctgagattacaggcgtgagaaccacagttcctggcctaaactgctaaactatttctctaaagttactgcagtaactaaataagtaatccactgtgtgaaaatgaggaggttctttctcattttgatatactctgtcctaaatggaagtatgtggtagttttttggttggtttgttttattctggggagggtcttttctagcagagattctatgtcaatcttacagaagctgcagccaacagttttggaaatgcaagttgttcaataaggtgtagcaaaaggagaaatgtgtggcccagatactagcctttaggagacaagtgtttggaaaggcagaatggattctgaggatttgccttaaatggaataaagttcaccagttccttgctggagatgatactttatggcaaaggacatactccaaatgtgcttataaatgaaattgtatttatatgctcaaagtgaaattaagctggccgggcgcagtggctcacgcctgtaatcccagcactttgggaggctgaggcgggcggatcatgaggtcaggagattgagaccatcctagctaatacggtgaaaccccctctctactaaaaatacaaacaaattttccgggcgtggtggcgggcgcctgtagtcc

SEQ ID NO: 13771 - DNA, 1049 bp, Homo sapiens
ggaggaagatgaggaagatgaagaggatgaggaggaggaggaagatgaagaagatgaagatgaagaagaagatgatgatgatgaataagttggttctagcgcagttttttttttcttgtctataaagcatttaacccccctgtacacaactcactccttttaaagaaaaaaattgaaatgtaaggctgtgtaagatttgtttttaaactgtacagtgtctttttttgtatagttaacacactaccgaatgtgtctttagatagccctgtcctggtggtattttcaatagccactaaccttgcctggtacagtatgggggttgtaaattggcatggaaatttaaagcaggttcttgttggtgcacagcacaaattagttatatatggggatggtagttttttcatcttcagttgtctctgatgcagcttatacgaaataattgttgttctgttaactgaataccactctgtaattgcaaaaaaaaaaaaaaagttgcagctgttttgttgacattctgaatgcttctaagtaaatacaattttttttattagtattgttgtccttttcataggtctgaaatttttcttcttgaggggaagctagtcttttgcttttgcccattttgaatcacatgaattattacagtgtttatcctttcatatagttagctaataaaaagcttttgtctacacaccctgcatatcataatgggggtaaagttaagttgagatagttttcatccataactgaacatccaaaatcttgatcagttaagaaatttcacatagcccacttacatttacaaactgaagagtaatcaatctactcaaagcatgggattattagaatcaaacattttgaaagtctgtccttgaaggactaatagaaaagtatgttctaacctttacatgaggactctattctttaactcccattaccatgtaatggcagttatattttgcagttcccacattaaagaagacctgagaatgtatccccaaaagcgtgagcttaaaatacaagactgccatattaaattttttgttgac

SEQ ID NO: 13772 - DNA, 1033 bp, Homo sapiens
actgggagagatgtggaataacactgctgcagatgacaagcagccttatgaaaagaaggctgcgaagctgaaggaaaaatatgaaaaggtaagaagtgtgggtttgcttggtaaaatgatgacaagtacgccagatgtatgattgtacttagtttgaggtgtaataagtttttagggtaacagctacattaagtatggtgttgatataagtcctcatccttcaaagaatgcagaggaccaaataaattagggtttttttgactaaaatgtaatcagactcagacaaaggctgtgtacatttatgttggttttgttattccccagtatcttgaagttcatgaaaatgttggtagtcacttcaagtcaaaaatgagcattttcaaatggcttggcatacagtacaaaaacaggctagacaaagtaatataggctatatttttcttagtcatatcctgaaacatttatgttcttttcctttagatactcaaaaaaccacagcatcactaagttaaattacaagtctgctgctctgtccagtaaattaataagattaaggaaatctataactcttatagttcagtaaattgaaatattaaatacttaattttcagctttagtcattctgaaaagtgtttatttctagatgtttcttaacctaattgcatgtttattgacaaattaccttttttttttaagaccacatttcctactaaggattaaggtctgacagtgtaaacctgtagagtgcttttttgcattcagaaggtggcagtgtctaccctttaatcaaagtctctacattctggttttaatagagttaggatgtggtacataattgcacctcaatgaggcataactttgcaaatattagactatgccatttcatgagttatagattgttataatgatcttgtatttttatgttcatttattgaagttctagttatttctggagttgctgtggatctacagatacgtgatattttggtataactagaatcttgatttctttcataaagttctgccatgttct

SEQ ID NO: 13773 - DNA, 1097 bp, Homo sapiens
ctccaaaaaaaaaaaaaaaaagaaaatgctagattcatttgactccttttctttcctctccagtatttatttggtcactttagttatgtgaagttttgaataatttccaattttttacaaattatatggtttgtatgtaatgaaaagcttatcaaaaatgtttcagtttatcagtctactaatcaaatatttttaaacttttaaaattatacacagaaatgtggtcctattttgaaacaattctctcatttttttcacattaaaaagttcaattctgatttctaaaaatcagaaaatcataaagaatttattatggagaagctatcctggtgtacaattatgacagtatttttattttaaatgatactgtccttctaagaatgtgtttctgtcaatttgtccttatctctacagaaccctgaaattgtagcactactgtagtgtttctagagagtaatacgtttctgctgccatttggaggagcctgcatcacagagtaatgagttgagtctgacttacaaagatgcctcctttgcaattcagaccccccagaagaatttgcagtcaaattcctataattaatgagttgtgtcttctagattcctttaagtactacatctaatggaagttacaattataacttaattattttaaatagtagagattctgatggtgtgcttacaccactgaaacaaaagatattctgaaaactgaaagtgaaactgtcagcccttggcatctgtagttaacaaactactcaagagttttgttgctagatatctagataattgtgagaataagccaagagtgtgggaggcttgctttgctcttcagatgaaatggcttaagttttgccaaaatccctgaagggtaatcacggtctcttttaatcccaagtttcagataatacccacaaataacttattctttagagtggtctttggaattagagaaagcagaaatgtattaaaatgtatttcattcactttgttcctgatccttacaccagggtcaacggagtcactaagaattagcaaagttcattggtaagagatttacccttctgatatcttgctctggtgaaatactagaaaaat

SEQ ID NO: 13774 - DNA, 1035 bp, Homo sapiens
gggaactccaaaagcaaggagggagagcgggagggagggggcaagggctgaaaaactgcgtgctgggtactgtgttcactgttgtggcaacaggaacattagaggtccaaacctcagcttcacacaatatacccaagtaataactgcacgtgtatccccggaatctaaaattttaaaaagctgaaacttacaaaattaaatttaaaaataaagatttcatctcatttgctttatcacttatgcacatgtgtgccttgctctcttccgctaatacacgtgtgtgtagatacgtatgtaaatgaatatacacacatttttttctaagccatttaagggtaacttacatacatcatatctgtgtgcctaaattcttaggtgaataattcctaagaaatacagttagcaacttcagcaagtttaacattgatactctactattgtaatccagttttgtcagtcaattcaatactgtcctatatgccattttttcctttcttgcatttaactttagtctccttcaatctgtaacatttccatagccgtctttgtcttttatggcattgatatttttggaagaataaagacctctccccactccttttttagtggaatgttccacattttggatctgtctgattttttttatgattagactcgggttgtagatatctttttaaatgttctaaaatgtggaaacagtagtccattcaaaggatcaatgtaaaacaaaatttaggccacagaaactttgaaataattattagaagccaaattggaaaaccaaaatgtgttgtagaatcaacttcctagaaaatgtttagagtaagatagtttttagtctttcaagtttctatagatgggtggttcgacaactgggttttcaaaaatcaagaaatgtcttggcattgaggtgaacttttgtggctttctttagtttcatcatgaactcgggctccccaaaagccagtggtatctttctgtagaaacaggatttttctttcaacttctgctaaatttattcaacaaacattacca

SEQ ID NO: 13775 - DNA, 1050 bp, Homo sapiens
ctgatctctaccaaaaaaatacaaaattaagctggacgtggtggcatgtgcctgtggtcccagctccttgggaggctgaggtgggaggatcacctgaacctggggaagtcgtgctgcagagctgtgatcacaccactgccctctgtcctgggtgacaggaaaaggaaaaacaagatgggagactgctaatgtgtttctctcagacaaggaaaacaaaacgaggtaaggtcatttgttcttgaggaagaacaattatttagcttaaaccagactaaagcaagggcaagagttctaaatctgaagagttctaaaacatcagtgattattgaagtgttgagtacaacagataataaagccagctggctatgctactcatataaattctaaggttattttaatttttatgcattataaaaatcagtttttcaaagttggaagtttttggaggaaaaaatgacttttaaagtatgaagtttttctcccattcttacacttctaatttagtattgtaaatgaacatgtttttagtcgaactgtaatagttgtctaattttgtgtaacaaatgctgctccaaatctttgtggtttaaaaaacatcgtttattatttgtcatgatctggtaggtgactggaagtttcctctggtctcacctggttctgttcatgtggctgtagtcagttagcagctgggctggggttgaagggtctaagtgggcctcagggacatgtctgagaccatggggctggtgtccccgatgacatgtctgaggctgtggtgctggtgctggtgtccctgggtgacatgtctgaggccgtggtgctggtgtccccggtgacatgtctgaggctgtggtgctggtgtccccggtgacatgtctgaggctgtggtgctggtatccccggtgacatgtctgaggctgtggtactggtgtcacctggcttgtacgctcgtacatgtgcacgtcctgttcacccccctgccccgagtatgctctcttccttcatagtctccccagagtttttcttaacatggcaacaggagtgttccaa

SEQ ID NO: 13776 - DNA, 1055 bp, Homo sapiens
acgtatgaggccaggctggtctcaaactcctgacctcaagtgatccgcccgccttggactcccaaagtgctgggattacaggcataagccaccacgcccagccaaggattgtttcttgatgcttttatctgtttggcataaattaggtccaggcttactgaagatcgtgtcccaaaatgtttgagagatactggcttagacaattgcaattgttcattaaaaaaagaaacaaacaacaaagcataccttttcattgagcattggactagaaactgacttttaaccctggttgcatattagaatttctcaggggctaattgtacaaaatactgacacatactctcagagattgatgtaattggtctgggatgggacctgggcatcaggattttaaaagcttcccaggtgagtccaatgacaaccacagggctgttgactgtatgtggggtgtcctgtttgataactgatgtctcagtgctaagaatttgaagtttccttttcaaagcactgatgatctattctgtagataaacggatgatagactcatccatttacattttttctgtaattatccttttcacattggctatagatgttcaagtatcacttacatatacccaacttccctatacctctcccgcttctcacaggaggaattttgggattgatgcaaaatggctttctgcacctttctataggttttgtacatgtttaactgacttctgcattaatcactgaagctttgagtcccactgagaataagcctctctgtagccgagtgaatgaaggcagctgagtatcttgctgtagttcactgttggactggtgctttcaggggctgcttccctgcatcaccaccacccctcaccccccaacatcctctgcacagacacgtacatcgtcccccgcgtggacacatacacaatcccaggggtttcctatcaatgtgttcctttttgcttctggctcttattattaataaaatacagaaaagcatggagaattgggaaacaaccccttcttgcactcagtactggcccagctgagcagggaag

SEQ ID NO: 13777 - DNA, 1019 bp, Homo sapiens
gaagttacttaacctctttgaaccattgtcttccatgaagtggagattataatttctgtcttttaacactgttgtgaggattgaaggaatatatgtaagtacatagtcctaacacatcctggaagaatattaatactctattttggtcagaatgtaaactgtggtttggggcaagtgtaatgagaaaatgtaattattttatgtgtaattggagttggtagaaaaatagtgggttgagtatgtggagaagcagttgaaaatgaactggatggatctgagttaatctgataactagtttttgttttctttaggaattgaacaacacatgtgaacccgttgtaacacaaccgaaaccaaaaattgaatcacccaaactggaaagaactccaaatggcccaaatattgataaaaaggaagaagatttagaagacaaaaacaattttggtgctgaacctccacatcagaatggtgaatgttaccctaatgagaaaaattctgttaatatggacttggactagataaccttaaattggcctattccttcaattaataaaatatttttgccatagtatgtgactctacataacatactgaaactatttatattttcttttttaaggatatttagaaattttgtgtattatatggaaaaagaaaaaaagcttaagtctgtagtctttatgatcctaaaagggaaaattgccttggtaactttcagattcctgtggaattgtgaattcatactaagctttctgtgcagtctcaccatttgcatcactgaggatgaaactgacttttgtcttttggagaaaaaaaactgtactgcttgttcaagagggctgtgattaaaatctttaagcatttgttcctgccaaggtagttttcttgcattttgctctccattcagcatgtgtgtgggtgtggatgtttataaacaagactaagtctgacttcataagggctttctaaaaccatttctgtccaagagaaaatgactttttgctttgatattaaaaatt

SEQ ID NO: 13778 - DNA, 1046 bp, Homo sapiens
aattatggtgatctggtaataaccagattgcacttcaaggtaattatttttttgtcctgcttccacagtaggtattggaagctaacttaaatagtgatgttgtgtgccttggaaaatgacagtttgtaatcaaacctttaagattcatggtcagaaggatattgaaaaatttctgttgttaactatgaatcaccgtatgttttgtagaactttattttctgtacaagttacatgtaaataattagcctgctcttggttgtttggtttctcttatattctgagggtagagttttttatcctcaggcaaattacagaatctttcattgggtcaggataggtttctatactatgtaaaagtttccagtttttaatttttctgtcccctcattgatcctgggggctcccaatgtgagctatgggtcctgactctgatttctgaaagctgctctctgttttctactgttaagttgtgtgatgatggtggttatttggaaaaatagatgcttagtttcaacagcacactccttgacttgggatgagcatacacatcaactcttgccgatagtcttagtacctgtctagaacatgacattgggtaggatctcattcatgctccttagttgtaggtaggaccactagtctcaaaccttttggagcatgattactcacccctttggagacggttcctcatccattccatgttgaaatgccattttgtgatgctggttttgtcagtagttggtttaattgggtactatcaggttgtcttgtcttcatttaacttccgtacatgtgctgttatccatttgtttcccaacatctgttgctctccagtgtcttcctaggtgtatgtttgattggattcatttttctttcctgtggctcatgccctcagagcatgcataatgtattgaaggattgtgtgcactagcaggaaaatgatgtggggaggactgtaggctgactgcctagctcatccgtagtgatacagcttatggcacttgataggtgatttctaaggaacactgagatcagtctctggaacg

SEQ ID NO: 13779 - DNA, 1027 bp, Homo sapiens
ggtgaattgtgactaaattctgtgtaacttaatttgaagtaactagtatatgacagagtagatgatgttttattgagttgggagttttttggttttttgaagacatagaccacacattgagaagtcgaatgttgactgacgtttaagaaacttaaaaaacagactgctacaaaaactgtttgaaatagctaccaaatattaaagttttttaaattgtatggcaaaattggctttgatattttagaacttgtttttatttttacatggttttctgtatggtgggaggaaggaagagaagtgtctgtgtagcgtatagtaagagttgttattcatcattagcatgagtgctagttctgtgtggtcaacagaagaattttaggaagctaaagtattacaataattacagtttatttctagggaataactagaaatagcttaagagggaggcagtgtggtgttttagttaagatgtgagaaagtgcgttatctagtgatcactgttacctttctagaacatctaagcaacataaacattctgaaccgtagttttattctcatctagaaaaattctaatgtacagtaatgggttaaatgatgagtgccatatactttctcaatctctttagtaccttttggatatcaggaatgccttgtttctaaatacttcagtgtctatcttagaatcttgaccttagaagaaaaatatgagagagttcagtgtggacagaaagtagttaacctagagtatttcagccctcttccaaagatgggtaaagatcaagcaagcactaatatattagggattgagggctactaaaaaagaaaattaggaaactctagggttcattcttctttttctttaccaaatttttaattaggattgttaatgtgtagcatttattctttactctgagatcttttaaggtataaatagctggatcacagaaagtggggacagagtgagtcttggctgtctataagctgaagtgatgaatcccgaaataactgataattggccattttatgt

SEQ ID NO: 13780 - DNA, 1045 bp, Homo sapiens
caagtcagtgctgtaagaaacctcagcccttgggttgtttttactcttaggaaaattgaaaggctttgccaaaaagtgattttgtaatcttaacaggttgactgaattaaagagcacctcagtgaatagcagaactgaaagggtggtggcatatgttagaattagctctttaagttcctgtagtttttacctatagtttaattatgttgaacattaaatgttgacctagcattataatttcctaatgccagtagaaacttacaactagtttggaagcagatttgatctgctttaatttcaagttttctcttagatttatgtaactttgaatatgtcttatgaaactcctgattaatttttatttcagcttgaacttggttataagaaagactattttgatcctgtaattttgggacagccttttcaaaagtagttactgtttctgaaggttaaggagcttgcagaaaactaaagccctatttctgttttgtgacttggcgaggcacctacttagctggactgttgtgaatttataagtggtttgtgaggaatttctaagtatattttgtgttctagataattcaaaattttttgtttgtttgtaggtcccctccttctttacagatgctgagaggcgatctgtgttagatgctgcacagattgttggcctaaactgtttaagacttatgaatgacatgacagctggtaaggaaaaggcatttgtgtggaagtgaatatactatcagaactaaagatgttctcagtgctattactttcttatagatacagaaacacagcctgttaaaaagtcaagtcagatttgaaaacaaaagtctacctcttaaaatgcttatggttaatgagaaattggtattttatcaaacttatgaatctgctttcattagagaattcttttcatgttttttaatcctttgaaaatgtaggttggatttagctttgtttccttacattgcatttatagttaggaagcaatttttcccacaatcttaaaattctgggcttcaaaactaccttggcttataag

SEQ ID NO: 13781 - DNA, 1035 bp, Homo sapiens
tccatttccatggtggctgagaaggttgtttcacagttgtaagtcactttccatctcttcaaaacagatttgatgtaactgattagtcactcctttccctcgacatttatattctgttttgccatggtacttgttgtgcatcatttttttctttctccggcagaatctcccagatgggaacctctttgtgctctttaaacttcagaggtgtaacttgggttcatttgcttgcgtttgcataaaaacttttgattcctaaagaagccggtggtatatcagaacaaaagtcggtatgacaatgacatttagatttgtacagagttggtgactgaaaggtagagtcacatcctattttttgttagtcgtgtgtagggtcaaattaataataccgttaacatatttaaaacattttcaaagttaatgttcggttcataataactggaacctggagaattcctgagccacgagcagaggtttttggggtagtagaactgccacctaggttggatctcagagcagcaattaagtggaagccccctttgagtatctgatgaaagctatagaccttaaaattgtgctatgcttgttccctatcccctaatgggtaggacatttatgttagtatttttctcttatcagtttaaaatatcaacctttatgctttttaattttttggaatatatttttttctaggtcagtcatatcatttggatcaaaaaatagaacaatcggagttgcagccaaaaatcaggtatgttctttaagagaattcggatcactttttaaggggggagtttttaaaaggaaaatctcaagagacatataagagggtaaagtgtgcctaagtttatgtatttttgagttttaaaaatgtaattcaagtattctttatgaaccttcagatgatgacactctttcctttctgttccctttcccttgttttattaagatcgactttaactttctaatctgccatccttaactttttttttttttttttttttttttgagatagagtctcgctctgttacccag

SEQ ID NO: 13782 - DNA, 1013 bp, Homo sapiens
agtaattctttgaaatctgtggaggtctagctttatggcctagttaatttctatagatattatatgtgagcatgaaaagaatgtgttttcaccaattgttggatgtggtgttccatattagtgcactcaatcattattatgctagttaaacttctgtgtctttgtctcattgttctatcaattactgagaaaggtgttttaatctctgagaaagatggtgaatttatcactttgtctatatatggccacttagtttaaaaaaatttttttccacttccaatcatttgcaattacattaagtaaattacatttttggagaattttccagttcttctaactcaactgtttgttttaagtaaatcataagtatcacattgccacattctactcttgaattgcatcgtgggagtctcagtgaaatttataagattgcttttgttgttgttaatacataataaaaataagagctgccatttatgaagtacccactatgtgtcaagcattgtgctaggtgctttatttataattaaagccctcgtctctaacatgattgggacagaaagctggttagttcattgaaaaaaattgtttaaagaattattatgaaatgatacatactttaaacattttatttgaacttaaaatacatgtttttatatgtatttattcagcaatttttatgtataattttgttcagtgcagtttaacttttttcatgcataaaccacatctgtaatgtgtagtcaagaatttctagtttctgttgatataaattggaagtagaacccaaagaaatattcaaagcaatatgagtgcataatcataggtctttattattttcaaccaaattttatagttatgctgcctatttaacagctgtttagcacttcatgtttagtgagacaaactacataattatagtaaaaactattattggcataaacagacttgcgaataaacccatctgactccttataaatatacagttctaaacagtgacagcaaaagggtgc

SEQ ID NO: 13783 - DNA, 1035 bp, Homo sapiens
tgccactgcactccagcctgggcgacagagtcagactgcatctcaaaaaataaataaataataaataattacttcaagatatgaaaacattgataactagatttccttcacatatttatcttggcatgtagagtacatatggcctatgttaccttttcaataatatcataacgttcttttttattttttttttgagacaaagttttgctcttgttgtccaggctgaagtgcagtggcatgatcttggctcactgcaacctctgcctcctgagttcaagtgattctcctgcctcagcctcctgagtagctgggattataggcacccgccatcattcccaactaatttcttttttgtattgttagtagagatagcgtttcaccatgttggccaggctggtctcaaactcctgacctcaggtgatccatccacttcggcttcccaaagtgctgagattacaggtgtaagccactgtgcctggccaataatatcataccatttttctaccctttgaattctgtcttgtacagttgtactcgcttttttgtacttccgaaatcacccattatattcattctcagttaaatctctatacacaacacagagaattctcagaccttctgtggcaaaatattccagatgggttaatgtctcctgaacaaatagagaatcttctgaaagtctctcataaatcactctatcagcccctttgcagtagagccagagccgtcccataagggttcagacaattagagacattctttttctattactagagaactccaggacattaagaatttcaaaagcatttttctcccgtagcttctgtggtgacagagtatggtgttcttgtataaagaacaagccatattcttttgctcctttcactaaagctgctttggctggggaggaagcctggtagattatattatttccatctctcaggaataacagtgtggcacacagataacagggtaagaaattgcgttatatagttttttgtgggatgaccattctcaaagttctccaataatttg

SEQ ID NO: 13784 - DNA, 1049 bp, Homo sapiens
ttctgaacatcttttaaaatctagtttacctccttttccaactgttcttcatttacttcaggaactcttctgatttcctttttgtgtgggtaaaaagtaaatgactttaatcttatttgacaagaataataatcatgttataccattttcagtaacaaacaaaataacaaggaaggtgagaataaaggaaggaaagaaaacaaatgacatatttctagtgaaattttttgaggttagcctgtgactataataaaattattttgtagcagtgtaccaagatgtcagtttgcacagctctgtagaaaacaactattttgtaagttgaaaattttctgcattctaagtattctttataaatgtgttcttatgcttttaattttatggctaaaggctattcattttgtggcaataatttagttatgaggttatctaagtagaaataattcaacatattctaacagtatttcatatacttaagatgaaggcaagattgtattttctagctattttttaaaaagaattacagccgggcatggtggctcacacctgttttcccagcactttgggagactgaggcttgcggatcacttgaggtcaggagttcgagaacagcctggccaacatggtgaaaccccatctctaccaaaaatacaaaaattagctgggcgtggtggcgctgtgccagtaatcccagctacttgggaggctgaggcaggaggatcctttgaacccgggaggcggaggttgcagtgagccgagatcacgtcattgcactccagtctgggcaatgagagtggaactgtgtctcaaaaaaagaaaaaaaaacctaccctagatccatttttaagaagcaaatgactttattaaagatgaaaaacctttagctatattttttcaagtttatgtttgcagttaaatgcaactaatagcacatgatactgtttttcttatttttaatttattttttatgtatttattttttgagtcagggtctttctctgtcacccagcctgcagtgcagtggcatgatctcggctcgctgcagcctt

SEQ ID NO: 13785 - DNA, 1063 bp, Homo sapiens
gcaagcatttaacttttgatcagtttttccttaaaatactttacttggcttccttgacatcatggtttttgttcagatctctgtggttatttctgtctcctttgctgccttctcctcttggtccttgaattttagaattcttcaaatttcagttctagacaatcttctgttcttactcttagctttccctatgtggtctcatcatttctcatgtggacatagtagtctccccacttttatttttgccaccttacaattttatccacagagcagctagagtagtctataaattctttttaaaatacgtaaaatcactcactgcttagacactacataatctagtccttggctgcttctctgaccctgtcttataccagtctgcatttactacagtccatctatactggcctctttgaactgttcttcagatatgataagcttgtccttgctaaaagctctaactgttatttctgcttggaatgctcttctcgtctactcttcctatgcctagcattttcttaatgtttaggtctcacctgagatgtcactttcactgtagtactagtagttgatgttactactgattcgttggcagtattcctgaaatagaatataggataaatgaggacatgtttattttgttcacagctgtgtccacaaaatctaaacagtgcctgtagtactgtaggagctcattaagtagtcggctgattgatttttgtacctaatggttctattaacaatattgacccccaaatgtattttcttcataaccttctcctctgaactccagtctgtatatttaactgtctacctgacatttccacttctaagcttaaaagctcctccaattgaacctgtgatctctttaaatctgggactccaggatttcctgccacagtgaatggatttaccttttatctatctctgtaagctagaaagttgagagtcttcttcaatgccttctttccccctcatattcaatccatcaaatggattctatggactttgccacctgaatatctcttgaatctgttcctacattttaaactaccatcatttg

SEQ ID NO: 13786 - DNA, 1090 bp, Homo sapiens
aggttaaaaagaaattccagtgaagagttgattccatctttatggtatctttattttttaaggttataaggtatgttgatttatcaggaaagttaaatgaagaaatcttcaagaggccatttataattctgtttttaaaagtcaaaattgaaaagagttgggccaggtgcagtggctcacgcctgtaatcccagcattttcggaggccgggtgggtagatcacctgaggtgaggcgttggagaccagcctggccaacgtggtgaaaccctgtctttactaaagatacaaaaattagctgggcgtggtggcatgtgcctgtaatcctagctactcaggaggctgaggtaggagaatcgcttgaacctgggtggcagaggttgcagtgagccaagatggtgccatgcactccagcctgagcaacagagtgagactccatctcaaaaaaaaaaaaaaaaaaaattgatagagtttatactatttaatgtttaaatgttttctgtaaattaaacatcaatagacttgataatcatattttaggaacatttttttccattgaattatttacatatactgttgtactgtaaggctttaaattaattttaatattttattattttaattagcatttgaaatgtatagtgttcaataaatggattgctaaattatgttaagttggatttttttaaccctaattaattttcaggcagtatttcctaaaataagtcaatactacttgtaagtggttttacttacttttcttttatgtccacttgttacgtaagtatgttagtagtagacatcatggaaattacataaattttccgaatatttgaagaattaaaggagctttttctctataataggaactttttattcttttatggaattttaaattaattttctgaaagaacagtaaaagagacagttacttaagtttgctttgtaaataacttaaattttacaaggaaaatcttgaagtacagaattcttactgttgggtatttgctttattttgttttagtcaacttaaaaaaattgaagaactgggtcttgtttggtttctcttaattccttaagagtagtttgtgt

SEQ ID NO: 13787 - DNA, 1695 bp, Homo sapiens
ggccttttttttttttttgagacagagtctcactctttgctcaggctgtagtgctgcggcgtcatcttggctcacagcaacctccacttcataaggttcaagtgattctcgtgcctcagcctcccaagtagctgggactacaggcgcataccaccacacctggctaatttttttatttttaatagagatgaggttttgccattttggccagggtggtcttgaattcctgacctctggtgatccacctgctttggcctcccaaagtgctgggattataggtgtgagctaccacacccagccttgtgacagtgattcttatctcatagtgcaaaagatggcatttggatgggagataatagttcagaaaagttccattctacagcaactcacaatttgaggaccatagttctaagaaatatccacaaagtcagttgaactatgatttttagctacttggcatataaagttttgctggtaagtaatgacttaaatccataacttttcaaaaacataagccttacttcaaaagcattatttgtacattgtagaaaattagaaaatacagataatcatctgcggtaactttcccaaaaaagagaaaatacagataaaatattaaatgaaaatattcttaccacctacaggcgaccaattttaatatctccataagtcttccccagctctatcttttgacttaaataggatcatatttaactattgtcttgtaacttgccattttcatttaataacctccatccttccgtgtcaaaataatttttcacctcttctcttacttagtctatattcagatgtaaattgttcatctcttatatttcccataagtgaaagttagtcctagacttgaagcctttattagctgtaagttcagcaaaatgcctttcagagccagtttgtcaaagccagcatccagtctggagaatgcacctggcatatggttgtgtcctttaattccctttcaatctagtggagttctttttttcatgatactgactgaagagattgcacagttttggttttaagtacagagacgtagtacatttcttaataataaatgtttaacttttgtgtgttttaacctaatttgtttttttatttttaaatttatattttatttcagcaaaacaagctatcgatcagggaagatctccagttataatagataacactaatatacaagcttgggaaatgaagccatatgtggaagtggtaaatatgaaacatgagaaagtttttattttttattcttgtcaattttttcacattctaaaattttggctggttggatcttgattattaaaacatttgtcctttgttttctaaagaggtttgttggtttgcttagtttttaaaaaaattgtgaatgatgttttttaaggaacatgttcatcttgttaatttttgtttgtttttttgagacggagtctcgctctgtcacccaggctggagtgcagtggcaccatcttggctcactgcaagctccgcctccccagttgaagcgattctcctgcctcagccacctgagtagctgagattataggtgcctgcccccatgcccagctaatttttgtatttttagtagagacagggtttcaccatgttggccaggctggtctcgaactcctgagctcagcccatctgccgtgctcagcctcccaaagtgctgggattacaggc

SEQ ID NO: 13788 - DNA, 1028 bp, Homo sapiens
ttttctcattgatattgctctacaagaaacctacttaatacattttttagcggacatgggtcaatttctgtttatcattaataggggttcttaacctgggctacacttttgaatttcttggggactttaaaaaaaagcaaaaaaaaaaaaaaaaaaaaaaaaaaaacagacaaaaagtgtgcctggcctcagccttagatattttggtttcattgatctggggtggggcctaaacattgatactttttgttttgaaatttctccagacgattctgatgtatagtcagaattgaaaactgttgatctgaactataagtaaatacatatgctatgttattttaaaagaatggattgatgattaaacaaatagcttttattatgaaaaattttaaacagattaaagagactgtaatgaacctcatagacccatcacccagaattatcaggtattgagattttggtatatgggcttttatctttttgtttgtacccctttctctttttaaagcaaattctagacatcatactttatacatttcaaaataacttttttactaatcacatctttcacttcagtgccgttatcacacatttaaaaaaatgccagttccttcagatcatgtaacccagtgtgtaattgaatctcctctgttgttcgaaaaaatctcttcacagttattttgtttgaattgggatccaaacgaagtcctcaaaatgcattttgttttatttaattaagttaatccatagcatgttccttcttttaactctcataccattaacttgttgcagaaactatgttgtttgtcctgtagaaagttccacatgctgtagttgtctatttgcttcttggtgttaaccgtttaacttgctcctcttctttgttttctgtgaatggaaattagctctagattagaggcttgattaggttcaacatttttttttttttttttttggcaagcagatatttggttgtcctgttcttagtaatggtgagcttaatcagtagctgcacagggacaacctct

SEQ ID NO: 13789 - DNA, 1028 bp, Homo sapiens
tcttgtaggccttgttttgggaacagattctcttggtttacttgtttcttacgtgagaaattataagtatagagtacattgattactcaaggctgtataacaggttaccctaaaacttagttgtttaaagcaacaaacatatattgcctcgtagtttctgtaggtctggactctggttatagttacctgggtgcctttggttcagtgtctctaagaatgctgtgatcaagatgttggctaggactgtttctggtctgaaggcttgatttgggaaggatctggttctaagagctctctcaagattgttgacaggactgagttccttgtgagctatgttggattgaagacttcagttccttgctggctagagactggaggcttctctcatttctttgctacttggcctctgtccattcacaagacagctgatttctttcaaagtgaaagagaaagcatgcaagctcaagtctaagacagaagctacttttttttttttttttttagtaatctccgaagtgacatcccatcacctgtatcatattctgttccttagaagctagggactaaatccaagcatactgcaggataagaggatgcaaggttgtgagtaccaggaggcagggatcattggaggcctttggttttggggtcaaggaggtgctttatcttagttctcccactaccatctaacttgccaaaattatttcttctcctggattagtttattatcaaattggcaggcttttatgaggattaaatgaggtcatagatttatgtaaaatgtttgacataaaataggctctcaaaaagatagctattgttttgaaaaaatagaaatcaagtggccaatgagcccagatttgatttttttaaattagatatttgacttactcacatttctaaattttgacattctgagaatccattttagtacctgacttgagagttctgacagtctaagaattttgaaaatactgatgttcttaaataatttatttttgctttagaggcttgataagacattcaga

SEQ ID NO: 13790 - DNA, 1057 bp, Homo sapiens
ctgaattggtgttagaactgttggtggtttattgtattacaagatatttcaaattcctttttttgtttacatttttaaactattgatgcacttgaatatgtttatgcagttgtgaaaaaatagtgtaaagaaagcagtacaaattatcttgagtttatataagatgattcaagatttgtgccggacaaggagaaaaagaaaatttgttgatatctttgggtgaggatggagaggtccaagaaaccattttgcaaatgttttatattactaacaagacaatctaaacctaaataaacatctttttcagagaaaagacactagagaaagatttaatttgtgatatttcaagctagattataaactgtgatctttgtgaatgaattaattcattccagaattaaattttggtctttgtattttgattccttttactttagtgaggattttgtagagaagatgaaatttcacctctataataatagaagttaggagtgaggtctcacaaacatgggctgtcttctagatttgggatataccatcagagacaataaataactgaaatttggaaactggataaaagagtctgctagttaggaccacttgactaagagtgggtatagaagaaacctaaggaagaaaagttagatttgagacaacatattggagtatgttgaaattaaaggtgaataaagtagtggaaattcgatagaatttaaaggagacattgtagtgggagatggtagaggtgattagatataatatgtatatttatttgaaaaatagatatataagaatgaaagttgtatgtagtaccaacaagtaccattcgtattatgattcacaatttacagagtattttcatatataaaaatcttgtgcaatgggttgttttttcattttatagaaggagcagaggctaaaggaagttgaggttaagtgatttggaagttacaaaaactagtaagagctcaaactagcaataaaattatagtatgtttttcccttgccttcactgtaatgcttaatggttgtgtagtcttatacgtgactcctgact

SEQ ID NO: 13791 - DNA, 1063 bp, Homo sapiens
gtgttggatgggtaatgaaaatatttgagtcctacccatctggaggagggagaaggatagaagagtcaaagacaaccataaggctttaaggcctgatgattgaaagaatgtggaaattggaggggagaagggttcagaatccacaggaatctgaatttgaggtgccaggatcccccatatgattgcaaattatccacacttagaaattcagacctagaatcatccccttagagccaggaaaggggcaggacccgcagcagcatggtatgtaacagaaagctaaaagagcataggatccaaaacaaatgctgaatttaggtatttgaagcgtttttagtaaataataataataataatggacaggaagtattttctgatggataaaagaacaagcggatagaaagggaactgagacaacatatagagatgacaggcgactcttcaaaaatgatggctgggaaaaaatgttggcatggaaaagaagcttagtaatctaaagttaaacaatgtatacacactggacaccttacctagagcagcatatttaaaacaattctgcagctcaagcaaaacttgttacacctctcacaagcttcagatcattagtaccatctgtttctcctccaccctaagcgagagtaagaaaatgggttcactctaattttaacaaaacggctcttctctgtaaaccccaggtatatcttgtgccagtacacaatggacatggtgggagtggagacgggtttcagaccactgaaggcatgctcaggcttttctaggaacttggatttgctaatcagggccatagtgtggtcagccctggcatgtgacgtcatgcctcctgcatgagactgcaggcgaatccagcatcgatagccccccaggaccacaaagcctggggccagccaggaccccctcagaaggtcacacctcagcccttctggaacagccagctctgagtttgtttttatcatgcactcctgccagtagcaaatatctgaatgtgtatttatgtttagtaatataaatatactggatgtactctaatgtactatgcacatta

SEQ ID NO: 13792 - DNA, 1027 bp, Homo sapiens
caagcacggctggacatggtgcgtagcacattcacctaggaggggatccttggctctagagctaagtgtgtgattgcagaagcttccatgtttactttgtgatatctgaaaaacccattcattgccttcactgatgatctcctggacataaggcatgagctctgccgtagcctcgatgcagtggaccctacaggaaacattgctctatttgtagttctcagttggtttccagggaaggcagtcaggctccaagaaaggaaaaagagacaagtaaagggtgattaattgtgaacagaggaaataaaaataaacttgccataaaataatcctggcagtttgcacagaaacagctgtcacttgtaccttctggcctgatgcaaagcttaccacttagagcattgattcattcaaagagcatttaattcttcaaatacatttctgcttttatttcattggcaaatagaaacaagaatatgcagtaaaccttgtaataaggaattgacagaagcatgttagaacttgaatgtggacctattgtagatgatttggtgggtttgaaaaaatacaaaatgtgtcagtaattgttctatgttttatattatacatatttaaaaaatcaatggtgcttttatgaaatattttagaaggttataaattcatggtcaaatcaatatatgcttctgtattaaaatgtcctttgaaaactacaactggctctagaaaagtaagatagagccaagaaatattgttcttcttttctcccttccttttcctccaaccccagccagatttcttcttcctcttgtaatttttaatttgttttgttttgttggggacttttaagtgttcagcacttgagaaataagtctatcacagttaaattggaaagttgtccacttgacctgaaaacagagctacaaatacattctgggaacgtgactcatgctgtttagtagctagagatagcaagcaggcaagggccacacagagcacagcagtgtcctgtgattaatgcagagagaatgtt

SEQ ID NO: 13793 - DNA, 1060 bp, Homo sapiens
tttccactaggaagtgggttcttgcactaacctgtttggccctatttgtattgcttttagcttcctgcaagtaatcatgtctgttctctggctagctgtctgcctcactagtctatagagtttggggacaggcttgaggtatagtcaggaacagacataataggttcaaagataggggattttgctagtatatattattttgtataaaaaatgattttatatatatttttaatggcctcttttgtgatctttttcaaccaggtactcaggatgacttttatatgcctaagctttcaggaagaatgtgtaagaagatacaaaatcagggaggagattgaggggaagagagagactttatattcttgttattcacttctctatgtatatttcaggtgtttgtattgcattattaaaaacattagcaatgttttaaaaaatgccttgccttgcagatgctaatggctaacatttagtgagtgttcattatgcatgaagttgtgtgctaagctctttacattgatctcacttaattttcataacagcctatgaataacaggtgttgttcagaattgagggtgagctgagtcctcctggtttgagcagctgggtggcagagatacccttccctgaggtggggaacaaccatgaaggaggagcgagtcaggagggaagatagggtgggctgaggtgttgggtgggtgaggtgccaatgtccagtgttcagtagggtgcccggcccggagctggggatggagatgtgaagtcaccagcatgtgaggaggaaggccctgagagtgcatgaggtcactcagggacagctgggacagtgaggagaggactaagagtggatgccggggaatcctctctacgggcaggcaggggaaggggaaggaaagaagccccaagtgaaaagaagccccaaggaaagaagccccaggggaaggggaaggaaagaagcctcagtgtgagtgaggggtgggctcctgagcagccggttcccgcgcggctgctttgctcagccttcagttcttgaccctctctcagaaatcgctagtcatga

SEQ ID NO: 13794 - DNA, 1023 bp, Homo sapiens
aagtacatagaccgaaacacctggagaagtatttatgtcctaacaacttagcagctatttttaaaaacacccttaaattgaaagaaaaataatattttatttcattaataataaccacaattacttaataatgagatgtctgcactggctggacactgcacagtttctcaaacctgggaatcagatgggttattgccagccttattttctgttccacattgattttcacatagcacctgctttttatcacagcatctgccaaaaatccagctagatatggcctcatggaaaggaatgttgttgacaggacctcatgttgaaagcaggaactactttggactagtagtttgctcagtgtctgacagatgtccagtgttgcttgtgagcctctcaagaatttaaaaaatatcccaagcctcctgtgtgagtttgctacagtgccccagagtgccctggtgcacatttggggaactggggactcaagcattcctgatgctagtttgaagacgccactttgaaaaccactgtactaatggcttcaagagaccagaggaaggagttttctgaacatttttacattttctgtgataatacataagatccttaaaatattgaacaggaagaaatgcagataaaaacatacaaattcaccactaatgactttttatttctatagcagaagaactggatatggaagaaatcagagaaggaataaagatatcagaaggagttgtatgccatcattgttatgaatagtttacaaagcaattttttacaaccttctaaagtcataactaattaaacctggcaatcccagtgagccaggtaacaattattttccatgctttacacacaggaaactgatatataagattaggtgacttgcctcaggccaaagagaggtagatttgttggaggcagaatgctaaaatcacagtatttttgctttcatcaaaaaaagttataagaaactagactaacatttcataacattaaaaaagtccctcaaacttcatagttaat

SEQ ID NO: 13795 - DNA, 1048 bp, Homo sapiens
ctttttaattaaattttattttccatttatacatacatgactgaaattgcctagaaaaatacctttgattcagaactaaaactgctttatcatagcttttgttgtagtttaacattaataaaaatgcagtttttattaatacaaaaactgcattaatatcaattacggttttattctattgtgttgaatacccaagttatttcttagctagattttaaacattcactaggttccttttactcattccattgtttctatctttattgacctccattagtgctaagaattaacttagatctactttctatgaatagaggtctgttttgacacttaatagattgtagaaatcaatggccctgaaatagtttacaaaacaatttcatacctgtaagctcatggaatcctcacaacaaattcagaaatatgacagaacacagtttactcatttataatacaatcttaataatggcaccctacacaagatatccaacttgggaagtgataaatgaaagtatctctgtttgcagatgacatgatcttatatgtagaaaacaataaagactccaccaaaaaatggttagaactaataagcaaattcagcaaagctgcatgatacaaaaccaacatgcgaacatcagttgcattgctatacatgaacaattatcaatctgaaaatgaaattaagaaaacaatactacttatagtactatcaaaaggaaataaggatacttaaggataaacttaaggatccttaaggataaaatacttaaggataaacttaaggatccttaaggataaaatacttaaggataaacttaaggatccttaaggataaaatacttaaggataaacttaaggatacttaaggataaaatacttaaggataaacttagggatccttaaggataagatacttaaggataaacttaaccaaaaggcaaaagacttgtacattgaaaactgcagacattgctgaaagaaattaaagatacaagtaaatggaaggaaatctcataccatggattagaagacaagattgttaaaatgt

SEQ ID NO: 13796 - DNA, 1050 bp, Homo sapiens
tcaatagaattaataaaatttttaaaaagatgttgataggggtatgaaacctattgaaatatgaaacttaaatttaagcaggtgtgattgttgaaacaaatggctggttttagaagatgcttgtctgttcctagacatacagacttagacaaagatacagccctgagaagctcaggtggactagagatgtgtgtgtgcctgtctggggtacattaggtgcatagaaagtgaatgaataggtaacgttctagccaaccctgacttgatggtagtgctttcctcttttgtgaagcaacacagccacttattcatcttaagtcacttctccttacctctctttgatgcgcatgtcttaaattataaccctgggatttattatcttttgcttcaagagacagacaaagcatttatgtctatgaacacagtgcagttgcccttctacccacacactaaaaaatgaattaaaaaattgccaagcttgagcttattcattacaatgtttctctggataacaggcccaccccatcccttcctgcacccttcaaatatccttacttgtacggtgaataaaatgtaattttattgtccttaggctatatcattcttctgctcacagtaaccatgggcatgcatttaaaagtagaatctggcctcttgagtttaccagttaatttaatcaactccctataaattactttacaaaaaaggttgggggagaatgaaagaaaagaaaatctattttagaaacaaaaatgtatctgtgcagctttgttttctcatggaagacaaaggttctttccaataggacagaatgacagttccacttatcttggctgcacagaaattagatcagtaacatattttctgttgaagaagaaaccttatcttagtggctccatttcagaatcaatcatctgcatttcagtcctgccccttctcacaagcagggaacattatacaatttgtatgtttcaattagtttgccataaaaaataagtagctcaagggcattagtttattactggtatccagccatgttttcttttgcta

SEQ ID NO: 13797 - DNA, 1044 bp, Homo sapiens
caggcagttaaataggattaggatgattttcaggctcttcttccaaaatgctctcccctttccaatttccggagtgccttttcggtgccgtgtttttccttccctgtctctcctgtgtaatagtgaaaagagtgaaaatagcatcagcttggagatgcacaaaggctctgcacttgcttgctttgtgacttctgtgaatcttagcctcctttccatccaatcagatacctccagtgatagctgtggagattaatgttaaaaaacctaaaatgtgaagccatgaaggcttcagacctggcacatagtaggtgctcaatgctgttcccttctctcctctttcctttcccttctcttttgctgtctttggttctcagtaaccatctgtttatctcactcctgaaatagtcttactgaagatcacaattgatgagcagattaggagggaagaaaagtaggtgaaaactgaacacaagtgccatctgttttcctcatttttaaaggaattagagaggaagagatatggtgtcagtcctggaagatgcttgtgatttgggcactctctccctctttgattccataggacttcatgcactcactggagaagaggaccagctctctcagttgcctgtaaaggaaaagccagagagagaactagccacttcttgattctaatacaacagacctgtctaccccagtggtaattcttctaacacggggactatatgatcacaaaaaagaatttatttaaaaaatacaagtttcatagcaatggcaatactttagcataaaacaaggtactaatgacatgctaatgagaaaataatgttacatatttgctttaaatatagtaccttggaaatacaaaatgacaaaaacatggtgagcaggtacatgaatttatagatactacttgaactatgaaataaaactttagcggccctgtatatgcatacagaaaaccaaatgttgatatgtgatccttcctagagccccttattaaaatgctggctgattttttgaaaaaatgaggcttcattctaagtt

SEQ ID NO: 13798 - DNA, 1114 bp, Homo sapiens
gctccccaaataccttactgcttacttgccaaatggatggcaaggcctgcctgcaggtttccatagaaccctgtgctttaatatgtcttaagacttacagagggtattataattgctgttatttcttgtctactccatgcagggagagtctatgccctttgtttctttatgctcagtatttagtatagttcatagcacatagtaggtacttgctaataataaacaaatcttgattcagaaggtatatgcttattctgtataaagtgtcctgctagttaccgtggaggacacggagatgtaaaagatatgaggctctacctaatccaagatttatctccagccttatatggaacacttctgcttaactcattctggatctttatctgtcagttcttcgtgtgcttagtgacggcagtaaagtaagtgctcattaaatgtatggtgaaggaatgaagaaatgtacctacctggcagtcttgattaatttgacatcaaaagcttgggactgctgtggctcatgcctataatcccagtactttgggaggctggggcaagaagatcacttgaagccaggtgttcaagactagcctgggcaacataatgagacctcatctctacaacaacaacaaaagcttggggctaatatctctcactgtatgaatgaaatcctccaacctctcacaggctgtttcctcagccagttgtgttcaacactcttaatatttaactgcagcatagatccctgaagcaggtactaacattatggattttgttcaccattgcattctcagcctcaaacccatggtagatgatcagtaaatctttgtcagatgaatgaagttgttaatgtttcctttttagcctatatagaggagatgctaaaagtaaacaaataactatgatggaaaataaagagttaaagagaagtaaaacaaagtgttttagggggttcacttgtgggcaaggcaatgtctcgtgggggtacaatatacttgtaaataaaatgtatcaatttttatattatttagggtagatcttagaatgtcagaaggtgtggctatcagggaggacattaacttatatatttttaaaactcatgcattaaagttacaga

SEQ ID NO: 13799 - DNA, 1052 bp, Homo sapiens
gcaccaatgcaagctagtactggggaaggaacccagctgtggtgttctaacagacatgggtttgaattctggctctactgcttagttttctggtcatttctttgtctgtagcatagggataataatactgatctcattaggtgctcggttgtgttattggttgttataagaattaaatgagacattggtttcattcacttatcaaatatttatgaaatgtctgctatatgcataaaaatacttaacaaagagcctagaatatggtatttaatcgcagttgcaattattttggcttttcttccatgtcttgattcagataactggccttctgctataatcccttatgccaaagtccttatcctgataacacatctaagcatttcgtcattgcccatgacattcctaccaccgtggctgtagtcctgctccaaatcactattggtgcccaggagtaactgttgactcttgcctgctttgtctgttgcccttgagttagccatcactgggttttgcccactatggagtttctctgatgccactatctctgctggactttgggtacctatccagttcttatccctcagcttgggcttggcctgacagctaccataattagatttgctcttatctcattccttggagaggggtctctctccaggtgccagcccttaccggtattcctcctaatgtcacagttaactatgccacatctagctctaaggattcacgcactgatggcagggttgacttactgatggcagttacagatggcatgtgaccacagccatgtgtgtgatggagatacatggaaaaggatgaaagtacctaactatcatatcaaaaatataattatagaaaagatggagattagcccaaagaaggtcagagagtattttaagggggtgcaacatggtatctgtaaatgcttgggaaaagacgatgatgagttgttttgctaggcaaaagtaagaggtttcaaaaaaggtcaggtagctatgaagtcagtcagctaaggagagtttaatgattgccctagagtaagaggacttgga

SEQ ID NO: 13800 - DNA, 1047 bp, Homo sapiens
attgcctttttttttttttccctgagacggagtctctctgttgctctggctggagtgcagtggcatgatctcagctgactgcaacctccgtctcccaggttcaagcgattctcgtgcctcagccttctgagtagctgggattacaaacacctaccaccatgtctggctaatttttgtatttttagtagagacggggtttcaccatgttggtcaggcaggtctcaaactcctgacctcaggtgatccaccggccttggcctcctaaagtgctggggttacctcaggtaagccaccacacctggcctatttattattattattcattaatagaaattacagaaatcaggtttactaggtggagggaatgctgtctacaaaagaacaaagggggcgacaaatctgtctcagaaatattcagtcagttttaagcaataataatgttatttctagcaaatacaatacattcaatgttattttaaacatacaatattgaatgatctccataaagttgactgtgtgacttataatagtctctgaaatctagaaattattaatatacatccagaactcatggctaaccttcaatgatatgttaatagtgaaagaacgagcttgtgtttacttgcatagagggagggtatgacaacttctactgaaaatgtgtcaatatagttttccatttagaatggtacacatcggaagttgattttgtttgttttctagagatggggtctccctgtgttgcccaagctggtctcagattcctggcctcaagcagtcctcccctcctcagtatccagtgtagctgggagtaccagtgcaagataccatacctggccaatctttttttattcatttaaaaaatatctgtgggtagaaatatgatttagagaaatatacataaggtatataatctaagtatattttgaaaaattgcaggttctgaaaaaatcatctgagtacacctgagaggaggactgaaaacataggagtcatcttcagaagaatttcaaatgccattttccatgctagttagctagctagcta

SEQ ID NO: 13801 - DNA, 1029 bp, Homo sapiens
tgggaacaagcatcaatcttagaatagatccttcatgttctgctagttggcattactacctggccaaaggggaggaagattctggaaagcaaaggaaaaagggcctggaggggcagcccatccccagccagtctctcctgagcctgtaggctgccaaatccctcagtcccaagggccaaggctgccaaggacctctcctttcagtaacatcaaaaatgagatgacatcaggttaccctttactagtgcctagagagttgtcaattacctttcagtcacttaccctttgctaattgcaaaataaacagactccgcagcctgccttcaatgacagcctcgtctcctgtcctaatatttatatcttagcctcttattaattgcatttcattgatcatttcctgaatactcttcttcccttttgcattttcagtactccaattttttttttttgtttgtttgtttttcaaagagcaggcatcagagtcagattttctaaagggcctgccagtgccacacctgctattgttgatcctcataccctgtagatccctaaggatggctaatccccttcacaggaggcattgtttccagggagaatgggcttattggctttccacacctctgttagaaacaacagtggagaaggatgatgtggaagggaagtgagctggtagcaggtctaaatgcatccataatcagaaagatttccagatttccctaattgctgtttttattcacagaacttctattttaagcgcacacactcacatgtggattgacaggcaccagccactgtaatggctgtgtctgtctgtagcgactgcaaacgcttgtttccatggtgacgggaggcaccacagagacacaattatggtgctgctgggaccagggcactgccacaccaggaggcctctcaagtgtgtgtgtgtgtgtgtgtgtgtgtgcatgcgcacgctgggggcacagggttgctgtcgagtgcggagtgtgaaaaagccaagcggggaaggggttggggagataggcagag

SEQ ID NO: 13802 - DNA, 1036 bp, Homo sapiens
caggatgggtcatttcatgtttctgtgctccacaatgcttgactctaagagatactcagaaattgattaccaaacgaatacctaacactatctcctaactctttgttaattacaacataagcgaaaagatcacagactcctttgcaagggtttatttttccttttagcaatacctgtgcttgaagataaatgccctgttttgttgtgtactttgcagtccacctgtgtagacatgtaaacagtctctatcatgtagagtgtttaaacagctgtccgggcacttctcaaaagaagacattcatgcagccagcaaacatgaaaaaaagctcatcatcactggtcattagagaaatgcagatcaaaaccacaatgagataccatcccatgccagttggaatggcgatcgatcattaaaaagtcaggaaacaacagatgctggagaggatgtggagaaatagcttttacactgttaatgggagtgtaaattacttcaaccattgtggaagacagtgtggcgattcctcaagggtctagaaccagaaataccatttgactcagcaatcccattactgggtgtatacccaaaggattataaatcattctactataaagatgcatgcacacgtatgtttattgcagcactattcgcaatagcaaagacttggaaccaacccaaattcccatcaatgatagactagataaagaaaatgtggcacatatacaccatggaatactgtgcagccataaaaaagagtgagttcatgtcctttgcagggacctagatgaagctggaaaccatcattctcagcaaactaacacaagagcagaaaaccaaacaccgcatgttctcactcataagtgggagttgaacaatgagaatacatggacacagggaggggaacatcacacaccagggccttttaggggcaggggcgaggggagggagagcattaggacaaatacctaatgcatgtggggcttaaaacctagatgacgggttgatgggtgcagcaaaccaccatggcacatgtatacc

SEQ ID NO: 13803 - DNA, 1085 bp, Homo sapiens
ggtacatgtgcaggatgtgcaggtttgttacataggtaaacatgtgccatggtggtttgctgcacctatcaacccatcacctaggtattaagtccagcatgcattagctatttttcctaatgctctccactcccccaccctaccccctgacaggccccagtgtgtgttgttcccctctctgtgtccatgtgttctcaatgttcaggccccacttataagtgagaacatggggtgtttggttttctgttcctgcattagtttactgagggaaatggctttcagctccatccatatccctgcaaaggatatgatctctttcctttttgtggctgcatattattccatggtgtatatgtaccacatttcctttatccaatctatcattgatgggcatttgggttgattccatgtctttgctattgtgaatagtgctgcttaatgtatacttttatatacattatgtatgtatactaatgtatattaaaagtatacgttctgaggatttccccagaaatttggtaggtctggagtaaggcctggacatttgtatttttttggcagacctcacaataggctctattacagagcacaacttaagatcaacagatataggggatgtatatccctcagagaaagatgtggaatacagccttgcttgtgataagttactgtaatggctcttatcaacaagccccaccatatccctgtagtcaattgtattgcaaagtggaagtcctattccttgactcattcagagtcataaaagtgatgacccctatttttctctttctctagttttcctatcagtaccctcccccttgtcctccactacacccaggcagcttggatccttcagggaaatctctcaccagtgcatatgcttagtcagtcagatggatcctgttcctaaagctaacaagactagctggtggtgaaaagaatgggggagaaggtgtagaaacagagaaacattatttaggaaaatacttaatctcatctcaaacattctctggaagactcttgatcaatttgtagaaaaccaattcacaggaagccaatttgccgaaatccaaatccttgaatat

SEQ ID NO: 13804 - DNA, 1105 bp, Homo sapiens
ggggtacttgcccctcctctagaaaagcaggacttgctgctaagagtgaaggagaaggggttgaggggtacttgcccctcccccagaaaagcagagaaggggtagagacaaggagaggaggggttggggtacttgccccttccccagaaaagcgggacttgccgctaagggtgaaggaccaaggcaggcatccctgcgtggtctaacacctttgaaacgtgggtgaataatcagagaggcatccctgcaatgattaaaggtcaagggaaggctgccttcccagtctgtgactggcaccggagttttgggtccacggataaaacgtgtctcctttgtctctcccagaaaatgaaaggaattgaaattaagagaagggagagattgaagtgtggcaccaagattgaaaggagaaagaggtcgagggatagtgagggaggttggagaagagagtaaaaagaggccgcttaccggatttgaaattggtgagatgtttcttgggctggtcggtcttaggacctgaggttgtaggtggatctttctcacggagcaaagaacatgacaggggattgatctcctaagggaggtcccctgatccgagtcacggcaccaaatttcatgcgcgtctgtgtgaagagaccaccaaacaggctttgtgtgagcaacaaggctgtttatttcacctgggtgcaggcaggctgagtctgaaaagagtcagcaaagggagataagggtggggccgttttataggatttgggtaggtaaaggaaaattacagtcaaagggggtttgttctctgtcaggtaggagtgggggtcgcaaggtgctcagtgggggtgctttttgagccaggatgagccaggaaaaggactttcacaaggtaatgtcatcacttaaggcaaggagtggccatttacacttcttttgtggtagaatgtcatcagttaaggtggggcagggcatattcacttttgtgattcttcagttacttcaggccatctgggcgtatatgtgcaagtcacaggggatgcgatggcttggcttgggctcagaggcctgacactgtgattacaggcgtgagccactgcacctggtcagtgacttctgt

SEQ ID NO: 13805 - DNA, 1024 bp, Homo sapiens
cgagcccatggtccagaacagttgttctcaacccagggtagttttgcctccccagagaacatttgacaatgtctggaggcatttttggttgtcatactggaagttgattgctactggcatagtggatagaggccacggatgctgccacacattttcacaggacagccctcatgaacaaaaaaaaattatcctgcccaaaatctcaactatgccaaggttgagagaccttggtttagaagtcgagactgtggtgataatttaagatgtaattccaacagtccaagcagagaaatttaccagaatgcacttggtctaagagtaaagagtgctacataaagattgatgtcagggcattgctgtggatttagtgaggtactctgaagagagtggtccagtgacagtctcgttttaaaagattggatgtaggtataggaagatgagttcttgaaatgaggactcagtatacgttgaatataacaaaggagtttgcattgaagaaagatcactatttaagcaaaacagatgttttgtccacagtccaaataatgtggtttagtaatagcacagcttatctctattcattttctcttttggtattctctcctgttgattcttatgtagtttttatatgaagtcaacttgaaagttgtttaaagacaattcgaggcttgctagggatgtgtgagggagatactttgagggcattattgaaaggaaatatttgatactggacagaaagaatattgtgaatcctgtagattattttaaggaaggagccttaaggttacaaagagtaggcttattgattggggtttgtagtggcgggtgataaaagctataacagtttctactaatagtgttgcactgtaatgatggaataaaaaatctttgggtccttagcaactggagatggggtagtgaatggcagaaatactgtaccgtggttacattcactcatccattgaaatgacttgtactttaatacaaatttgtccttagtgcatttaattttgtttttaatctt

SEQ ID NO: 13806 - DNA, 1047 bp, Homo sapiens
gcaggcaatcaggtttaaaattttttttctgtgtattattgcattgtatgaatgagtgagcatttgggttgttttaaggatttgctttttgtgaatatagttgctgtgaatattgccatacatgtttttggcatgcacatgcatccatttctcttggttatatacctgcaagtggaattgttgggtcattgagtgggtgtttagctttagtagaaactgccggttttccaaaatgttgtatcatttttcagctttcaccagcaaggtagaagagttccacttgtcttcacttagcactaatcagtcttttaaattttagccatctgttaagtgcctagttggtatcactcgattttagtttcacttttctgagggaatagtatgttgaacaccttttcagatgctttttaaagattttcttctgtgaagtgcctattcatgtatttttctcactaagaaaaatggttgttcctttttcataatctttccagagtcatcttagtgggatttggggaagcaacagggctgtgtggggtaacctgccacctttaagtggaaatcaggtaacaaagtttcattcactttttttttctcatttctgttttccccagtctatgattcaattcattttttattggctggatataatctggatttatattataatgaattttagaatgagactcttgtttcaaccataaggatgtatgataggaaactattataagaaaccagaacaagaaaattatttaatagatgtattctgatttattctcttatgtttttaaattaagatattttggaccaagagttttcatttatttatccattcatcaaatacatgttaagtgctttctttatgacagacctaatagtaggcttaaaggatagtataatagtgaacaaaacagagataagcgaggcacttgtcctcttaaaatatattcaggtaggagatacgaatcataagtaaacaatagctaagcaagataattaaatatgtctccaattttgcagaaatggagcaagagccacaaaatggagaac

SEQ ID NO: 13807 - DNA, 1055 bp, Homo sapiens
agtagctggggtacaggtgcatgccatgatgccctggaaatttttttgtatttttagacggggtttcaccatattggtcaggctggtctcgagctcctgacctcaggtgatctgcccgcctcagcctcacatatttctagaagttttattattcaaatgatatgccttatagactgggtcctaattttcttatttattattgcctatttttcatctctgtctttttgctctgctttctgggcattttctataattgtatgacctcatccttcttgagtttttccttcctgcgttttaaatatttaatttcccggagttccttttgtcactcgaatatccttctttcagtatgcacgcatcccactttttattttatggatgcgatattttctttttctttatgttgatataaatgatagggtttttttttttacgtttcctgcacattgtccatttcaaccaaattacattgctcttcttttaatcctttatactggatgtttgcctcatgttttgtgatcctgggctgtgtgtgtgtctgtgtgtgagtgtgtgcgtgtgagtgaagcactagaaagctgatctgagattctatgggtggaacctatcaactatggcttctgaacggtgaattgcttggacagttttccttagggaactctcactgtcactattctttgtgtctttcttcttggtgatgatcagattcctcaagaagataacttccaatctcctttcttgaggggtacctggcagccaaaactctaattaccaagttgtggggaagaaggctgtgggtctcaataatcaatgtgtaacatttcacttaatccccctgcttttggtttttacccttaatcatgcctgatagtttcttatcctcactttattttacactcttctagatcaaagcactcagtctttcagggctgtagagaaacagcgtcctgattgcttggtgtaggaaagatctgagggtgctaatttgtaaataggctttcaaccagtcctcttttttcagctctttgtctacttcctttccataggaagattga

SEQ ID NO: 13808 - DNA, 1023 bp, Homo sapiens
gacttattgtttgttggtagggaggcttttccatcctggggcagtgtaccatagtaagaataggagtgggtgagaagtatgcctttattttgtaaagtggaagattgtgaaaggatcttggggaataaaaatcagcatgataactggacaatgggcatattctcaggcagatcagtttagtgagaagtactcatgggagtaaaggatctggaagcctttttcttaaaattacacatgtcgttggtgtatgtcccatggaagacttcatttgtcctggggggcacacatcccccagtttgaagaccatttagagtggtaattctcagtgggggacgattttgctgcccaaagtacatttggcaatgtctggagacgtttttggttgtcacaaccgggatgaggggtggtgctgctatgggcatccagtggacagagatcagggatgctgctaacaaagcattatccaacccaaaatgtcaaccatgccaagactgagaaaccctgatttagaggatttgttttggaatcagactatttaattctgtaaactagtgcagggtcagtaaactttttttgttaagtgccagatagtaaatattttaggcttttggggccatgtatgatctctgttgcacattcttctttgtttttataacctttaaaaaatgtaaaagtaattcttaattccagggtctttcagaaaacaggtgatctaaggcaattaatgcttgcaaacttcaattttcttctctgcaaagtagtactaatagtaatattgcatcaagaattgtttgtaaggattgagataaacacctagcatactgtccagcatatgttaagtactctaaatgatgcgtggggatagtggtgtcctatcgtatgtagcacaaaagtgggtgccaagtcacagtgttgttcaagaccctgttcaagtcatttggacaaatttaatgatgctggtgaagctcccaatcaactcacagatgcctatttaacctctgctgtctttctgctgccttagtc

SEQ ID NO: 13809 - DNA, 1048 bp, Homo sapiens
aaaaggcaactggtgagggaaaactaagatgaaatccaaagaaatatgaacacatcatctaaaaatgtaaattctcaattcctttcatctaaatttccttctaatcttaaaaaggaaggggaaactctattacctataagcagctttcttatttacttgatcagagttgtcaatttttttaacgaaatggagctctgtattcaaaaaaagtgttttgtggaactccaaaataaaaacacatgaaagatatgcctgtttagatcctggtggggaccgtgaagcctccagtttacactgtaagtttctggagagcagtgattgtgtcttgtttgtctcccatggttcccgaccctgtgcttgcatctaatatttggtattggcatttcaaacacgaatacacattctttaaacatatcatggtacagacataaaatactgtctttaaacatcagcccgtcttagagaagaagtattttcatcatcctagactccttatatttacttgtcagatagttcttatgcatcagcaggcactgtagatacaatgacaaagtttctacttttaaggagcttaccattttgtggagaaaggtgaacaagtaaaccaataataagcagtgtgctgtcagctgtgacaagctgctgggaccaccgagtgacatctacatcaggccctgggtgagtaccagggaaggcttctgggccgatccaagttgccatccttcacggcagttctcttagtaaatcatcccaggcattcctaaagcaggttagtgcctgctgtctgtgttcccataatactttgtgcccatcaatggtcagtatcagttcctgcaccccactgttgtttacttatccatctttctgccaggctgggatgtctttaaggacagggattccatttattcattttcagcattttccagctactgtttgtttagaaaggcttttggggatcacattgtaaaggcagaaatggtagttatttttagctctttctttaaaaatatccgaaagtatttagcttctcctttcaaaataaaaagca

SEQ ID NO: 13810 - DNA, 1034 bp, Homo sapiens
gaccagcctggccaacatagtgaaactctgtctctactaaaaatacaaaaaattagccgggtgtggtggcgggtgcctgtaataccagctacgcaggaggctgaggcaggagaatcacttgaacccaggaggtggaggttgcagtgagccaagactgtgccattgcactccagcctgggcaatagtgcaaggctccatctcaaaaaaaaaaaattctttttattatagttaatgatgagccattcccctacccagtagatatcaattagccttcacaccatttctggcttttattccttgtgacttaaattagctaaatggctggccctgctaaaggaaggtcatgttgccaccctgtcagcactgcgtgcattttgagttttgttttctctagtggtgatgatgggtcctcatttaccccacttaccatctagtgggtatgtccctgaggtagaggggctggtagaaagcatttatttgtagccatgcagcagttaactggtacaaagggactgaacttatgactttgacctcactagcaagatgctttaaatagctactaacagttagcactagcacaccaaaagctaccacttaaatgtcaaaggcaataccttgggcagcctggaacatctcattccagtgtgggatctatccatattcttccttagaaactaggcagaccacttgaactctctacaatgacatatcaaataataataatatgatgatgatgatagctacccccactgattacctaatatctaagagacacgctggtggccgggcgtggtggctcatgcctgtaatcccagcactttgggaggacgaggcgggtggatcatgaggtcaggagatcgagaccctcctggctaacacactgaaaccccgtctctactaaaaaatacaaaaaaaaattagccgggcgtggtggcaggcacctgtagtcccagctactcgggaggctgaggcagaagagtggcgtgaacccaggaggcagagcttgcagtgagccgagttggtgccactgcact

SEQ ID NO: 13811 - DNA, 1035 bp, Homo sapiens
tatcttaagtctgatcataggctttattttttatcattaagattggatttatgtagaaataatcatatttatctgttgtgctgtatctttagttgtttcatatgtaattattttcagtaatgagcactcagtgagtagtttttttattagacttctagagccctcaccatatgtagtccttcctttctatagtagggccgtatgaaattttcactatttagatcctctcaagtttcatttcacttcaagatgttctgtttttgtttttagagaaaaccactccactcacttcagctttgaaattgtttaactttttggtccatgatttaaaaaattaaggtgctaaaggctcacaacgatcatgtagactgactttaaactgatacgttttctgctgagtttatttaagctaatttgtttttaattatttttaaatcacaggttctaaattagttccattctggagctggctacaaatgggtaaagacctactttttatacgacttcgatatttgactggtgcctggaggcttgagcaaactcggaaaatgaattaggttgtttgcagtcttcagttgtgttcttatgcttcagtgtcacatttcatttcatttgaaactaaaattttaagtaaagctgaaataaacttcttgtcattgtctgccttttgataattttaaagaaataactttccataagtaaaaaattatatatctctttggatataaatgatttttaaaagatgtttatttaaaaagtcagattttcttttgtttgtttagcttcattatcattataattctgagaaacataatttttgtagacagaagctattcttaccctaaagtgcctgcataactctcatgaacttaactataaactacaatcatgtaacagttttcagagatttaaaaataaagctagggtataagtttaaatgtacataaatttatccaaatcaaagaaacctatttcagcctatgaaactttaggaaattatatgttaaaggcaagaatacagacttagtcacaaag

SEQ ID NO: 13812 - DNA, 1050 bp, Homo sapiens
atctggatcctctgatggtagaagaaaataggcaaccaactctaaagtaatgtaaaacagtctcaactagagcatctcagagttttgttttatcagctgtctgaatcagttgaaaatgtcagttctttaccttgagctagtccagttaaggttaggattgaaaaccatcaatcttgaaattttccaggattaaattttttcttggaacccatgaggctagttttacctctgtgagtttctgagttgtaatagagatacaatattatgcaatgatattctaaattattatttgacttgaaacttctgaactactcagctttgaattatttgatttctgtgaatctgatcttcagatttatggtataagctttatatctgccatgtaagcttctttaaaacatgccaaggtagagatgtagttgtgttctatttgtctttaaaaataaatatcaatatattttctattttagggcatttgatgtagaactactgtacatagcacagttctttaaaattccaatagcagaaattgctgtcaactggacagaaattgaaggtgagtatattgtttattgtatgattgtcttgagtcagataatacagttgtttagtaaagtcagctggctttaatgttctccttgctcccctcatcaagcccttctcagctgtcttgactcaaagatccagttccaaggagaatagtacctactaataccttccatctggcttgctgccttttatattttttgtctgttcatggggccttcagtaggcctactaccttgtcgaagaaacttcaataaaacttcctacaatagacaaagtcatggtgatctgaaattagaaggttgatagtcttttgagatagataaatttattttttgcatcaccatttcctatattttttttatcactaggtggatattaattaggtacctgcaaaccactatgcaaagctaaataagaaataaaaattttttttatggccgagcaccatgcctcatgcctgtaatcccagcactttcggagaccgagggggtggatcaccta

SEQ ID NO: 13813 - DNA, 1874 bp, Homo sapiens
agtgctcagtatcctcatgtgctgaggggctgttgtattagacagcagttcttgtggggttaagttaaagaacattaatggggtttttttctttttttagtgttaatgttacatgcaagccttttatttattttgtgttaattgacataagattgacctcacttagtggctggggatggtggcttacagtggtcatcctagcactttgggaggctgaggcaggtggattgcttgagtccaggaatttgaaaccagcatgggcaacaatggtgaaacctgtctcggtttgttttttgttttaattttattagggaaaaaacaagattcacctcacttaaaattttaactgctcacatttttctttagggtacattatgtttatttggtgcctctaaaggagaaccaccaagtatacatgtatcagcttaatgagcagtatacccttcaccacaataatacgtcatcagtggtttttatttaaacatctttgttcctgcactttaaatcaagactaaagaacaatataagttacagaaaccaagttgtatatctatgccttatttccaaatgtcacctttgacatttgactattttttcttaaggattcattgaaatttttctcagaactttcaagaaatcgaaatcaaatagagtttctaggtactagaaatctgtaaaggagtatacctaaaattaagacttttggtatcggctgggcgtagtggctcacgcctgtaatcccagcactttgggaggccgaagcgggtggatcacttgaggtcaggagttcaagaccagcctggccaaaatggtgaaacctcgtctttactaaaaatacatttttaaaaattagccaagcgtggtggtaggcacctgtaatcccagctacttgggaggccgaggcaggagaattgcttgaacccaggaggcagaggttgcagtgagccgagatcacgccactgcactccagtctgggtgacagagtgaaactctgtctcaaaaaaagactctcagtatctctttggattcagaactgcagagttgagtataggtatgttaagtatatatattcaaatattaatataaattaaatgggtatgttaaaaacaaaaatagattaaaaaattttaagtaatgtaaatttggccttcaaattcagatacatatatatacagttgtctcttggtatccacagtaaatgaattctaggaacatcacccacagataccaaaatctgtacagatgctcaagtctttgctataaaatggtgtactctttgcatataacctatgcacatactctcatatactttaaatcatctctaggttacttatacctcatacaaggtaagtgctatgtaaatagtatgtgtttgttttttgttgttagtgttttggagacagggtctcatgtcactcaggctggagtgaacatggctcactgcagcctctgccttctggccttaggcgatcctcccacctcagcctgctgagtagctgggactacaggtgcatgccatcacgcccagctaatttgtgtatttttttgtagagacagagtttgccacattgccaggctggtcccaaaatcctgagctcacgtgatcctcccacctcagcctcccaaagtgctgagattacaggcatgagccaccgcactctgcttgtatattttatttgtattattttttattgtggttttctactgtttattttttaatattttcagtccatgattggttgaatttgcgaatgtggaacccatggatatggagaaccaactatgtatatagcttcatcttcagagctgtacttcacctaaattctttccatttatggaagttaaaatacttgggccaggtgtagtggttcaca

SEQ ID NO: 13814 - DNA, 1143 bp, Homo sapiens
ctgcctcagcctcctgagtagctgggattacaggcatgcaccaccactcctggctagtttttgtatttttagtagaaatggtttcaccatgttggccagacgggtcttgaactcctgacctcaggtgatctgcccacctcagcctcccaaagtgctaggattacaggcataagctaccgtgcccagcctagaaaattctttaaagaaaatatggatagctaaaacatcccccaaacgttttatttttttattaataataaagatagaataaccagaactgacaagaatttgatttaatagtcaatatcataccagttaatgggaatgtaagtaacatgttttgttttgtttttttttttttgagacaagttactgctctgttgcccaggctggagtgcagtggttcctgccttggcctcccgagtagctgggactacaggggcacgctaccatgcctggccaatttttgtatttttaatagagatggggtttcgctatgttgccaaggttggtctcaaacgcctggtctcaagtgatgtgcccacttcggcctcccaaagtacttggattacaggtaaagaaccttttaaaggaaaatttggcccatatgcattaaaaaacattcagacttttaacttagtattctacatctatgactccaaagaaggaaatctaaaatacagataagagttttatattcaaagatgttctttcagttgcctttctataacataaaattagaaaggacaacaaataggcaaatagtcaaagtaatggtaaatctgtacattaaaatattgtatagcccttacaattgacaagaaaaagaaaaactaccatgcagcactattatgacaaattcttgaaaggtagtcaaacttgaatcttatcaagcctctgaatctaactaccagtttagaggaagtacaggggacaggagaacatgttaaatgtcaccatgggggtgcaatcagcaacatctaaaacctaggaaactgtagagcaaacaatgtggtttcttcaggttacaagaaaaaaatttaaagaggtcgggagaacccacagataaaagaaataccaactgatttgtatggatttttttggtggtggtggtttgtttttttagacagagttttactcttg

SEQ ID NO: 13815 - DNA, 1039 bp, Homo sapiens
agctggtataagaggcagttatgttgagtttgagccatgttaagtttgaaacaacatgcagtggtatccagaatagcctaggagagaggatgtgagtgagtcatccacatatgtcagatgatagttgaacctgaagccattaaactggcaaagaggaggttacagagaaaaggagaatcaggaaatcttaaggcagtgaggcacatgagaaataatgggtataaaatatgactgaggaaacacaaatgggagttgctatggtagactgccttttcaaggagctgcagcaaagtgaaggccatagacggtagaacaggaaagtaggcttaaacaagtttgatcacgcatcattgaaattagtcacttactggttttttgccccatttcagactaatagctccagtttttttaccacctcagcctcccaagtagctgggactacaggcatgtgccactatatcaggctaattttttaaatttttttgtagagatggagtctcactgtattgcccagactggtctcaaactcctgagctcaagcaatccttccacctcagcttcccaaagtgctaggattgtagtaggtgtgagtcatctcacctagccttttgcatttgttctaatgggtgtgattaaaaagacatcacagatactaactagttagcttattataccatagaataaatgatctgatttctctctacatttgtatatgtcttacctatagtcacactatgttgtgttatcaaagcaattttactatatcaaaccataaatatatttgcacgtaagaaataaggaattcactcaaatacatcagagaaattaaaagttgatgtgcagtttatttctgtatgaaatatgcactcatggagccataatttgcacaaaagaccagccaattcagaattgaatggcataattttgctgtttcaaataccgcaaatggcataacataacatttggatttatgcataattcttaaagtttattgacactttttatttctttaattaatttagtaaactttagatcctat

SEQ ID NO: 13816 - DNA, 1034 bp, Homo sapiens
gtaagccatattatcttttggtagcttatgtgcagttcttcaaggaacatggcctgataatagaatttcagtgtaaatactgaagggtggaatttagctttggaggacaagctggagtacttcccaaactttaatgtccttacgaatcagctggagagcttgttaaattgtaggttgctactcagcaagtctgaggtgctaagatgcatttctcacaagctcctaggttatgtgatgctggggtccatggaccacacattgagtagcagttgccctcaaagcttctcagtctagctcaatcagaagaatcacctaggatatcagttaaacatagagatttcaagccctactcaaaatctacttacttaggatttctaagggacagacatgaaaatctgtatttttaataggtgctccaggtaagtctaaattactcttaagatcgtggttgcctgtaagataataacatttgactcacacagatgcctaggacatgtacagaatatatggtcaagtctgactagaaagtggaaaacgttcaaaaaatttgatcagctttaatattttaccttccctagtctccctcagttttgtccccactgttacatgaccgcttttatttcaagaaaagcctgccaaaaggaaaagatctttatccttatctctctgacattccaattttcctgaaggaaaagctctaaaggaaaaacatatcagcttatggacaaaaaaatgaagaggcactgtctagaaaagcagctgtgtttattaacacttatttatttggtttggttttattaaagttgttttatacacatcagaagacttttaaactgcttaagcataagtagttgataccggtaatttaagaattcttgcgctaacaagtatattgtattgtcgagttacttagtttcttctctttgatcagaatactgattccattttatctgatatggattctattttatgtggtatttcttgatttgattgtttaggtggagaaatatgctaaagtggaaaagtctatcaaa

SEQ ID NO: 13817 - DNA, 1030 bp, Homo sapiens
ttaatatgatgataatgtgaattctacaaggaactcacatagctggaattttgtgtgtgtgttggtaattaattgtaaagtgtaacaccaagagaattttgttctaaaagtgaccacttttcagataaggcaccaaattgtccctctgatttccagattagattaattggtcttcagtgaactttcagttactttgacattggaattttatcatattctgattattttgctttgggctgtggttcagattgtgacgttatgccagatgttttttcataatgtgttaggttttttttttcccccttaagaaggacattaggagggccttttggttttgttttttatttttattttttttgatccttgcttggttgaaatgccttttggttttattatatatagttctttgaaaagccatttgaattatacagctaagctttcagtgagcatgatcattttcaaacttcatgttttaaattaagattccgagaccattcgactgccctatgaagaaggagagttgcttgaatatttggatgcagaagaattacctcctattttggttgatctcctagaaaaatctcaggtacaaaatttttgtctttaaaatgtctttatatttgttatatgtatatgatatatatatgtcacatttttatgtatgtatacatatatgtatataaacgactacatgatgtttcatgacagatgatatttaatttctatcactgttcccaacagcctttagaacatgaaatcaggctgggctttggtggctcatgatgcctgtaatcccagcactttgggaggctaaggcaggaggatcacttgagcccaggagtttgagctcactacagtctcaaacccctgggctcaagtgatcctcctgtaccactgcaggattagagaaggaaggattagagaaggaagaggaaaaccagaattgcagtgattgcaccactgcactccagcgtgggtgatagagcaagaccctgtctctaaaactaataataatagaagatgaaatgag

SEQ ID NO: 13818 - DNA, 1087 bp, Homo sapiens
atttctcgtattttaaagcttttctttagattttattaaaatttaaaaacaaatgtaacctgctaactgcatataacgtatttcaggcagcatcagtgctaatcttctaatggcacatttctgttcactgacttacagtcactaaacatagttaggagtaggcatttaacttttgccattaagaaatgacagactaagggagaaaaacactttttaatgttttaaagaagcagcagcatttgacagagaataaatgaacattgaccaccatgttatttatttagataacccctattctgcgtcacaaacttcagaaaacatctgtcttccttctcctcttggttcttgcctatctactcctcccctattagagaaaagtagaagtatcacagtggggttctgacaacaccttgtattttgcatctatattacctaatcattttcctcttaagtttttgaaggagataatgaatgaatgatgcttttatttatgtatgtatgcatgtctcactagaccctttgaagttttaatttcagaagatgaaatatttacttgagatgactggctgtttaaaattgtcctagactatatatatttgattttgtttattataattttttgatacaaacaaattttatgggcaaaatttaaaagaaccttctgtatttgtgaagtgtatatgtacagaattatgttttcatggtggaacatgggatcagggaaaatgggagtcaggaatcttaacttgaatcctgggaaccagtttcattgggaatccgcttcttataagtttttttttttttttttttttttggtagtgacagaatctcactatattgtccaggctggtcttgaactcctgatttcccaccttggcctcccaaagctttggaattacaggcatgtgccacagtgcctggccaagattttttaacaaagcaaattagtgtagatttattataactgaacgttttgaaaagatggcagatttcagactttgttcacttatcatatttagatatttgataatgtgggttttttattgaacagtgcaagaaggcccactatttttggaattatacaaat

SEQ ID NO: 13819 - DNA, 1051 bp, Homo sapiens
taatctcacagacctgaattaatgctctaccatactatttcactaacaaatctctatgctactgagaaccaagtctttcaagtaagcaatcagattacaactctctctcactgacacattgtagtcacccttttctctcatcatattcaaataaaaataagccaaaattagagctaataagataagcagagccaagtcattgaatatttataagttccatctctactagctctctcatggtacactgtcttctaagttgctggttccagaaaacacatagacagggaaattatggatgtaactgttagactccaacctcatagaaatacaccatctccatgtccaaaaccaatgtaggaaaatctatctagctccacgaagagagtaggattcagaatttcacccactgcattaccaaaccaattttctatcgcatacttttttcataaaatttcaaaatggcattagaagaagaaagctactaattactttctatctttaactgcacagaaatgaactccaaacctaagaaaaacaaaattttgttttataaataaaaaattcactattgtccacattttgtatatttgttagcaacaagtgcagaactaaaaggtgccatgggaaattaaagagataattaaaaacaagtcaaaacaggtaccaaaatactttatacattgttaaataacagtcatggtgctaattagcagtaaagagtcaagagaattcagaaagttcttaaatctttgagctttcttttcatcaatgtgctatggaggagatcaatgtgttttcattaaggtctggccccattagaatttaatttctttctagcagtggtaaatgacaatcaaaatctaaactctttctctgaggtctgttaactgccagttttcaatagaatgcaaaaatcttgcaaaataaagtgtattacagtgaatattccagctggcctttagttgccttaagaaatcagaacagctgtgtgaactccttcataaacgtctcccctttggtgtaaggagaggttacagactgcaataaacaa

SEQ ID NO: 13820 - DNA, 1031 bp, Homo sapiens
ttcccaatttcagtaacatccttattatgtattcccactttggaaaaaaagactttgctatacattataaacagtgaagattccagagtgattagctgaagaaattttggttttaaagttctactaaaaataatgcagggtattttataattgggaggattcttggagatcaacctaatcaatcacctcattttacaaaggagggacaggaaaggggactcaattgtgcagtgggttggccagactgaaaagacctataaattaatagctagcaaccaaccttgatatagtctggataataataaaaattgtatgacaaaaaataacaacaatattaatactagatgatattcactgagtttgtcaccatgccagtaactgtgattagaattttacttgttttatctcacttaatctttatattatcctatgaaagtaggtcctattgctatctccacttacaaatggggaaatgaaagtattaaaaggcttaagtgacgtaataatatgtcccagatcacaaagcaaggaaataccagtgctggaactcaagagtctctgaagacatatgctggtctggctttagccactgcatcgatttgaatgggtgtcatttaaatcattaattacttatttgaattcaggatatgaattagacaaattttaagaagtctctggatgtacacattcagactgtctctatcatgaatattataatgccatttataattttgttgcccaataaatattaattgtgaccccagacactccttaccatggtgttgcactaagaaataacaaagtcattagaagctgtgaagtgctgggaaagagcacagagtgaagtgaagtgacagcaatgctggcttccagtccagttcaccacttactaattggacaagtgtctgaatctctctgagccttggttttttcttggctgttaatcaggcctgtggtctgaatcttacctacttctcaaagtctagtgatgttcaaattctgtaaaagtgtttttataaggtatcatgtaa

SEQ ID NO: 13821 - DNA, 1033 bp, Homo sapiens
agcatgctactgtagtgaatactgtgggcaattgtaaatatacaatggtaggtatttgtgtatttaaacatagaaaaagtacagtaaaaatacagtattataatcttatgggcccaccgtcatgtatatagttcattgttgcccaaaatgttgttatgtgatgcgtgactgtgtatttctctgtctacacatacgcacacatacacacacacacgagcacacactttactgaggtcttaatacataacagtcactctgctagattctgaggatacagagatgaacaagacatattttcctttttctttaatattttaagcaaagtttgttcataagcctcttatcacactccagtgtcctgtattatctaaaacatatttggcaaccttattttctcctgatcctttcccatgacaactctgaactcattaaataaataacataaattatattacaatgagtagagtctatacttgacatttaaaagacaaaacaaaacaaaacaaaaactttgggccatggtggaatcaatctaaatatatcctttttgccactaattactgttttccgtaagagtaggacttaagtttttttactgtaaatccgtgttaaatttaaatagcattattgacactattaaaaacagtgttttccttttatacatagatattaccaaattaccattcacaggctatgtattgtaagaggtaagttgttttccaaagtctggttggatttttggtgttacagtcacatgttaccctaccccacatggaaccaatgaagcaaacctaagaaggcacttttatagttagggatataatgacctggattctcaccaccctacccctttctctagagacagtagagaccttggcttaagagattcttagaaggtcagatcaaatttagagaaatctaggagtactcagggcccactgttagtgttttcttgtgggctcctctgtctacagctacgtctatcgaaagcctagaaatagactacctttctcatggcctttaatcttgaaaa

SEQ ID NO: 13822 - DNA, 1025 bp, Homo sapiens
tcctgttatgatcaaaactgagcccacaagtcctactccctcggccttcaaaggtccatctcattctgggaatccctctcatggcactttaggtttgtcagggacattgggccgtgcatatacttcaacatccgtgcccatcagtttatctgcttgccttaatcctgcattgtcaggtctctccagcttgagtactcctttaaatggttcaaatcctctttcctctatttcccttccaccacatggttcctccactcccattgcaccagtattcactgctcttccttcttttacttctttgaccaacaattttcctttaactggcaacccatctcttaatccgtcagtatctctcccagggtcattaatagccacctcatctaccgctgccacctccacatctctccctcatcctagctcaacggcagctgttctctcagggctttctgcttcagcaccagtctcagcagcacctttccccctcaacctgtccactgctgttccctcacttttctctgttactcaaggacctctgtcatcttcaaatccctcctatccaggcttttctgtctctaataccccaagcgttacccctgctcttccctcattcccggggctgcaggcgccctctacagtcgcagctgtcacaccactacctgtggctgccacagccccatccccagctccagtcctcccaggattcgcctcagcattcagttccaatttcaactccgctcttgttgcacaagccgggtatgtggatagtttggaaataggataaaattattcttcacctaacttgtagttcacatttcatttcaagtcatcaaaatgaatgtcaaaatctaaatgatgtttttctgggtgaaaactttagcactctgaaatgttttatgaaccatgttaagataaatgtataaaatattaatgcctgttgatacaatgtttggatttgtatttgatagttttatttataagacagcagaaaggattatatgcaaaacagacttactgaatttcgaata

SEQ ID NO: 13823 - DNA, 1024 bp, Homo sapiens
taatagtagagttactactatttttatttattttcccatatgtgtacatttttttcctaacatagtccataaatatttatatcctgtgtttttctttttatccaaatatctgtttattatggtggcaaatatttgattaaagtttaaaatgaacttttatttatttttatatagagaatgaagacctttcgaatccgtcaaaacctatacagaatcaaagtaagtagcaaatttgatccagagataacggatatctgtcatggtttgctctgttattcactgagaataatttgagtatatttggaatggttatgttttaggaaaagtttctggttaaagaatataattcatacttgttaaaagtggtttactagtgttacatattatatacataacatgaaatgcacgtgttaactgaatttaaaattaatcttaggacttttatacaatttgcaaaacttgcagtgtaatgtaagtactgcgtagctttgcattcacattcactttacattctgtgatactggaaacctcatttgttttttgatataaacacatgggatgataaaaatcctttttgacaaatgctagtcagattctatttttagagttcattatttcaataagtattattaagcatatcttaatgtaggaaagaacaaggggcaccaaagcagaaaatggaattgaaaaatgaaaatgaagtgtgtcctacatagtgcctccagatggcagcagtgctgcgacgttgtatttttcccctaggtgatgatctgtgtggtcaggaaggagaggctttcttgtatgagacaaaactacatcagttcttgtttagcaaagtagcacaatagcctgaccattgtagtacatagttaggagtctcagtgggagaattccattccctgagaacagtgcctagcaggtgcttctcagctggtagtttctaaaggaggtagcatagtggggtgtaaagaacactaagtgaaatgtcaggacatccagtttcttatcctgcctctggcatcac

SEQ ID NO: 13824 - DNA, 1031 bp, Homo sapiens
gatttttacattttatttgactttaagttatttaaatgtatataactatataatagctattctgttagcacagtttttaaactttaatgccacctgtatcacctgggcctgggctgcacgtgtcgaattataatttcaagtactgaaatcttatagaaatgtttgcaaacatgctgtcattagagctgttagttctttgttttcaggtggttgatttgctgagatatttttcctgggccgagccccagttgaaggcaatgaaagcattacagcatgtaagtaacttattttttccttcagaacgtagaatttaagtatttttaattctcccagttgtgtgtaatttatttcagttgtaatttatttgcattagaaaagcgaactctatgtgttattgtactttgattcaaaatagctatgttaaaaaattaaaattttctaaactgtacatttaaattgtatgctacagtgtcccgattggcaagttagaagaaaacttcaccagcaagcaaaatataggatttgaattcttaatggttttttgcacttctgttttttaatatccatcgtcaccatctttctatttagtcttagaagagttattactgtccaaataaattttcagcgatgatggaaatttttatatcagcactgtccattgtggtagccacttgaatgtgcctcatctgaggaactatatttaattttatttaattgtaattagttcaagtaggtacatgtgcttagtggctactatatggatagcacagctctagaacctaggtcaacaggagcatctggatcacacaggagtatctggctgtgtaggaagatttttgaagcaatatcaggcctggatatcttcagtggaatcaatttacagatccttgactttctaaactgatgagcctaagaaagtgtctgggtctgttagtgctgctttctgacctcctctttaatacttgcttttttactgctttgcaaaagaaagagttatcgcacctgttctctgggggtgaaaatgtttctcc

SEQ ID NO: 13825 - DNA, 1096 bp, Homo sapiens
cgcagtgttgagtttacttgggcgcgactggctttattgtaggtccccatgagctggtgggggctgtaggggtaaccaggcagggcgtctggcgctgttggggctgcgtttttccggagtccccctatgcgaggccgtgcccctcttcgcccggctcctggtgctccccagccgccggcccgctcccggaagctgcagcagctggtaacaaagagcctgccgggccgcctgctgccggggccgaggtatccaggagtcgggcggagcggctggggatgagcgcgagccggaccatgcgtccgggttcgcggcggtgagggtcgcggccggcggccgaggcgcaggtgcgggtcgagagaccggcgcctccctccccgccgcccgtggactctgagcgcaggtgtttctactctgccggccgctccacctgggaaagcgccttcaagagctacctctggcggcacctggccctcagctgcagggaaaccgcactcaaacctgccgccgagcccgggtttttctgcaaaactcagaggacctggctcttgcccgaggtgccctgaaccattgtgtgaataagctggggaagcctgactggagtgttttttctttttaataaaaagagtttttctgaatctcaatttttagaaattttttttgcgaagtttgcaatactctctacctcttcgcatcctctcttgctcgtggagtctttttcctcctcagctataaatattttttactatcggcggagcagaccagggatgaacgtcttttaattgcaagtataactgttaaaaccacgtcgggatagtagtcaagatggataaaaagtcctttgaaatggtgctggatgaaattagaaaggtaattagaccgattccatgaattattttatgagatgaattctcgtgttttagactctctttgaggtactgtatggagattgtgcagaataagggtcctaggattgccaaattggtttgaattttcacgtgtaatggaggagtttatatcttgatacgtttccagtacaaatagaaattaagttacgttaacgccaaatttgagactcagcacggtgtcgtgggaatta

SEQ ID NO: 13826 - DNA, 1035 bp, Homo sapiens
gactattccacttgcttctggtacttttaatcattccaggatgagaagccatgctgctctggaagaacaatacaggatctgaccaataaaattctacactctgaggctttgttggtgtggagaaagtcattccactctcagatgcttaattcatattgtgctgaatgtgatttgattgtgtctcattgtctgctgagcaggggcttctccactctgtggtttccggcagagaagaaaagattgcactttgcttcctcaattagcccattattttcatgtatagctggtgcttttcaaatttcttttaactgcaccttcctgtagagtagtgttgtgacttcttagctcccattatcaagttggagttctctagggaattcattaagatctagttccttggacagatttaatgatgacattgtcatttttatgtagttcatgtgattttagacattagtgagcctcactggaataaaagatcagccactctactggtaaagtcaaatgacaaactcttatatggcaatggcaaattctggctagtcatatcattttttttttttttttttttgctcaagatgtcccagcattttaataggaacatctaagttattaagaattacatatactgcttttgaaatgaaaatcacaattcataagctaataacaataacaaagtcagtgaaaagtatatattcacagcattcttactgatatacacatgagagacaataaaaagctcaattttcacaaccttaaaagctttcattgcttgcacatgcctgtgcagtaaatggggagtttaccttgtttttaggaagagaaaatgacatgcaaagaagtgaattgatgaaatttaattgactctagtcattgaacacctgctacttggtaggtattctactagacataaaacgctaaataaaatacagcccatgctctcaagtcagtcataagctcatggaaaaaaataacaggagcatcagtgattaccaaatcatatgtcaactaattctcaaagacagggaggaagtt

SEQ ID NO: 13827 - DNA, 1025 bp, Homo sapiens
tgctcccaagaaacttacacagagattcagaagtgcataaagtgctatcagccaaatagggtagctctgactgtatatgcagcagtggtttggggaaaggagagaacccgacaaagatggaatagttagaaaaggcttcagagtcacgaaggaggagtctgggcatgaagagcatcatcagctcagaaacagaggttgcagcagagggacctgggggaggtaaagtcactagagatgggggagggttggatctgtggcacagggagaagaccaggttcagaaatcacagaatgagtgctagggagtgaaggacagtgagtttgaatttataaaatgtcaaaacctctgttttactacccatcttcaatctgttactatttgcaaatattgtcaacagctgatcaaacattcgctttatgtaatcacacaaagaccatgcagaatatccccactttgcactggagcaatgggcctcccatttaatgaggccccaaaaacccacatattttgttaaactgggacactgcttttaagcttgtgagtctgtttgccatcatcttgaagggaggaggctcctcacaggttttagattattgagtacatacattcttaaatagtattgttggtgtcccttggtaaatatggtttacagattcttcagacctgcaatattttctttttaccagacttatgttccagagatgttgtagttgatataaattatattggaagcttgaggaaatgcaataagaatgcactttgcccttaattcagtttttattaacatttttacttaccttcagcagaatctctttaggctcagctaccttcccaaattgttactagatctttactaaaagaatttatgccaaggaccaaataattctttggcacatgttatgttattttaggtgccagcctttattcaaatagtatctgtgtaatttaatttagagtttagttttccttttagagttcaaatttttattttaaatttaattaacatgtgctgaaataaaaataga

SEQ ID NO: 13828 - DNA, 1046 bp, Homo sapiens
atgccacaatggtaaagttgagtaattgcaatggaatccatatggcccgcgaagcctaaaatatttactcttaccctaaaaagtttgccatctggagtagatgaataactccatggtagatgaataaatcacattttatattaagatattttagtgtaaattgcaggtatccttacattttacttctaatttctttattgaatatctcaaaaataatgttgctgtataaccaaattgaaatcgttatacttaataaagtaatagtttttccttaatgaaatttgatatcaagtcatataaaaatttcaattgcctccaaaatattatttacaactggtttctccaagtcaggatctaattcaggattattccttgcatttggtgtctgtgtcaccaaagtctcctttaatcaagatatgtacctttcgtcatgacactgactcctgaaaaggccatgccatttgtcccatagaatatgtctgaaatatatttgattgcttttgagtggtgtcatctagtatgttgctctctgacccggatttacttaaactggaagttagatctcaattgaattcaggttaaacatggttggcaagaaatcgtgcaaagggatcctaaaatctgcatcagatctgaagatttgtgtcactattagtgacactaaatttgaccattagcttagtcaacaaattattttaaagataagaaaaatgggctgggcgtggtggctcacgtctgtaatctcagcactttgggatgccaaggtgggtagatcacctgaggtcaggagttcgagaccagcctgcccaacatggtgaaaccccgtctctactaaaaatacaaaaattagccagctgtggtggtgtgcacctgttgtcccatctacttgggggctgaggcaggagaatcgcttgaacctgggaggcggaggttgcagtgagctgagatcccgccactgcactccagcctgggcgacagagtaagactccgtctcaaaaaaaaaaaaaaaagaaagaaagaaagaaagaaaaatggcattcagggta

SEQ ID NO: 13829 - DNA, 1057 bp, Homo sapiens
ggcctgatttaggaagcaaggggatgagttgagttctggacagcttttggttcaagttctgcagggactttaaggtggaaggccaaatggacagttggaaacactgggcatagagctcatgagaaagatcagggtaaaatacatagatttatgaaaacagtgttttgaaaaccttcacgtgggtagatactacttcatttactcttaaaaacacatggcttttgaattttgacattttcttttacatttgattgtgctggttgaaaggcaagctcctagctgtgtctactttaatcataattttaagcctcccctcagatagtgccagctgcttaacagttactacgctggtggaccaggatgatggagaagtttgtactttataggaatagcacttttttttggtttgtttttggtctggaatagattgcaataaaaatcaaagtaggaaaacaattatgatgttcattaacaaaagataccttgggggaaagcagaatctagaagtgaccatgtagttagaaaaaaaaaaaagagagagagagattgtgaaagctgaatattttaatttcttcttcttcttctttttttttttttttgtctcatgcataaagatggtattctattttgatcgcctggtggaagaaagtcagttcgtttatctcatccacccactggtggctatcctgattatagcctcctggtaggaaacatttaaaattcaatttggctgtctgtgcccttggtgctcagtaggtttcattaaattacacagcggtgagctcttcttccctgtgtggcaccttttgatgtacatttgacttcagtgtaatttcagacaattgtactttgtgtggagtggttttaccataataatcttgcagtccagatgaggcagatctggaactctgaatctgatgggattctaagatggtggaaaatattggaccagggaaatattttcatttctctatactttccttatttagcttgttaggcttgtagggtttggcagattgtttctgtagcattacttacagcatgggattagaataac

SEQ ID NO: 13830 - DNA, 1046 bp, Homo sapiens
gtttctctgcaaaataagctgattttttttttccagggtacttctaagacttgtagaagaaaaactatgattaagaaaagtggatggattattaagaaaggctttttattcaaaaggttttgtgattttaatagcgctttgcatttataataccttccatccaaggataccagccacctctgccaacgctaattcctcagcctctccttgaatttaaaagagtagagcaaacctattcgccgtggaccatgcagaagtgaaaagtgagtcccctgggcggggggagtttagttacccaagaccctgagggaacctgttgtaagggaacttcagagataagactttctcaaaatgtgagctactaactgttggcaacagaattacttggaaagatttgtaaaaaatgcaaattccagaacctctgagaaggagaaacagaatcttggatcggggtgtgatggtggagaaatctatattttaattattccgggtgatttttatgaacactgaaatttgagaactgctcttagactacagaaatgctgtaatattttctgccattcattcattcaataattacatttacctactgagtatccgctgtgtagcaggccctatgcaagatgctggggacatcctatgtggtgatcgggacagacgcgctgtctttcctcatgaggcttgcagtcttctgctgctctttagtgtgtagtgtgggttagcagaaagatgtcatgaagtattctgtaaaaataggctccttggatcaaataaatactgggctgatagcaggccatgaaactgaaaatctcatcattcatcagaggcttttccctgcctgacctactgtgggtgctgcataagtgagttggacagcctggcctcctgctccaggagcttgcgcatctgggcctgctttggcctctcctctggtcttgccagcacaaggatcaatccctgaataacactgtggagtggcattgaaaccgtttgagcgaaaggcagatctggaaaccggcttatttgatccggggggaccacatggc

SEQ ID NO: 13831 - DNA, 1035 bp, Homo sapiens
acagcagcagcaaaaaagacaacatgcaaaggtaatctacaaagtaaaaagccccattatattcaccacctggaagcaacattattgtattcatcaaaattgtcttgtaaaagaagtaattgaccatacagagctcgtataattggtaataaagagcaccctgtattttagttgcaaatagtgtgcaataggtttcaggggtgtcatgattgatgttcactgtcaggtgttgtaaataaactttccaatcccagatggtgtttttgcctagttaggttctacactgatcccaccacatattacactaatggggaaaccttgtgtacaggttcctcatcttccaagctctattgtggtgaccctagaaactgcctatgtgctcacatcatggctcctaacagcatgaggaggagtgtcacagccaaggctagagtgttttcctggcctgggagaagtcttaggattgtaccgcccccgccccctttttttttcattctgctgccttctcagcagtcaacttcagaatcactcttctcctgtcttctttcccccttctttgcttgttccttcctataccttgcttgtctttttacagaagcatttaaggagatggaaaagatttggcccattcttctcctgtcataactctgcctgtgtatttctgaagatgatgttgactgttggggaatgggatgtaggagaaagaggtctactgtgggtcttgcttcgcacggagtaatccgacctggcgtggattgtctggtctcctccttcatccatcaaagagtaaggcatggttcaattacttctagcagcaagtcccacagaacacctgggctttctgagctacctagggcaggtgtgttatttggtaggaagtttgggcagcactggggctttcagtgagagcccctccttctaccttggcataatcataaaatctcaccaatacgtagccctttatgctttttgaagcacttatacccattacaattctgtggggcatttaggacagacattgttttcctactttat

SEQ ID NO: 13832 - DNA, 1056 bp, Homo sapiens
gagaaggctgtgctctggaatagtgtcctttccactgagtccctgacttgcctgttggcatatggagcagtaatcttttcaaaactccattgtgaagttggctgtgtgtgtgtgtgtgtgtgtgtgtgtgtgcgcgcgcgcagaggaaatacttacatactaaaggggaaagcgggggaggaaaattccaggaaattgcaaggtgaggttgacattccttattctcttaactcttgcttctgtttttctttctgaaaaacaatgatgacttaaaatttgatcccagaaccaactggctttttatccgtaagattacagttgtgttttttagacatcctttcataaatatctaatgaattgccttttattatttggtgttaatgaccaaaagtaccactaacatagtgtttctcatacttgcctgtcatataagatacttgttaagaatattctgggacttcatcttcctcttgttaaatcagaatctacctggaataacatagttaccttattttcttagaatagtagaactgaaaagaatcttacacatgaaagtagttcaggtgttcccaaacctggctccagtaccatgactgctttaatagattgccaagctgcgcttcatacctagtgaatcataacatccgaagcttcctagaagagtcggaccattagactggagggataactactcgcttattcggttgccttcaggaaaggggaatttatgtgcttggttattgggctgattaatagcaggacaagaaatcttattgtctctgtagattcatccaaataatatccaaatatatatataatgtttgtttgagatggggtctcactttgcccccctggctggagtgcagtggcacaatcacagctcactgcagcctcaacctacccgggctcaggtgatcctcctacctcagcctcctgaatagctaggactatagacacgtgccactgcatctggcttttttttttttttttttttttttttttttttgcattttttgtggagatagaatttctccatgttgcccaggctggtcttga

SEQ ID NO: 13833 - DNA, 1049 bp, Homo sapiens
ccccactgtggcaggttgaacgtttgtttttgttaattaatgtccatgcattctgctctttcagtaactagatttaggtaacctgggcctgtttcccatcacttcctggccttgtgactgggcaaataactttgtctccctgggcctcagtttccttaaccctgaaatgaaggggttagattccagcgctttgcattctctggccagctcttgagcacctgcgactccttcctgctcttcagttcttcctccatcctggctgacttttgcttggctcccgctgcccccattggcccccttaaactccagaagagcatagaagtgatcaggtgggtctttttgttcactatccattaacttttcaaggagggagatgctgtgttcaaggagtcagaggtgaaattgtgagtttatctgattttctgttcacttgataattatatagttgacttggaagtgtttcaaactgaagatattccttaatgaaatatgacctccccactgccccatctttagggaatggcattcaccaaatcctttcaaattcagagaaattagaaaaccttggatcattttagtattaaatttagtcttaaaattgtgggtggttgtcaaatcagacctcgtctaaggggacctcattaggcagttctctataatggtgacagggtggcttaaaatgtcttaactaaatgcaaattatctcagagccaaaagttgagcacttgaaagccaatgaaatatctatttaaggagcacagaaggatgtcagagaaggatccaaagtcctgatttttttgttacattatattggggtagatttactgcaagccagaggattctttacgtaattaactcccatttgaaaaaatagcaaacaataaaactattttttttccctttacctttggtataaatagaactaagccataggttggtatgtttagtaagtaataggtattaagtaagtaatatgtattacttacattttaccatagttgaagtgtgaacttgaaatatttttaaagcacagtctacagtggtaagaa

SEQ ID NO: 13834 - DNA, 1020 bp, Homo sapiens
aattggcagaagagacttaggggaaagttctttctagggcaggacccttcaccgggggaagatgtagggtttaggctccaaccttgactcagcattgccatttaccattttggcacaggaccttgttgaagccatgactaagggcctccaggtggtgggctgtcctttacaggtcctgatcacagttagggatgcagctcggactgataaaaaagggccttgggctctgtcagaaatgtgtgtagttgaattacataggtgattctgataataaagatgtttttgtgttcccactaccctcttattgggaagatgtctgccttagaaaataagagaacaggctccaaggctgggtgaccaggaactcatctctggcaacaaactccaatagcctttgtctttatctgtggtaataataattataatagtcctaatacattctggggttatggtggtgattgattgagaatgtataaggaaagactagatattaaagcattaatcacgtgtaactgtctgtaaacagcggttttgtagttttttgcttttagtaaataggctcccccgtgtgatcaatactaaactgacagcaaaagagcagtccattcttattagaccatgcttggggagataagttgctgctggctcatgaaggacacattcttcttgatgtagggaggtggaatgaggatttaggcgctgtcttcctcccctttggggtagggtaccttgctgtcttttgacagaatgaggatgagaggaggtggtaggaaggcgggggaggatcagtgatgagatggcactggggacagtggagagaatggttgtgcatatgatttacggtctttcttttcagtatactacagtgcttagatgtgtatgcagaaatcaagagttatcagtgatgtttgaaaattagatgttgctggcatggaacttccgttttcattgagaacagagcgtgcttagtgacgtgtatatttagtacagtaagacagttgcagaaggatggccctgatg

SEQ ID NO: 13835 - DNA, 1024 bp, Homo sapiens
ggtcgatgtacgttttctagattattaggctcatacctactacttttcaatacttgtcagctgataagaggtatctcttagtggttagtgtcagcagcattactggtataatttgtggccttctttcacacactagttttccacacctccaagcaggttcagggcttacgtagctactgattcatacgtactgctggcaactgactagagaggtggaaaagggagtaccttgggggtttaggggctagaaaaggtcaccattgggttggaaccaggaaaaaacagagtgcacgcctatgatgagcactgtagtttaggtagaatttcaacaggctgaggctgtatttttgggccagattgagaggagattcagggggaggagcagcctggacaaaggggaggaattgagaagtacagtgtggttggattcgtgtgattggagttaaggctggagaattgggagccatgtccccatcatttctttttgagagtagggagctatcgagtaggaaatgtgtgtgtgtaatgctgacggtaatactgttaggttaaagttttaagcaccaactgtgagcgctggggtgcttagtgttgtaacagagcatctccaggtactctggaattctctcaaaatatcctggaattttccttgatcaggaaaaaaaatgatatggtcgagcagtgaattttaagaattttatttttctatttatttacttctataaacatttgttagtaactgtgttttattatagagttgcccacgcagtgtgtggttttggtgactaaaaatgaggattggatgaccattgactaaaaatatatatttatatgtattttatatatatcaacatatacatatatatgatatattcaggtttttaaaagtaaatgataaagaacatcactaattttattttatttttagtaaatcagtaaatcaaatatgtaccagtttttaaattctggaaacaaagattccaggtttctatagcgtttaacaaattattattcatagcaaaat

SEQ ID NO: 13836 - DNA, 1043 bp, Homo sapiens
tcaacttggcctcccactgtgctgggatttacaggcgtgagccactgtgcccagcctaggttttagggtttttacattttactgttgacagtactgtagctgtgatgggaggagggaaataacagggctcgtgagagagtgctgagcaccgtcctctctcccaaacacagcttccgtgtgttttagatgtgttctttccctatcatgccatccatgtttaggggcacaagaagagtcaggtgaggagggaatgggcatttaagtccacgtgaacccctctagcagggttcccctctgcatcactgtttcaaggagatgggatagaattatggcgtaactgttttaatgtacgaaatcagcagaagcgatgaatatttttatcttcaaatttgtattacacactgaggaccttatatatgattctaaatttattggtcatatcctgaaatacacactgtgtgtacctagtaaccttgtattggttacagtggtgctgtcttaagtttgtttatttgtttgtttgttttaaataatgtctgaacccaccataggggtagcactctagcacagttttgggtaacaaataagattgcattctgacatggtgtcataaatcatatctaaaagccgtgaggtcacatagaacttgtttatgtaacagggtagaacaaaactcattgttctgagaatatattgctcactcattttatcctcagtcacgatgagttttacagcctatgtgcagtattgatgccactgaataagcatttatttttgatgaagatacaacttttctcctcacgttcagttgagagtttgcaacaagtaagactttgcattctggaatttatgtagatgtatgtgtatagatacatgtggtttttaaggcctggcaaccttaatgaatactggtagaagattttggctgtcttttaacagcattaccatgtggttgaccatttaaataagcagcagtttatcttgatgtagtgaatgcatttaattggttatcctggcaaagcagggtattcgttggttacaag

SEQ ID NO: 13837 - DNA, 1032 bp, Homo sapiens
agtgaagacaaagatgactttatcctggtccctggtcagggacctggttcataatttaaaactcttttgtttgaatttaagaatctataaagtaggattgataaactatactgccttggattgcttttgaaaatgtgtgtgccaaggcctgctttcacatggtaagaggaaagtcattacctatcatatgccatgttttcctctgacttatacctaaaatattttagagtgcttattgccttatgtaaaattacaagatcatataatcacattcccaccctgtggaaaattaaactttttttttttttttaaagtgaaagcaagtttattaaaataaaggaataaagaatgactactccaaaggcagagcagcctagactctctttgtaattgagtctaagctaataacggattattgtaaaaaaaacctctgttttatagcagaattttctaccgggccacatacgaattttctgctcttgctgtcttcagtgttaacagtgggaaattgtggacacttaaactgagcagtacttagaatttgctggatatgctgaaaagtaatccatcagcattggagaccacaagcagtataaaattgttgatacccatatttatttttattttctttaggtggagaaagagacccttgagttagagtttttggatgatgaatttagtactcaatcattagtatatttgtgcatgtcatattctaggtcacaataaattatcaacatgccacatttgtggtagttagataatgcttttatttcctcttttttccccacgttgaatccagattaacataatatgttaatttgtgtttttctcaactgagtgtggtaattccattgcattaaagtgttagggacttttgtcttcactaataatccacttaatctctcacaataaaaagtactttcatttctactgacttacatttatccaatcaaaactttttatattactagactttttgttacttttacctagcatccaaaaccatgttttatgattggttggcaaaga

SEQ ID NO: 13838 - DNA, 1050 bp, Homo sapiens
atgtaatgtagttaaaggttcttatcacttgactgctgagcacaagaaaagcccaaaccaggctacttgttgtaggtcctctggtttcagaatgatttatgctcactttactagcacatatttagttgccttgaaccttctcaactgtagcttcctcttacagaacacagtgccccacaaggagactttgaatctgtgatctcctcccaggttttagccgaagcccacaacccactgagcatgtgaagcaagggccattggtggatgggtcttatgtccatatgcaggttgaatattcctaatctgaaaatctaaaatcctaaatgctccaaaatctgaaacttcttgagtggcaacatgatgctcaaaggaaatgctcagtggagggttttggatttttggattagggatgcttaactggtaagtttaatgcaaatgttccaaaatctgaaaaaatccaaagtccaaaatgcttctggttccaatcattttggataagggatagtcagtctgcacttgatatacctctagaggctgtgaaatcttaggcagttcaaaagtcatgttgtttggctgggtgcagtggctcacgcctgtaatcccagcaccttgggaggccgaggcgggcagatcacctgaggttgggagttcgagaccagcctgaccaacatggagaaaccccatctctactaaaaatacaaaattagctgggcgtggtggcgcatgcctgtaatcccagctactcgggaggctgaggcaggagaatagcttgaacccgggaggcggaggttgcagtgggccgagattgcaccactgcactccagcctgggcaacaagagtgaaactctgtctgaaaaaaaaaaaaaaagtcatgttgttttaactattcattgccatttgttggttgggcctcttcaaccattgtgatccaatcctagttcaatcccttgttgaattcaagtattgaggtcttaggatgaatgaacaaggctttgggctggcacataaaggtgggacacccacaggtcctgctctttgggagtttgggta

SEQ ID NO: 13839 - DNA, 1064 bp, Homo sapiens
tctagcctgagtgatagagcaactctgtctcaagaaaaaaaattttttttttttattcttttttagcagagccttgctctgtcacccaggctggagtgtagcggcgtgatctcggctcactgcaacctccacctccagggttcaagcaattctcctgcttcagcccctcaagtagctggtattacaggtgcccaccaccacacccagctaatttttttgtattttcagtagagacggggtttcaccatgttagccaggctggttttgaactcctgacctcaagtgatctgcctgccttggcctcccaaagctctaggattacagatgtgagccatggcacctggcctaaattttttttaaggttcaaggattctaaaaaaactcaaaacaagatttagttgacagtggtcccaagctaatagtgttccaggtcaacaggaaccgtgtgaaggaatccaccataacaacagccttcaaatgacaaaacacacaaggaagcaaaaccatgaatgtgtaccagcagaaacgagaacagaatcagactcataaagcctctgaatattgggcttatcagagtcagaatataaaatatgtgtaagatagaatgaatattgagcaggatgctttaaaagtgaccaagcagatttgaaaaacattaaaaatgttggccttctcgtcccagttcttcccaaagttgagaaaagctgggttgagaggatgaaaagaaaaaaaaagaaaaatttagtggagtttaacagcagtaaagaagtatccatatgcagcagagagaagcaaagaggaaagaaataggaaaggaaagtaaaagagtaacatttgtacaatcgtattgccaataggaaagaaaagagaaaataggtcagaggctaactctaaataattgttttttttttttcatttttttaattgagacagagcctcgctctgttgcccaggctggagtgcagtggcatgatctcagctcactgcaacctccgcctcccaggttcaagcgatcctcttgcctcagcaccccctagtagctgggattacaggcacgtgccaac

SEQ ID NO: 13840 - DNA, 1051 bp, Homo sapiens
atcctcccacttcagcctcccaagtagctggaagcactgactgggaagagttaggtttgggtgactcagttgggtgaaacacagagaaggcagcacagtacaacacatgaaataaccgaagcagtttttttattaattccagagagaagagggcagcacactttgcagggctaactggaagggagagccatcaagaagacctgtgcttgactgatggttggggagcaatagcgagagagagggagggacctgggagtggaagcctttattgggatgtaaggtgctatctgagcaggtttcctacagggaggtccactttggtttaatgcaagcagccgtgagtgtctgctgtgactgagaggtggtcactgatatattcacatggttcatgcggagtatgggggtctgtggggtgagtcaagtaggttatatctagctgtcccataatgaagtggtccccaggagaaggctgaataaggtagataccaggatcagtcacattgagaaactgggaggaggtgaactggaaactgctgagggtgactgaaccccacttttgatatcagaaagtccaatttatatttaaaagggatgctgaggcaacaaaaaaattgtaagaattcactataatatacttgggtatatataggcataggtccttagtagattctgtttagcactatctaaaccagattcaaatatcagcatttaaattaaatatctagcatggaaaaaatactattccttgaaaattttgatagaaacagcaagagaatgcaatagtattttcttaagcctcctcctttgtgtcttgagtttattgttacagactgcagagtgctatgtatttaatggttataattgtttgataaatatataaaggaataaaggaatgaactttaatttctttggaatgattagttcttggtatcagttttattttgaaattttttttttctttttaggatcttcctaaatactatgacaattgtccttttttcttctggtttaacacaccttttatacaaaataacagatatagatataatat

SEQ ID NO: 13841 - DNA, 1059 bp, Homo sapiens
cagtcgataatttttccttccctgcaggagacatgtctatgagtggctgggagacctgtttaattctgggatatagaattaagatggccatctgcctgcaagtagagataagctgcattctccgaaatcaactttgttcatgataaaagtaacattctggcctccatatgccatattctttattgttaatttcttaaacagttaacaaattggttagagaagaggcaggctatctattgccccatcctctacttttttttttttttaaaactaaatacctaatcgttatattgttattcttttgactattattgctctccttaacacatataaaaatagaccaaactgacatgatcatattttataaaaatacgattttcttttcttgaaaaggaaacagaaaaaaggataaatggcttaaattgtctacttatcataactagaattagaaatcccagtctttgtggctgccaaaaaaaaaaaaaaagaataaatgaccaaaaaatgaagtcaaatgcaagtctttcatgactctctccctgtgactgttagtatgaggaaacttaatagttctgaaaataaagatgtaaatttctgcagaatgtaaaacaggataaagtaacaatagccaaaatgtggaaacaacccaaatgttcatccatagatgaatggataaacaaaatgaggtatatatgtacaatggactatgatttagcctaaaaagaagtgcaattcttatatatgctacaacatagatgaaccttgagaacattatactaagtgaaataagccagtcacagaagcacaaatatatgattctatgtatgtgaagaacctagaataggtaaattcatggagacagaaagtagtttccaggggctggtggtaggggagaatagagagttagtgtttaatgggtatagactttctgtttgggatgacttttttaaaagttcaggggatggatagtagtgatggctacataacaatgtgaatgtacttcacaccactgaattgcacacttaaacatggttaggatggtacatttttgtgtatttt

SEQ ID NO: 13842 - DNA, 1031 bp, Homo sapiens
aaatgatttcatatttttcttattatggaaacaattattacatttctttgctcctaaagaaaataaacacttgagaccacataccccacatacatataccatcacttgatgtctgattaaaaatgttggcagttttccctatgttaccactttgttagagtattttaaggtgcaaattttgaaggttttttgctaaaggcagatggtataatcatctgataaaaagaagtcaaagaacctaggggtgaatgggcttctctttttgttaagtctgccttttgatttttaaattctttttgcaaaactaacgatccttttcatagaaaaaattagaatataacattctaattcaattcttcatttaaactgttttatataatgttatggtgcttactttaatatttgcattaaaaatgctgattttagccacttaaaaatagaggtgagagcattatttgaataaagaaaacaaaaagtagatataaatgctatgtgattgtgtgtttaagggtaaggatagactcaggggactaaccttgattagagagtaaaagatgctattaggatactattaatttttaattttaataagtgaacttactccagcattcagaagttgttaacttctgcttctttttgtgtgtgtgtgtgtgtgtgtgtgtgtgtgtgtgtgtgtgtgtgtgtatgagacaagagttttgctctttttgcccaggctggagtgcaatggcacgatctcggctcactggaacctctgcctcccgggttcaagtgattctcctgcctcagcctcccaagtagctgggattacaggtgtttgccaccatgcctggctaattttttgtatttttagtacagacgggaattcaccatgttggccaggatggtcttgatctcttgacctcatgatccacctacctcggcctcccaaagtgctgggattacaggcatgagccactgtgcccggcctttttttttttttttttttttttttttttgagatggtgttttgctcttgttgccccagtctg

SEQ ID NO: 13843 - DNA, 1050 bp, Homo sapiens
gtacaaactactataaagacaaatctgctttttttgttttgttttttaattaagctgaattttatgttactttattatgagggaacaatgaataatttaaattacagtttaagtaagttttagattcctttatattttcaaaatgaaataaaagatatacaatagaattaatattcagataatatttaactatcactcaaaatatgtagataatagccaggcacagtggctcatgcctgtaatcccagcactttgggagaccgagttgggtggatcacctgaggtcaggagttagagaccagcctacccaacatggtgaaaccccatctctactaaaaatataagaattagctgggcgtggtggtgtgtacctgtaatcccagctactcgggaggctgaagcagaagaatcacttgagcccgggagacagaggttgcagtgagccgagatcatgccagtgcactccagcctgggtaacagagtgagactctgcctcaattaaaaaaaaaatgtagataatagtttagtaagaaaagtagtgaactgaaaaccaagaaatctgactctggatctttgcttgccccgtgaatttagtctaggcacaaaatgactatgactaaattttcagtacctttgaaaggaagtccgtggaccaaatgagctctggagtcctttcagctgtaaaattatatgaaggtataatgataaatcagttaatgagaataaatggtataggtaggctttttccattactactccttttttgtgttttatttatttatttatttttgagacagagtcttgctctgttgtccaggctggagtacagtggtgcaaccccagctcactgcaacctctacctcctgggatcaagaaattctcctgcctcagccttctgagtagctggggctacaggagcccaccaccatgcccggctgatttatatatttttagcagagatgggatttcaccattgttggccaggctggtctcaaactcctgacctaaagtgatccacttgccttggcctcccaaagcgctgggattaca

SEQ ID NO: 13844 - DNA, 1072 bp, Homo sapiens
actgatctgtacgtggacttagtggatcctctgttatttaccttaaaattccaggttctatctgctttggttgccttctttttaaatcttgtcatatcaaacttaagaaatccattaaaagcttggccatttgtgaaactaatatacagaggttgcttgtttatttttggtacacttggaaaagtctttatcaaaggagttatgtcttagagtccccagctacaagcctgattgccttctgggggagatctgactttgcataaaggctgaggccctcttcaggttaagtgaaggaacaaccctgcctgtggtctaacatttggcttatctctttgcccattcttggcagcaaggaggctgatagttgttatgaaagaggagtcagtgtggagagtaggaacttattactcttttttgcaaaatcttcctttaactgccccctagccatcccacagaggcccagggataacgtcctgaaaatgaataagatgagatcattgtatagggtagaacatggactagatgggcttcagaaactttcagtggtgaattttagtagctagtgtttagtgagcatcttgccccatgcactgtgctttatagggattatcctatttaattcttacaacaatcctaagaagtaggtgctcctaattctcactacaaaagagtcaagtgaggctcagcgaagggaagcaacttgcctgtaatttcatagctactaagtgataaagctaggaattgtaacccagcctgtgcctttaaccactaattgaataatactagccactgcaacatgtaagtggtgaaaagtagtttaaaatatggaagaattattatatcctgcatttatgattttggcaaaaaagtgttactaattttagctaattagtataattacaggtagatggttcttatgcctggcatacctgtatatgtaccttttaaaaaaaacagctttattgcaatgtaattcacataccatataatccatctacttaaagtgtacaaatcaatggttttaagtttatacagaattgtatgtctgtctccataatcaattttaggacat

SEQ ID NO: 13845 - DNA, 1047 bp, Homo sapiens
tctcaaggtgttgggattacaagcatgagccaccatgcccagccttcatataaataataattaaaaaaaaatgttggccaggcacagtggctcacgcctgtaatcccagcactttgggaggccgaggcaggtggatcatgagatcatgagttcaagaccagcctggccaacatggtgaaaccccatctctactaaaaatacaaaaattagacaggcgtggtggtgggcacctgtaatcccagctagttgggaggctgaggcaggagaatcgcttgaacccgggaggtggaggttgcagtgagccgagactacaccattgcactctggcctgggcgacagagtgagactctgtctcagaaaaaaaaaaaaaagtgtttttcctatttctgtgaagaatgtcattggtatgttgatacagattgcattgaatctgtagatttctttgcgttgtatctaattatttattttatgatttatttttatcatctttcctaatctccttgaggacgtgtcagatttttgtatctatgcagagatatcagtagttattagagatgtttaaggattaaataaaaagcagtatactgtacatgttttactttgtaaaccataaagaacttattagacattaggtattgctagtaaataataatataaataaaccttattgtgatattgtacaattcctggatgtgtctttatagtaaagtatttttttaaatctagtaagtgcccattacatctactgagacaactttgaattcttgaactttccaagagtacaacaaagcgataaagcagaaaacacctctgataaagacccaggttcggcccagtgtggtggctcacgcctgtaatcccagcaatttgggaggccgagcaagcggatcaattaaggtcaggagttcaagaccagcctggccaatgtggcgaaaccccgtctctgctaaaaatacaaaaattagcccggtgtggtggcgtgcctgtagttccagctactccagaggctgaggcagcgggagaattgctggagataatgacactgtg

SEQ ID NO: 13846 - DNA, 1051 bp, Homo sapiens
ggtgagtgactgtagtcccagccacttggggagctgaggtgggaggatcacttgagcccaggaggtcaaggcttcactgaggcatgttcgtgccactatactccaacctgggcaacaaagtaagaccttgtctcaaaaaaaaagttaactgcctatttcagcaagagggattgggtagattcagatgtaagtgttataagactgtgtgtctgtcccaaataactaagaagatctaggcatacttctagatgaataaatagtaatttccagttgagatccattaacaaattggagctttagttacctagaagtaatttagttaggtttcatcttcagaattatcccacattcaaatacttctcaaaaacacatttcaaaacaaaaacattcataaaataattagtatagtattaacatccatgaacttttaagtagctaatagattgttgaatctaaccagatttactggtatattcagtgtttcatcttgcttcctgatcagtgtttcatgtagcttccttagaattcttactgtaatggtagcaatttctgaatctttagtgatttttgttgttgtcattataaactagatatacattcttcaggtaaagctttcaaaatttaacaatgtaaatgtggaaactgctatagaaagtgaaaacatagatcttaacccaggtttttactttcatcatcccttggctctctttcctgaaatacttcccatagtgtatgtataagcagtggcatggacaaagaacaaatggaaatagaagtcataagatttcattgtctgagggttcctataaagtcatgtaattagaggtctcttaaatttttattatataccttttgatctatattattattgattcattcagcaattattgcctgttacatattattcttgatgttgggatatagcaatgaacaaaaaataaaaactattcataaattatatgcatatattttactaattaacctccatttaaaatgtattataattatataaagattagagaaacatagataaactagattagttttcgat

SEQ ID NO: 13847 - DNA, 1056 bp, Homo sapiens
cagaagaggaggtaaagctcttgaatgttgttctcttatgtcccacaatttaattatatgatgtaaaattaacaatacttggccgggcatggtggctcacacctgtaatcccagcactttgggaggccgaggcaggcagattacgaggtcaggagtttgagaccagcctggccaatatggtgaaaccccgtctctaaaaatacaataataaaaatggaaaaattagccgggcatggtggtgtgcacttgtagtcccagctactcgggaggctgaggcttaagaatcgcttgaacctgggaggcagaggttgcagtgaaccaagattgcgccacttcactccagcctgggcaacagagtgagactctgtctcaaaaagataaaaaataaattagcaatacttaaatactgatataaagtaaatacatcttatattacatagtaaaggaataagaggaaagaacacaaagatatttgctttgttatatctatgtatatatacacacaaatgtattctgaacaaaatagggagaatatagtcatgacagttaaaatcctcatttccctaactggtcaggtggttatagctggcattgattactgccttcttgtactacatattctgtattctgtttgccttcagcaaacgccttagctggtcgtggttctttatttggtggggtgacccaaagcttcattcttaaagggtctgggctattagtagaccttcctggattgggttgttgtagtttcccgttgacttatttaaagggcatgataatacaaagagatgccccaagggatctcctgtattccagacatactcttctttatctgcactgtgagttagtagtccagcttcccattcctagtttagattaatcacccccagctatgttgactcagaggcatgaggagcccaaagtggctggatggtagttttgactccagttccatggaatcattattgtgtttcctggtggaagtattcctctctctctggaactaagacttctaggccaaaagagcataaagttacgggaacaggaagtaaaaat

SEQ ID NO: 13848 - DNA, 1068 bp, Homo sapiens
gcagtttcttatttcaccaatatgtgagtgttagatgctgggataaaacaatgataaaagctgacaagatcctcatgaagcttgcagtttagtgggagagacggacatggattgaacaagtaaaaagtgtgcttaagtgtacacgcatggcagggagacccctaacatagtgtagggaagggctggattgagaaggcttccctaaggacatgacgtttctgtagagatccaaaggatgactaagccttatgtaagagaaagggagaaaagggaagagagagtagattgagggagtagcattttgcaaatggtctgcaaggaggaaagagtgtattttgggaaatgaaaggcctggtgggctgtcatgtagaaagtgagatgcaatgggagatgaggctgcaaggtatcaaatcatataagacattctaggccatgttagatattttgaattttatcttcagcagagtgggcagatattgatgggttttaaatgagggattatggaggtggaatggcataggagcaagaaaaatgatgtacttttttgtacacttggtctttaactgtaaactacctgtttagtatggtgcttgaatgttggaggggattgtatattggccaccattgtgagctgttcatatggtaaagtgtacttaaagggtgaacttaagagaattgtcaagggtaattgaggataagtgattttcaccttgatactgtgatttggtagtttgaagccctagaaattgatacttgacttgggagagtctggagtaagaagaagactttgagcttttaggacctctagtggtaagtggtgaggaggtggggcagagaaaactgagaaagagtagtccagaattggggcaaaatcaggagagtgttatcacagaagccaaagaagtgtttaaagtgataggtctaacacaacaagttctgaaagtgttcattggatttagccctgggaggtcattaactttagttagatttagtggcataataggggcagaattaagttagattaggctggttgaagaatgagcgggagatgaagaaatgagtaggtga

SEQ ID NO: 13849 - DNA, 1057 bp, Homo sapiens
aaagcagatgttttggttgttagtatgtgtgttcccagactattttgtagctttaactgcacagtaaatttgttaatgtgatctgcgtgattaaggattaattaggcttaccttgttaaaaagaaagaaaaagcctaagtattttaaatcgtcttcattaattcaaatatttgtgtgtttgctacacaccaagcaccaccacatgcttttgaagttactgatgtttgtattctttatgttagctagtggatagaatactgaatggaataatattttggtctttgtgattagctgtgtgatgagacttttcaccttctctgttctctggctttagagccatacatttttgataacacgtatcactcacaaattttaaatagagttacaagaattgttgagcgattcctgaatagataatgaaagtggaattttcatttaaataagtaatagtgtgtcattattaagaagcagttactaaagaattacagtagttgaaaatttggaaagaaggaaagataactcggataactctgccttaattgtccccagagagggcttaacttttgactttttcttcttttttttgttgagacggagtctcgctctgttaacccaggctggagggcattggcgcgatctcagctcactgcaacctccgcctcccggattcaagctattctcgtgcctcagcctcccaagtagctgggactacagacacccgccaccacgcgtggccaatttttgtattttgagtaaagacaatgtttcaccatgttggccaggctggtctcgaacccctgacctcaggtgatccacccacctcggcctcccaaagtgctaggattacaggcatgagccaccacgccaggccttgaccttgtattttgtaatgagtttacaacattgtaccaaatggtgctaaaatggatgttattttcaactgtgcactcagtaattgcaaatagttgtactatatacctgggggtgaacacaaaggaagtagttgcatcatctctgtataaaacacagatttatctttcgtgtagttgtgcattac

SEQ ID NO: 13850 - DNA, 1074 bp, Homo sapiens
tgagtctagtactgaatgggacttagatggattcagtgagctggactctgagtcaggaagttcaagttctttttcagatgatgaagtctgggtgcaagtagcacctcagcgaaatgcacaggatcagcagggttctttgtaaatagtattttgagacactaagatgtttctactgctacggaatgtattttaaacacatatcgtttctttttcttggaaaaaaagttgattaggaccacagatttggtttagaaagggtaatattttgaaatactacaaggtttagacagtccatgaaatcgacctgtttaataatttaccatcctgaaagtccagaattaaaatatggaagcaagaactatataattgattaggatgcttggtaggtttttttcattgttcaaatattcattgcacagtggattgttttgattagttagtatgctttttttttaattaattcagtcttctgttaatttttaagttttggttagtgccacaaggaatttaactttttgatttgtataatagaaaactgaactaggaattgttagcggggttttgaaggatgtgtactttccttcaaaataaagtggtagattttcaaaattttacactagtcagttctttatattctaagttaaatgtagtttgtaaaattattttggttttcttctacaaaggaaaaaattggatttatatatataaggttactgcataatgatttcattttgataatgtgcagaatggcctcataagctcacagaaagtaaaaaaaaaaaaaaaaaaaaagaaaaaatcaggattccactgttttaaaagaaatctcagtttttattttggaatataaaatgtgtatttggtatatgtgaccaattttctatcccaaaaaacacccattcttagtaatgtcatgaattaaacacccttctaaaccaaaaaaaaaaaaaaaaacggtaacttgctttttatgtttgtgtttttaatttatgcccaatacatgctttactgactcagaggaacaattcctggacatataattgggtaatgcaaatttttatccactggtcatga

SEQ ID NO: 13851 - DNA, 1050 bp, Homo sapiens
tacaataaagatgaattaggaaagctacaaaataccataataaaaattgaagtgggtcaaaaaaataaataagcagtttttagtatataacataaatctatcactaaggcatacatacataactttttgtttttcttttccatatattatatgtaaaatggcatctctcagagtaatgggatttctttgaaaacagaatgggtaagtgtgtatataatgactcagctggatcagctaggtggtgatccttttaaaccactggcaaaatacccctctccagtgagatccattttccctgcatctggtaagtctcatgccatgtgtaaatgctcacagcttggtttgcaccagaaaaattctgtagctataatgcagtccagctcctttacttttctttaagagttttttaaaaaattagttcttcttcccaactagatggatgttggaatccatctgatggaatttttgccaaatactcacagcatttatcaagtccagtggcctgaggttatgtgataccttaaggacttaggagaaaataatttttttttctgtcatgcagtccctggtgtttgtcacaggatagtaaaaatgtctcaattgttcatttttagataacaatcaacagagacagtggtgaagatgtaagctcccccaaacacgggaaggaggacccagacaacatgcctcacgtgggcggcaacacttgggctggcggaacaggttggtagcacaggcattctcctgagtcagccttccccaggtttcccaagcccattaggccagcacatcgcccctgagaagactcagagacgggctttccttctcagcctccctcattactcagttggattgttgtcttgccctctgccccagcgtgacatcaaggcatgtgaagagcctggcatttggagtcccacaggctctgccaccctgtgacctaagaacatgctgaccctcctggagttgcttcatcagtcaaagggggatagtgtgaactaccttaaattgtggtgaggattaaatgagattacgattgttaagcactga

SEQ ID NO: 13852 - DNA, 1049 bp, Homo sapiens
acaactaatgacaaattcttgtcatttcactatatttggaagttgtaatataaaagcatcgtcactaggctagccagaaatcttgagtcaatgtcctttctatcagaagatcttttggctatcaaatgaaaggcttttatgaaagaattcagaaattttagtgaggtattgtagcacagagaaatttcctctgactaaaaattaagaaacccaaatcctctttctggttccatcactagttggttttaagtagtcatttcacctctctgggccttaatttctttttttttataaaataaggtagattgtaagctcatccttcaggtccttccacaaaaggcaacaatgaatacagggtctaaaactaaaagatacacatcaaagaacttctccattgtagtgattcttcttttaattaactgctgagtatgtgctagctgcttctgatacattctctcacatgatcattacaaccaccatttcaggtgtatatattattgctcccattctgaggttgggagtaagtaatttgtccaggctcactctgctaacaaagaacaaagctgagatttcagcctaggtttatctaactcagaagcccgtgtttgtatgcctcttccccatgtggcttccctaggaccaaaagattagttttaatggaagttgtgcccttagagaagaaaacagatgtctctgcttagtagaatttagactaaatgcttataggtgccagacaggcaatgtggatggggacacaggccaggagggtctcaggtgaacaggaagttgtgccccatataggaaggcagtcactacctagctgttgccatgtgagaatctggccccaatttggccttatcctcccattttcaagagaagaccaaaatctagatttttaagtgaaatctcattaatttgaaattttagcagcaaattcagaatgtttcacactgggagtaatgacagtacacacatttgtgggatggcaggacctgctgatatctcttttctcacaccagggtggagcaggattgagaaatgaagcccca

SEQ ID NO: 13853 - DNA, 1046 bp, Homo sapiens
tatttcttaagtattacaatattgtctttgttttgatttatcactataaccttcactgtcaggttgccaagaggttgctgctttaaaaaaaaaaaaaaaaagaacaaatcttgagcttttcactgtttttatcatttgcagagtaatgttatcctgttgttagatactactggccgggcccttcatcgtctcatcctcccttccgagaagtttacatctaagaaacctttctggtggaacaaagaagaagctgtaagaaacaccacatttgtcccacaaattgccaaggatttctatagctttctaaccagaaagatgcatgcatgcccatccctttaagtgccttttttgttgtaatgcacaagagaatttcctgttatgcacgtatagattttaacatgatatatataaccatagatatgtgtataattaaatatcaataaattctttttatgacattatacttgcatgaagatttgccaggactggactaacaataagagaaaattaaaaactatttgaatatcgtatttttaacaaatttctgatcatggagtcaatttaacctgttttccagttatgtagttatgttttggatttatatgatgaaactgtgagtatgatacctaatttcctccattagacaaataagtgttttagtttattaactaaattaaactagtaagtaaatagtttaggccaacacaagagaatttattctgccattcagaaaaaaataatggatttaaaataaggtttaccctctgccctgcaagtcaacatacttaggtcttaaaagactatgaaaagagtgattttttttaatgtcataaatgtatcctaatataagaaacaaagtgtttcccatgtgtttattttatggtgtaaattccatggttaatcatcagatagcctgttatttcttaacaatgtttggtgttgtttttaaaaatttattctgaagaggctttagtacaaagttcacagtaaattttgatatatagtttaatccattttaccataagagtcttagagcagataaatag

SEQ ID NO: 13854 - DNA, 1031 bp, Homo sapiens
gaacataagattagaaaatactaagatgcaactgataaagcagatggcagaaagagagaagactttttttcagtgaaatgtgaagaaagatgaaggaaaggaaaccctggccccagaactagtctggcaacttctgtgaggaggaagagagccagagatgtgtggagcaagctgacaacatctgctttggctctgagtgacgctgggcaacagcactaaactacagtgtcattctgggtatcggggagtatatttgagaagtgcctgccaagaatagcaaatttcccaaaatcttccatctcatacatctagattactctgcatttctgtgatctctgcaggacctaggtgggagaggtatacaagtctaagttatgaagtggaagccataatagctaaatgcagaaccaagcacagaaagagaaaatatgtacaaatactcaggtatacatcatttgcagcaaagccaaattaatttaccaacatcctgtgagatggtagggaagcgacattctgaagtttctagcaaataaaggaagatattactgggaattaataatggtatccattgttactaatttcaagtatgtaaaggggcatttgtattatctctctttaatgtgctggctttttcttttagtacatacaaattttttttttttaagaccaaatttcgctcttgtttcccaggctggagtgcagtggcgcgatcttggctcactgcaacctctgcctcccgggttcaagcaattctcctgcctcagcctcccaagtagctgagattacaggcatgcgccaccacgcctggctaattttttttgcatttgtggtagagacggggtttttccatgttggtcaggctggtctcgaactcccgacctcaggtgatccgcccgcctcggcctcccaaagtgctgggattacagacgtgagccactgcacccggccccatgtaaaaatattttaagggatttcttggtttacttctgacctgctctctctaaaattttttctctctcaggtctttaatg

SEQ ID NO: 13855 - DNA, 1033 bp, Homo sapiens
gatgaaagaggtagtaagaactagtgggtttatttcatgtgagctagttgcctaccctttattttataatcataggctactacttaatgttagttaagaatcttgcacatatggtgttgatcagaaaagtaattgacagagttttttagtagagtaattaagtcagcacaaattcactagaaaatagttttcaatatgcctaacttattgataatgcatctaataccatctttgtctataaaaatagttaattataaattcataggggataataatcacttttaaattactgttcaattttagccccaaaaggagacactatctttctgtagaaaaaaatgtgttaaatataaatataaatcactgattatatattaaatataaatcagtgattagcaaaaaaagttgcatatatatatatatataatctccaaagtgtatactcatccatatttattgattctttgaagtcattataaaaacttgtcaggatatatgccaatagaaataaattattaaagtatcaggaatttctaaaagagaaacaaatatttcccttctgtgttaaaagaataagatggacttatcttagaaattatattatccgtgcattggtttatattattaatgaataagtaaattattttccagaagaatgactgggtggcagttgcaaatgcacacttttttttggcacaatgctattttactgatggattagcagtccttatgggcatttgaaactaggtcagtaatttaatgggtataacaaattgtctgtataagagagttcaagagatcctctttaatatgcaaactttctattataaattttctttaatatgcaaacttaagttatttacttcgtttttgtaaactccctttatttttagctggaaataagatggcttttattaccattaacaaatttatataattagagtactggctttatggaaactaagctcatgattttaaaacaatttctttttctactcttgcatgactataaataaaaattaaaatacatatt

SEQ ID NO: 13856 - DNA, 1032 bp, Homo sapiens
aggggaacacatagcaggggcacctaagctgctctacaaaaggtcagggaagggatctttcaagaagcaccatctctgctaaaaaactgaagatcaagtgaaaggtaggcaggcaaggaactttcagtcacagcaacaacaatagtgacaacaaatatctaaagctggtatgtaattacacccctgctatctgccagatacggcgttatacactttccaagtgttctatcagcaatccttttgggtgggttttattacttacccacaatcacatggccaataaggggcaaaaacaagaatttgaatcctgattgatatgactccaaggtcttctttgcactactccacagctgcctctcaaagcaattagctgatttttattatatttcttctactaaaagcaaaacagttatttgatgacgttaagtttatcttgtattttattgtcaagtgctatttattcctttttaaaaaacagatacacattttacaattttaatagattgtagtaaagtttggcatttggtgtacatttcacaagtataacgtccaggtctgaatatcactgtccagtagtgtcttatacatagtagatagtcaaaacaacacaattgcaactttgtgctttactttgagtaagaagtagggtagtttgaaaaaatagctgaactcttcaaagacgctacttatatttttaaagtagttctaattctctatgggaaataatcttagatagaaggcaaagatacaaaattgatccccttaaaaatatctgaccctacatatcacctgcaactttcttacacacattttggcaagaatatccacacttgatgtgaatgttacatctcatcatgtaaggaggttcttaacatcaggatagccaactgttaatatttttgaagatcctgatctaaaggagggtcaagtaaatagtaaaaagtagatttaagaaatataatggattgccttaatgccagcagaaatgttcaaaatcccataaagtaattcttgagtattcttggcaagcgg

SEQ ID NO: 13857 - DNA, 1050 bp, Homo sapiens
aagataacatcaccaattcaggaagctcaatgaacttcaagcagaataaacaaaaaaaacactacatagcatataatcaaattgctaaaaaccaagagaaaaatctttaaaattaccagaggaaaaaagacgtattacctataggggaacaatgataaaagtgactgctgacttctcctgagaaataaatatgaaccacaattcaattgaagtgctgaaagaaaaaaaatatcagtatagattagtatatttggcaaaaatattcttcagaaggcaaaataatgacattttcagacaaaaactgagtttttttatcagcagacctgtgtaatgcaaaaaaataaaattacaattcagaatttcctatgaacatagatgcaaaaatttttaacaaatgttaacaaatcaaattcaacaatatataaaaagaataatatgtcataaccaaggaggttttatctcaggaatgcaaggctagcttaacatttaaaaatcaaattatataacacatttacagaataaataaaaaaccatatgatcctctaattgccaccagaaaaatcatttgagaaaattcaatatccattcctgataaaatatcacataaattacaaatatcaggaaacttcctcaatcaagaggcatctataaaaagcctatagctaaacttcatatttaaaaatgaaagactaaacatttttctcatgattaggagaaaagacaagaatattaactactcatattatgctggaggtgccagctagcacaataaagcaagaaaacttaataaatggcatgcatgttatagatgacacaattgcatgaatgtgtatataaaaaaccttaagaaacatataaaaaaagcattagaactaataagttaaacaaggtcataagatacaaggaaaatgtacaaaaatcaattgtattccatatatatatattccatatattccatatatatggaatatatatactggcatatatatattccatatattccatatatatggaatatatatactagcgtatatatatatatatatatat

SEQ ID NO: 13858 - DNA, 1040 bp, Homo sapiens
agaatgaagttcaggagaaagtaataagttgagttttagatgtgttgaatttaggtgactggggaataacaaagtggtttgatcactcagaaatagagggctgtagttgaggaggagttttgctgttgaagattggtgtagagctggtcattgaagccatgagatagatgagaggatttaaggagagcagggtcagaagtgggtctttgaatgctgacatgtgggtatccaactctgcacacagccctccctcaaccctcaggtgggtgcctgggtacagatagtcacaacctgccccataccatgaatacaaggggaagcatgtaagaaggtagaaggaaggaattgctacaggaagatccagctcagaaaactatgggagaaattgttagggaggtaggaaggaatcaggggaaatgggtaactgggagaggagacttttaagaaattgtctgcagtactaagtggtcaagaggctaagaagagaattgtattggcggtgactttagccttagctaaggtttgttgacttgaataatctagttagatataatgagggcatgaagtagaaggacatgagaattgtaaagaagaacacagatatagtttggattatttttcgatatttacattgcttttttctttggctattcaggtacttactccaacttttcaacgtagattagcccatttattactggaagagcttagtgttttctggaattggcactgacttttcatcttagtgaaaaggaagaggtctccatgctatattcccaccagaactcagcttaaaatgatgtatatcttggtttgcttaacatagtttctgcttatacttgttgtcccagcataattattaatagtgtctctttttattcttaaaagcatacaccttatatccatttaaaagtattcaagaatagacaattatatactcacctcacttcaagccttattaaaactctagctccatggcatatctgaaagcatttttgaaaataaaaacgaccaagataaacatagggaatactcatttg

SEQ ID NO: 13859 - DNA, 1030 bp, Homo sapiens
atcatttagttacttggaggcttagtagaaaacaccaaccttgaaaaccaatctgtggcaaatacttttacaagatcagtacactaaatatcctatctgaatatttggtcattgtaaaaagtaataaaccatatctagggggaaaaaaccataagagatttggcagatacaacatttagaagaaatagaacttcaagaactaaaaataatagaacaatttgagactatcaaataagtatgtttaaggttattaaaacttacgaggaattaaaaactggatgactgtgatagaggagaaaatgaactgatagatctgaaagaaaaatcaaacaaacagaactttttcaattgaagaatatagtcattgaaagaaaacaaacaaatgggcaaaccatcaaacaaaattcaataagcacttaattagtaaattagactattgaaaagagaatgaagtggagggaaaatagcctgggatgcagcacagcaaagtgaagagataggaaacctgaaagggttgttaatagacatgtagaataagataagaaaatccaacatatgtctaataggaatttaagaggagagaataaagagactgagggagaataattgttcaaagaggcaatggttaggagaattccagaacagaaagcagaaagacatgagtctacagattgaagaaatatatcagttcccaagtaggacaaataaaaacaaatcaacacctacatacattgtgatgatactgcacagcattaaagacaaagagaaaaacttataacggaaaaagatacaagagaaaaaatatcaagccgacaactttacatcagcaatagtagattccaggattggatagtatcctgaaagtgttgagagaaaataactatcaatgccagaagtctttgcctagcggaatacattttcagctaaagactgagcttactacgtttagtagttttttcagcactacttaaagaactactaaaggatatatttcagtaagcaggagactgaatgcagagaaaaagactgg

SEQ ID NO: 13860 - DNA, 1042 bp, Homo sapiens
ccaagaatttacagaagactttaaatatttggataaaaatgactgtaaatgtgtttaacttttctttgctataagtcgcacaaaatgtatctgaaggtgatagaaaagaaactatccacattagcacatgtaagaaaaaattgttcatattatatagctccagttttttacagtagataaacttttatatgccacaactattaatagtttgcttaagtctgttacactattttattgttagcacattgtgtgtgtgcttttaaaaattgcttttaagtgctatgctattgtttcccaattcctgtacctcatctgatgactgtcctcttcaatttcctccattatcaagcctctttaaataaaatgagtcattgtgatggtcctagcatagcttttcaggaaaactcatcaactgctagaaaatgcacattattgataaacatctctgcatgttgagtttgcatgatctctcattttaaaattgagtcaacacatggatggttaggtcaccataaaagttggcatatgaaaacacaggaatagagctgattgagttaaattctgttattcaggtggaaattactgccattatgtaaacgaacattttaaaagcggaagaaaatgctaaatataaagtagggaaaaaaacctctcactcttactatattatgtaatgagtaatggaaaaaaatcctaaaatgaccaaaaaaaagctttctgaagagctttcgttttaggaattggagaagatgacttctctgttactatatggaatgttaagttcagacggaggtgactctataaagccatgtaagctaccttgcatgtcttaaaaattaattcgtcatgttctttgttgggtggtggggatttgttttaggatatgacagcgcgtgatctgctacagcagagatacacccttccaaatggagacactgcctggcggtcctcaccccttgtgaatgctgctctggaaggcaagctggtcctgctggatggcattcaccgggtgaatgcgggcacgcttgctgtattgcaaagg

SEQ ID NO: 13861 - DNA, 1028 bp, Homo sapiens
catattattttttccttagtttcatctttccttgtttagttttccttgtccacttatgtttaattttataatacattatattaagcatatttttgcaactcaacttaaatactttctgaaactgttgggtttatatatgtggtagaaatgcgtattttttaaacctggttgaagtcatactctatatgtactttgatattctacttttgctacaagcaatttaatttcctataagacagttatatgtgcattataatgtaaaattttactttagtatcagtaagagaggtagctcaaatttctttacacactaacaatgtactataatattttcagatttttttctgaatgacattatgccttggaaaaataattctaatgatattctagatactgtacacacaaccactttgtacagttattttattgagtattgactgtatctggatttctcaagggaattctcaaaaaaattagcttagatcatttaaaggtactaaaaacatttaaagcatatcattgctttaaggctcaaatttatgttctctgatccatttcttgagttgtgcttctcattttaacaggatgtttttattttcagtagagtttctcagttacaaatcaaaagaacataattccaattgacatggaatcgtaagagatacatggatgttttccagggatctgaatgaaagtgaggtgttcaaggttagacagtggtagacctaaaggaattaaatttcatgtcctgttattttaaaaatgttaaggaaatgcagaaagaggaagtggatcaggctctatgatatcattagtgctatttttattctcttaagttcaagagtttcaggataagaaaaatatatgcaaaaataaggatgttgatttttcttgatttttattagggtgtttcccaaatgcccgtatggaataagcacacttttaaaaagaaatttgcatttctgcttactaatagcaatgtgcatgtagatgggaagaatgaggaaatgatatatatttttcacaac

SEQ ID NO: 13862 - DNA, 1058 bp, Homo sapiens
caattcaagttgagatttgaagggcacatagccaaaccatatcactgtcatttgcaataatgtaaataaacctggaggacattatgctaagtgaaataagccagccactgaaaagcaaatactacattatctcacttaaatgtgaaatctaaaaaatcaaactcatagaatctggtggggtctttcatttggcttgctgctggagtccttaggtggactggcctggtgcctgactctgcagagaatagggtgctggttgtcaggaactggggaatgggaaaaaggggaaagtgttagtcaaagggtacaaagtttcagttaagcagaatgaataagttctcaagatctaatgtacattataatgattataggtgataataccatattgtatacttaaaaattgcgaagacagtagacctgaaatgttcttaccacaaaaaatatgtaactatggtttctatctctttgttgagcttttcactttgtttgtatattgttttcctgatatcatttagtagcctgtgttctctttagctcactgttcctttaagaccatcattttgaatactttgtcaggtagttcgtaggtctccatttatttagtgtcagttcctggtgctttattttgttcttctggtggttttggttccctgattgttagtgatcctcatgggcttgcattggtgtctgtgcatttgaagaagtggacatccagtctttatagactggccttgatagggaaagctttttaccagccaacccagccagacattctgggcagaccatctggtggggtctttcatttggcttgctaatggagtccttaggtggactggcctggtgcctgactctgcaggtgagtgggcctatcaactaagtctctgagggtggctctgaagcctgagttcatggagaacagcctgaacttgggttgatgggacctaacatagtgctatggcagaccttgaggctgagtcttcagagtccagtgtggcactatggtggtcctggaaccagggtacatgggtatgagctgggtcctggtccctgagtctagg

SEQ ID NO: 13863 - DNA, 1049 bp, Homo sapiens
ttgatgagcctttttaaaatatattcattggctgcatgtatgtcttttgagaaatgtctattcatgccctttgccaattttttaagtggggttgttttttctctgttgaattgttctttatgttattagacccttgtcatatgcatagtttgtgaatattttctcccattctggaggttgtctgcttactttgctgatagctccttttgctgtacagaagctttttggtttaattaggtctcacttgtcaatttttggttttgttgcaagttcttttgtggtcttagtcataaattctttgccaaggcccatattcagaacagtatgtcctaggttttcttctaggtttttatgttttaggtcttagatttaagtctctaacctattttgaagcaatttttgtatatggtgaaaggattggttccagtttcaatcctgtgcctatggctagccagttatcccagcaccacttattgaatagggagtccttgccctgttgtgtgttattgttgactctgtcaaagatctggtggttgtaggtatgtggctttatttctgggttccacttcccattccattggtctaggtatctgtttttgtaccagtatcatgctgctttggttactgtggctttgtagtctagtttgaagtcaggtagcatgatgcctcaggttttgttgtttttgttaaggattacattggcgattcaggctgttttttgagtctatatgaattttaggatagttttttctaattctgtgaaaaatgatgttggtaatttgataggaatagcatttaatctgtaaattgctttgggcagtatggccattttaacaattgtaattcttaggagcacagcatgtttttttcacttgtttgtctaatctctgatttctttcagcagtgttttgtaattcttgttgcagagaaaagatcttttactttcttgggtagctgcattcctaggtattttattctttctgtggctgttgtaaatgggattgtgttcttgatttggctttcagtttggatgttattggtgtatacaa

SEQ ID NO: 13864 - DNA, 1066 bp, Homo sapiens
tctcatgagaactcactatcatgagaacagcatggaggttaactgcctccatgattcagttgtctcccactgggtccctcccatgacacgtggggattgtgggagctacaattcaagatgagatttgggtggggacacagccaaaccatatcagtatgcaacttctaagaattaggacattcttctacataaccagaacaacattatcacacttcatatcatgttaacagtaatccatagtatcatctaatagatagttcatattgaaatttcactaatctttcttgtcaacagacttttaaagtggggtgaacagaattgacagtgcagataatgtgaggaaggatttgaggataatgaatactttctaattttgtagttataactgtgaagctaagtgaatgtggatgagattaacttaggaataaaaagggatcaggtactttgggatgaataaggtagagacatgtattctgtttcaaatgggggtctatgggatattcatatagtcacatgtaatgaacaattgagggttcaggtttagagctcaagaaagaagtcaagaccagacatagaagtgtgggagccatcaatacatagaagataaatgaaagatgggaatgggtaagcttacccagagaaagggcaaggaatgagaagagaaaataatgaatatttgcttttgtagacttacagaaaataccagacacctattggttacttttataagtcaattttaatgtcatatgtacatttcagatgttttctgtgattattttgaattttgctcattcctatgtatttttgctcctacataggattcctttcctatgatgccaatcaaacatgcaatccagtggctttatccatatagtattttactaggtcatgaagggaagatggctgtggaaggtgttttaaaggtgagtgtctgcttccctttctttcctttcttttcccattttcccttcccttgccttttcccatcttcccctcactcctttccccacctttcctatttttctctccccatccttatttctttcctttcccttcccctccattc

SEQ ID NO: 13865 - DNA, 1085 bp, Homo sapiens
agccacagcgcccagctgattattgggatttttaccttgttttcacatttggtaaagtacctaacatactgtatacacttggcaaacattgatccatggaataaattaatctaaatcacccctttataaaagatgaacattacttacagaaatggctatagtttgtgggcaaaccaaatagtaatactgtcaaattattgctcattatatttggaaataattctacaggaaaaattaaggtttgtaaaattggattttgattattattgcttaagtagtaggattgagtgccatagaagaagagctctgaggagatatatagatattttgattaaagttcaatttatttcttttttctcaaacttagattcaacaagtttcaacccaaaattaggtttaacaatgcacttctcatgggcaatggcattgtcagataactagttccaaatcatatgctggaaatttgattttatttttggaataatttcattctcttctctacaggagctgaccaaacgggaggtcgaatacattgccctgtcaagggacaccactgaaactgatctcaaacagcgacgagagatccgtgcaggcacagccttttacattgatcaggcaagttctgtcacactctagcccatgactgtgtactccaggtctatacaagattgatttttaaagtagaaagagagtagctcatataacagtaaaaggtagttgtattgtgctctctctagacagatttaatttagatttttagtttcactgttcttggaaatgtcttcttggttttgtactaaatgagaaatcctagatgaaattaatggttctaaaacgttaaagatcaatgtgctgatttcataattttaaattgtttcctactacttgcctatagaaatttgatttattaaaaaatgaattaaggagatttgatataggagattctctagcatatttattaaagtattttcaatctataggtcacttgggtaaaggggtattaaaggtagtgagagtatacacttccagaaactatagctttttctctggtgggagagtatcttaggtacagattaccaactaac

SEQ ID NO: 13866 - DNA, 1025 bp, Homo sapiens
tatatagcaacattttccagaatccaggcagcgagtgattaaactgaaaggcattatctaatgcccagcctgattttgtgattttaacaggtcagattacgcatctcactctttgatttgaacactgattgcttaaagatacttaaaaagtttcatatcccagagctgagccatttaatacctcaaagtaaaggtattcctttctcataaagatttaacctcagagccagctttgcacttctgcaatcacctcttctgaagagccagtttcaacgaatccattatttaagatacctgacttactagcctcttctcggtcttatctgtaaattagaagtttttagaatgaatatctaatttgtgcactgtgtacctgcaatgtacttcaccttcctcaagagtattacaaggtcaaggtctcaatctttccaaccatttcaaccatgtagctcaaaatagcaactgaaacaatttcaaatatgtggtatcttacattatttatttgatttataagaattccttgatcttttccttacttagtgatttcagatttttcagtaattgcttagatgcatcttacatttttattgttactttgaaatctctgttcagaacatgtgacaaacacactattaaagacttcaacataagctgtgtagacactgcatttagggtgaaatggaaataggtggtagctacccctaaattaggtttttacttaatagagatcctggcccattaaaacaaagaacacctattagactgaagatgtgtaagtcacagccaaatttcatgtcaactttatgaatattcgtgtattattttctacagaggtattttgaattgtatttttactgatcactactcataacaaaaggggttttatacccattggcaactttcaaatctcacatattctatggctttatcttaaatattacgccataaatacgcagaatgttacattttatatcctgaagagttcaaagtgttctaggacttgtgttcctaatcaataaggaacc

SEQ ID NO: 13867 - DNA, 1048 bp, Homo sapiens
attggtgtagatctaggttttttaaaccaatctgttggaacattcgtgttccactgttgtaaggtagagtggaggtcacataagtattatacttaggtggcctaacaatggtggcaaactctgggttaaacgtagataaattgctttctttgtaggttttcccaaggcctttactatgctaatgtgcaataagtagttctcaaagagtgggatctactacgtacaattcctaacttaatttagcctttaaaaaatgcctgcattaggacaaatacctaatgcatgcggggcttaaaacctagatgatgggttgataggtacagcaaaccaccatcgcacatgtatacctatgtaacaaacctgtacattctgtatcccagaacttaaagtaaaatttaaaaattaattaaaaaacaaacctgtgagcctctcgtgagacgctagaatattcactgtggagatccttctccactaccatccatccttctatgcctcatatgatatcctctgcatgatctagttcacaattttgtttatgtttgtgctgaacagtgtcactccctaatctcaaatttcaaaatttgggtcaggtgttgcctgaaaccttcttctcagttttctgtggcacacgttgtcccttttcagaaggccccacctctggtgtcacaagttgaaatctagaatatcaaatcccaagctttggcacctcttgtgtgaccagctgctctcttcctgtataacttaatttcttttccaaagttataatcatcaactggaaggagagctgaaaagcaggagctgagtacccaggttttaagtttcttgcccaggcctgcatgggaactaatagtgctttctggatattctctggccgtgagataataccttgcttttctataaactttttgaaatctcctttcctattgtcaacaatatttctttagccattattgactctggggtgatgcacatcttttactccaagcttcttagcatgccatttgtgctattttaaacacatgttccaaaaagacatcatacttggccg

SEQ ID NO: 13868 - DNA, 1048 bp, Homo sapiens
aaagtagatatcctccaccaagtgacatcgacatacttttctcaacaaagtcatttcagttcagcaaatatttatcaagcctactatatgtcaggcactgtgctgggcccttgggatatacacacgaatcagacagtttatccagaagaatcttacaatagacagtcatatcctcaacatttgcaatgtgttatttaaaagacatctttctataatttgccaattttttgagctcctattttgtaccaggcattactctaggtgttcaagaaatattctagatgttttctttctttggtattaatcagaggccactatgttctcatggccctctaaggcaaatttcatttgccagtattctgtttgagctaccccacttgctgattaccagttcgtattgtactcaagattatcgcagcttccagacctggattgagattagggtttgactggtaggacaggactgaccagagactatcattctaaactttagtcaaagagtactgtgcccccaggatgggcatggagactgtggaataggaatatgggattgttggatgagggagttaaggacaatttggggcacatgagaaccaagctgatttggggatgtggatcacagtagagacagattaaactggcaagccaaggctgaaggttgggcagaagttagatggggcttataaacaggagaattccaagtatttgactagaaggtaagcccagaaggcagaatagccatggagggcatagagaggtagccagttaggagagatcaacgcaggttaacaagcgggtgagttagagccatcagcccagtaggcatttaagcattctagaagataaggagccactgggatgtattcaaccatcaagaaactcaggtttaagaagaaaaaaaaaaaggaaatccttgccactgaaaattctggtaatctgggccacaaagctctgagcaataggcagtgagatggagaatttctgagtccaggctcattttgttctctcagcccagacatcattaagacagtgtctggcatgctgtagt

SEQ ID NO: 13869 - DNA, 1098 bp, Homo sapiens
ataactgctgccagggagcagctagtgtgttaccaagcagcttcccttcccacatttgcatttacctcttgtctcttcggttgtagaaagaatcttgatatatggaagtgagctaactgaagctgaggttaataaaagcaagtattaaaagaacataaaagggacttttctccctgtgactcaaacaaacaaaaaaaaaacaataagaagtatctattttagaagtatttcatgtttgttaggtaagactgtgagaatagaagatatgaacttttgccttatgaaagttactttactacaattttattaagaaattaaaatttgtttaacaccttttaattcaaaatattagaaaaggaaactttctattgattgttttatgatcatcagttttgtttccataagaaatacgcccatttattattaccttaaaaagaaactgcaggtagcaggattttgctccccataactagccctatcagattcaacattactgcccaaccagtgtctaaaatttgacttgtagcctgcataaatcacaatgtcccctgaaaccacttgtttctaggaggtattttgtttgatcgctccttgacccttttccaagaaacctaatttgcccaagggagtctcacactggaaaacagtgtttgcgtctgcttagggaaatgtgcgtgaaataatgacttatttagaactgagaacagaatggaatggaatggattgataagccagtttgaacaggcagagagcaacttgggcctctaaactcttataaaaggagctctgcagcaaagcactttgcctagactgtatctggcaaggcccatcttcattcaacaaacattgtctctgtgaactctgtgcaaaattcttactcttataaatgccttaaggcatgccatttcattttaagtttcacttacacttctaagatggtgcggatttctcgattcagccctgcagaccccagtgtagaaattgctctccaaggtatgttacccgttttaaactcagttgcgtccttttagatggctgcagaatgcttgttggtggcgatgccgctctgagttaaagtgctttcttggttgccaggag

SEQ ID NO: 13870 - DNA, 1069 bp, Homo sapiens
tcagtgtgactggtctaaggatgatatggtttggttgtgtccccacccaaaatctcatcttgaattgtaatccccataatccccacatgtcaagggagagaccagatggagggaattgaatcataagggcagtttttcccatgccattctcatgatagtgagttctcacgagatctgatggttttataagtatttggtagttcctccatttattttccctcctgcaccttgtgaagaagatgccttgcttcccctttaccttctgtcatgattgtaagtttcctgatgcctccccagccatgcagaactgtgagtcagttaaacctgtttcctttctaaattacccagcctcgagcagttctttgtagcagcgtgagaatagactaaaacaaagggatacccagatagctggtaaagcattaattattctcagtgcttcagtaggcactgagcttgtccttctcctgatgaaagggaaacccagatggactgttttggcatttgattagaatgataggcctgcccccaggggaatctgtgaaggtgtttccagaagagattagcacttgagtcagtggactgaatggggaagatctgccttcaatgtgggtggttactatccaatcagctggggttcccagatggaaaaagaaggcaaaggaatggtgaattctcgctctttctgggagccaggatggccttttccttctgctgttggatatcagaagtccagactctgttgtccttggactccaagacttacaccagcaatgcccctaggctcctgggcctttgggcttggtgtgagagttactactttcttggttctaaggccttcagacttgaattgagccttgctatcagcttctcttgttctccaacttccagatggctggcctatcatggaacttctcagcctccataatcaagtgagccaattcccctaataaatcccttattatacatctctctctctataggtcctatcagttctatctcaacagtcaaggttctccagataaacagaaccaacaggagagggagtgggaggggggagagagagagagag

SEQ ID NO: 13871 - DNA, 1033 bp, Homo sapiens
attacacagttattgatgtgatagtttactttttatattgtgcattaatatttttggtaatagttattcttaaaactaatctttttactttatattaggattataagtaatttatacatcttcattacaatatacattgttatgtattagtctgtgtatttacctttaccagccaagatttatattttcatatactttcatgttgctgtttagtatccttttgtaacaacttgaagaactccctttcacacttcttataaggaggacccagtgttgacatacttccttagttttcatttgtcttggaacatctttgtctctcatgcatttttaaaggacatttttaccagatatagtatttctagatggcaactttttttctctttcagcactttgaatataacatcccactctcatcttgcctgcaacatttctgctgaaaaatctgctaatagttgtatggagatttatatatgtgaggagtcctttttctcttgctttcaaaattgcctttgacttttgacaatttaatagtaatttctcctagaactctttaggttccacctatttgagttctctcatgaatttgaatgtccatttccgtcttcaggttttaaaaagttcagccattatttctttaaataagctttctgttcctttttctcttcttctgagtgtcccataatgcatatattagtttgcttgctgatgttgcttgctagtccatatattagcttacttgctgattagtctgcttgctcttaagtctagtggaatttcctcacacttttctttcttctttaataattcgaaatgacatatccttgagtttattctttcttctgcttgattgaatctgctgttgaaaccgtttaattttttagttcagtcataataactgcagctccagaatttctatttggttcttttttatggtttctatctctttgttgaacttctaattttgttcatttattttcctgatttgttctcttgtagctcactgagcttctttaagataattgtttgaatt

SEQ ID NO: 13872 - DNA, 1075 bp, Homo sapiens
ttggtagacagccgtcatcctcctctgctgtggcaggctgcttaaagcataacagaataggagattctgtgccttttatgaatttaagggaggaagataatgagctagtcatgttcaatttcttctcccaaactcaaaaatcagataaattattccttcccaagaagaagtgaatgagaagccagagactgtatcttctggtggagttgatgttctttcccctttatagaaacatgagaaatgagggaataggcatttatcaacaaaagggattatggaaccatttgcctagggacatcttgcctaaaatatacaatatgtaaaatgttgtcgtgcaaacagtagaatccttcctgctttgcccattagctgattccttctcaccacacctttccatccctcttcccctccacttctcacccagatggccactgagggcttcttgcttaagccacagtttctgtaatgagtctggatgaaaggcactcattcactctgactgactgcagtttgttctatcccgggcttttgcctccactgaaattgctctcgatgtcgtgctttgccctgcacacccctttcttcatattagaaaattcatctcatctgtttagctttcatcccacttaaccattatgagatgctaacatgatcgataccccttcttatttgaaattttaatgtccttggcctctgaggtcctccaggttcttccttatcattcttcccagtcttcatctatccacatgttcttcattggctcctaaatttggggccaaatttttagtgaactacagggttcttgccactttttctagtttttcatttctatgtgcatctatggcttccgctactgcctatgtgttgctgactctcagatgaccatcttcagctccaaacccctttcctaactctaagcccagatttcccaaaccctctaatttcttctgtggtacatctaactgggactttgaaacgtgactatctccaaatgaaacaaatggcatctcacaatgcagtctgctcctgtttttcattttcctttcttggataatattatcactattcccttttt

SEQ ID NO: 13873 - DNA, 1046 bp, Homo sapiens
atcccagataatgttctgatgatgtacatgtagaagcccattgactcattctcattctcaagtctgcacctggatttagatttttcaggtctctcttcttttttaaaaaggcatgattactatctgcttgcatgtgggtgcacccctttccacagccctcaccaccctacccctaccctccttgctggctgtattggtgggcatctggaagaacaccttgaactctttcctactgtaggaccactttgggaaatgtcagttggtttccagtgtcatatccctccacttacagtagaatatgggctgctttgagtttggataaatttaagttcttcctttctaattaagaattgtagtgtttttgttttgttttgtttttgacttatttgaagatctcaaagtctttgcaattcctccccttcaggtttgccttcaattttctttaccatgagccttctgagcaagcatagctctcagtgttctgtctcccagaatgcctgtgctccatttcccatgttcctccaccctgattccttgtggtctcatggggagatcaataacatagacatggatagtgaaagataaacaggaagttctgcaagtatggagaagacactgaatcccttgtgaaaatagtagaaatgcatctgctggatattggagactgaaatgctcattgtctttgcatctgggaagtgtactgtgtacttctcagcttcagttcacaatgggagcttagcactgcaagagtagaaagggagctgttaaaagttatctaatgtaattggatttctgatacataaatcttctttctaatatctccatcaagtggataattatttctgtttgaacacctctgggtacagataacttactcctaaaaccatctgtttctttgagaggatagaaaatcccacattttgttaagccaccattcttcctcatttactacttcaacccattatggaatttacatttaatgtgtgcttagtaggtcccagacactattctctacactttgagtcttcaagcaaccctatgacata

SEQ ID NO: 13874 - DNA, 1038 bp, Homo sapiens
tttttactttgaatgaaattgttatgtacccacataaatatataacatgtttaaaaataaaactcagagaattttcagaagctctgatttcagtctaatggttccaattatgaagtggaacatcaagtcaagatgagctatactgtcagtgcattagacagctctttgcaataggtgatgtttttattattccagaaaaaatatactgatagactatcctagccatcataaagattggaattgacatgtaagtactctataggtaaaaagccattctcacctgtcagggatatgtgtcagcaatatagggctgttatcaagaaggtgaacatgatctgggattgcattaaccagaatgtatgtagtacacaagaaccatgaaatttactcactgtgttcaccattgataaggtctatgttagagcctaattttgagctccatattttaaacacaatattaggaaattggagatgggccagagaaaagtaatggatgatttgaaagtaaaaaacttatctatgctgaaaattgaaagaaagtggaattctttataaccaagaaaggaaagcatagaagtagttttgcgtgggtcctcatctggagcaaaattgagactgacaagtgcttcttaccctaaatctatcttttaaaatgaaggtcttagcattagatgaagtggccaggatatcagagctgattgttcttttactatttcttttttttttttttttctgagatagtctcgctctgtcgccagactggagtgcagtggcacaatcttggcttgctgcaacctccaactccctggttcaagtgattctcctgcctcagcctcctgagtagctggaattacaggcacgtgccaccacgcccagctaaatttttttttttttttgtatttttagtagagacagggtttcaccatgttgtccaggagggtctcgatctcctgatctcgtgatccacctgcctcagcctcccaaagtgctgggattacaggcgtgagccaccgcctcttttactatttcttaaatctt

SEQ ID NO: 13875 - DNA, 1010 bp, Homo sapiens
tttgcaaaaaaaatcggacctttctagctgatgacaagtaggcaccaacaaagatgttgcttctatttatgtagtctttttgccaatgaaaattcagttccctttttgatctttctcaattatcaagaaaaactctgtctctcaaatatgatactctcaaactagtgactgagaaaatatgagggtaatccatacagggggcatctgtattttcatgactaacaatttcaactgctgttagctgggctggtcactgtgagatctactctgttggctcttcctagctgtaatacacaccatcttattcaaaaagagcttgcctggctccttcatctgttctctctgactgctttccagaggtcagcttccagagtagttgaaatgtttttcctttggcttcccttcctatagtcacccctcatcaactctacccacaaaacaaattaccaggaactctttaataatatgctattaacattcatatgtgaagatgcctgttgacagcaattggttggatatgaatgactgtaaaaaactgctgaattgcaacaagggaaaaaatgtgttaaccctgaatgtgatatcagactcttggagagcatttagggaatctgtgttcataaggccagtgcattagcaggctagaaagcaatgtgaactcatagaaaagagcaaggtaccatgccaagggcaagcctaggcctctcagccaagctcccagctgctgggaggtttacttgttttgcaaactgtacaagtaattggttgttaagtcacattctgtggtttctggaagtgttgtataatttcactttacaaaaaaagtattgccagaatgcattagaaataatgatttaagattgaactggctctgttgaaattacctaaattacatgctgcaacattgtttttcctagatggccaaaatcactgacttaagatatttaaaatgtcagagatgtatattcttaatggagttgaagaatcagcagtacttcagggagtattgt

SEQ ID NO: 13876 - DNA, 1063 bp, Homo sapiens
tggtgaaactccatctctactaaaaatacaaaaaattagctggacatggtggcaggcgcctgtaatcccagctaattgggaggctgaggcaggagaatcgcttgaacacggaaggcagaggttgcagtgagctgagatcacaccactgcactccagcctgggcaacaagagcaaaactccatttaaaaaaaaaattaagattataatagaaatacattattataatcttataaggctatatatataatacactagaaaaagaaatacattaaaaaaagaaaatataattgatgaatatatatgattttcaggttgagatgatgtcctaattttgaaattaaaacaaatgctaaagtagacaacattatataatgtactaaatttaaatatttctgaatggtaaaaaaaaattcaccatctatgagatcagatggcaatgaaaagtgggaaaaattattttaaacaaatatgacagacatagacatagggttaatataatcagtacttaaagggctttctcaaattcagaagaaaaaaacctaacatctcaatagaaaattgatcaaagggcatgaatggataaaacattaatcctttcctgctcaggctgctccaagaagggcaaacagctgatgaatattgggtgttttaaagtagggtgacagatgaatgcttcttttgtgtaaagttactgctgtttgtcttgacggcaatggagaacactcttgttttaaagaaaagtgttctttaataattttagaaggtagtatacaacaagccacgtttttacaatttaataactttccagattaagaaagaaaagcctcagaaatgccttaatgacagcaacatgtgatcagagatgaagcatcacgatcagataatgtggtaaaacaatatagtgcctaaattttagccaaagaaaaaagaataaaagaaaaaataataaaagcctacttgcgtgtagatattgtgttcccgattttgttttaaagatactgtttcctcgtggtatggaaactattatatttgttctaaaattaattagcagacaggggttctt

SEQ ID NO: 13877 - DNA, 1175 bp, Homo sapiens
agaattagtattgctgtctataaaaaaaaatcaatctgttgttcttgcagaagaacatcaatcagtctgtgaaattaattaactggatttttttacatttggcttctaagataatgagacaaatgatgagaaaagactgcatgccttgcatatagtagatactcggtaaatgtttcttgaattgaaaaccaaatgatatcacagatttagtttaaaaactacttcactgtaagtccttttatcagtcctaattcagtcccgtttcttttactgggctgcctgtatctatagtactgtaaatgtagatccctcatttttattgattcttgctctgaagtgagttctctcacatttttactgccaaggaatccaggccagcttcacatgactttggatctctgtattatttagtgtcttaactgttttctgtgaccagacttcctgccctatacagtattggcagattacattttttgaaatatcattttaacaacattactctttattcagaaaacatcaatgtctctttgttgtctacaaaattgtgggctcattgtactttagagttcattccctactacttgggtttgaaagcatctgtgttcagacttgtccagacacccgtctatacttaacttccaccggcctcctacccagaccctatggggaagacagattcgtctcttcattctgtcatcccattttgcaacgcgcacagtattctgcatcaaatcctctcatatctatatccatccaattaaagtcagttctgctccaggcaatatagtccttaaaactgcacattatcaaaacctgtgctataaagacaattatttcagtggcataaatagtgttggagacttgagagttgcaggggcacaataaacaaagttgttttacctgaagttatttaagtaataatggtattttctatctctgtaaaagtataactttaaaacctgaacatcacgaaaaaatgcattttattgtatctctttttataagatggtagtgaactaagctggtattttaaaaaattgtttcaacatcttaatgatccactattgtgagaaatggagaataaagaccttaaaacagctgtgttgtaagcagaagagcttttttttcccttatgccaggagccctagtctgcataaaataaattgtattcccca

SEQ ID NO: 13878 - DNA, 1048 bp, Homo sapiens
ttctaaatgaaacagaggggagattagcagagtggtatgagggggcagggcatgtttctgtattccatgctgtttaggtactgctggagcataaagtgtgaagagggatatagggctggatgagactctataggaaggcagaaatcaaatcttgaaggtcctttgacacattgttgaagcttcttttgtatgtcttcagttcatcctgctccttgcagggagaatggctgtgtgaaagagtgcttatatcctgccaaactcttcctttatgacctttgtcctggtctcactgcttcacccttgtcctggtctcactgcttccaaagggaagtcaagctctctttaatttactccattgaatcatttactctactagatttgcctgctttgcttttcacacagaattggttactttgctctcttagattccattttcaaaatccttccctcctttaagacctcactgaaattcatatcctttatgaaaacttttctctactcatgaatgattttatcccttgtgaattccagaactttgaatagatgctgcatattgcaattttcgcatgcttctcatatatcacaagttatttttataacattcttagactatccacatgttgaagggaagggccatatacctatcttgtatcctatttatgctggaagtgcagcttcttgcatttattaatagtagacattgcatggatgtttgttaaaacggtagaggaaaacagagttcctttaatttgaaaggctgctacagaggtagaactgagggattgattaattgtcatctggaaggggtagtagttaacataatgtccagatgaaactcttagagggaagaataattgtcagtgaaggtagaaggattacattaaacaaaagtcagaaatatgtacagaaaagagatgcagtttgaaaatcagttaaactgcccaaaggtttagacatgggaagaagatacttagaaagccattcagcatgtgtgattgtctttgacagtgagtgacaaatggaataacagggaaaagcacctatattg

SEQ ID NO: 13879 - DNA, 1073 bp, Homo sapiens
catatattcactttctgtcattgggccttactaaaggaatttttcagttccagtaattttatgtgtatgtacattccttaaaattttcactgtaagcaaccatgttgtctgggtcgggagtgagggtgggggcaaaaaacagttttacttcttctgttctaatgtttatgccatatatatatatatatctttcttgccttactgcactatccaggactggtagttcaatgttgagtagaagtggtaggagtggatattttcctgactttaggagaaaagcattcaatatttcaacattaattgtgatattagagtgagattttttttagatagttttatcaggttcccttctattactaggagcttgttttttttttttctttcttgatcatgtgctcaattttgtaaaatgtcctttctatatctcttacaatgatcatagtttttatttttacccatatattgttaatatttttgttaatcagatacagttttgaatgttgaactaatcttgtatttttgggaaaaataccatatggtcaagctgtattatctgtttatgtattactgggcttgatttgcttaatattttgttacagcttttacatctttctgagtgatattggtttgtgatttttcttttttgtaatattgctatcacattttgttattagggtgataattgtaaattgtgttgtggtatgctccttccgcctctttctttctttttttttccaagaacccaaattggccctgctgatattcattactgtctcttttctatttcattgttttctgctttattttattgcttcctcctttctaattactttgtattaatttattctatctgtagcttcttaacttggtagcatagatcattcactttaaacctttcttacttttttaaatataagctttttaaatctacagatttttttctaagcattgccttagtaaatctcacacatttttatatgttattattatttagttctaaatattttctaatttcacttatgatttctttgtacccatggattgtttagaaggaatattctgagaggcctggt

SEQ ID NO: 13880 - DNA, 1045 bp, Homo sapiens
aacttgcatcccagatataaagcttacttgatggtgatggataagctttttgatgtgcttctggattcaatttaacagtattttgttggggatttttgcatcgatgttcatcaaggatattgacctgaagtttcctttttgttatgtctctttcgggttttggtatcaggatgattctggcctcatagaatgagttagggaggagtccatcctcctcaattttttggaatagttttggcaggaatggtaccagctcttctttgtatatctgatagaattcagctgtgaacccatctggtactgggcttttttcagttggtaggctatttattactgaattaattccagagcttgttactggtctgttcagagattcgatttcttcccggttcagtcttgggagggtgtatgtctccaggaatttatccatttcttctagatttcctagcttatgtgtgtaggggtgttcataatattctctgatggttatttgtatttctgtggggtcagtggtgatatcctcctcatttctgattaggtttattttgatcttctctattctgtgttagtctagctagcagtttatctgttttattaattttttcaaaaaaccagctcctagattcactgatctttttgaagggttttttttttggtctcagtctccttcagctctgattttggttattgtcttctactagctttgggcttggtttgcttttggttctctagttcttttagtcgtgatgttaggttgttaaattgagatctttctaactatttgatgtgggcatttagtgctataaatttccctcttaacactgcccttagctgtgtcccagagattctggtatctttgttctcattagtttcaaataacttcttgatttctgccttaatttcataatttactcaaaaatcattcaggagcaggttattcaattttcaatttccatgcaattgtgtggttttgggtgaatttcttagtcttgatttctaattttattgtgctgtggtccaagagattgttatgagttcagttatt

SEQ ID NO: 13881 - DNA, 1023 bp, Homo sapiens
ctatttttgtggatattgaaatttccaaagaaatacaagagagtagtgatagaggaacagtaagtcagatgctgtaatctaggaatgagccttccaagacctgtaagacagctgataacagcaaggaaagttaaagcctatatagtctatggcctgaatttcaaagaaactagagagggttttagagagaagaaaaggaaatatggtggcagtggaatggagaacagaaaaaaatgtttcatctccagacttagtggcttgaggatgaggaagctgtatctttggacttcagttaaagccaaaaggtaaaagggaagttcactgaaaaggttgacaatagaaaggactttgctgaagatggcccatgaatttgagaagtcaaagtgaaaggatagaaaagggttggggagtgggtaatacagcatcacactaaaggacttaccaagctgaataaggatgggttcttatgatgaagaatgacctggtttcttctgaagactgaagttaatagggatgtagaatttaatgggaattatgcccacaatattttaggcagcttatggaaattgcactgtgatttgggggagagagaaatggggactcgccaggaaagtaagttacctagcaggaatttactgctaggtaagagcatgaagaactcattggattacctcttcaggcatgcaaattgtgtcattaggccattggaggtctgttggaactgcagcagctctataaatgcactttaccagaatagtttctcgaagaagaaatatagatggtagtagtgggaatagaaagagtaagttgattaaagtgacgttttagcatcataggaatacaaaatatagtggacccttgaacaacacaggtttgaactgtgcaggtccacttatccatgagtattttcaaccaaactagtatcaaatatacagtatacgcgggacttgaaacccacgtgtaaggaggacgaagttttcgtgtaagtcagctccgaagcactgactttgggacttgaatttg

SEQ ID NO: 13882 - DNA, 1134 bp, Homo sapiens
aggcaggaggattgcttgagaccaggggttttgagaccagcctgggcaacatatcaagacccccatctctacaaaaaattaaaaaattggtggcatgcacctgtagtcccagctacttgggctgctgaggcaggaggatcacatgagcccaggaggttgaggctgcagtgagccatgatcatgccactgcactccagcctgagtgacacagcaagaccctgtctctaaaagaaaaagaaaatataaaaagaaatttgatttttaatgtagattgtaattactaactatagaaaacagccatcataaaatttccctttgactcataattgtctatgatttttaaattaaaggttgacttcaagtataagatttatttttcataattcaagtgtcagatcatgcagtttatgggcactcttgataactttctttttttaaaatagagcacatcatccctgtttttgtatattgatattttttattagataataatcaacaaaaagaaaaaaatcacttcattattctgtttatttcaagttacaaataatttatataattgttgactgatacagtattaatgattctgttttataataaacataatgtatttttatatttaaattcctggacacaacacaagtttccctacagtttgtatatagcttatataactattaaagtagaaagttggatagactgggagtaatacttaatttatgtatatgtcaataatcacatctcagctaatatttgaaaactccatatcccttaagatgtaaacagttttcattagaatattagtttttattaattataatccatgtagcccccacctaatgtgggataccagtgcctcttccaaatattttttggagtccccagagtatattatatggttcatgcagagctctgggtgtcaaccacatggcattaattttaatttttttcttctggccatgtactaaggttttgtcattttcactggagactgccacttttgttgggctttgttgttgatctttcctttggccattgcagggactggctgagctgggtcacttagtgctttgtaggactttttggtggagctatctagtctgggagttttatttgaggaaatatttttcactatta

SEQ ID NO: 13883 - DNA, 1028 bp, Homo sapiens
tcctttttaaattgaggtgacatttaatttataaacaacataagattaaccatttgaactatataattcaatagtatttggtacatccacagtgttgtgtaactgtcacctttatcaagtctcaaaacattttcatcaccccaaaagaaagtggcaattcccagtttgcctctgccccagcccttggcacccaccaatatgctttctgtttctatgaatttacctattctgaatatttcatatgaatgaaatcatatactatgtgaccttgtatgtggcctctttcacttagcacgatttttaagatcatccatattataatacaaatcagtactttatttatatggctgaatgatatttcatgtatatatttaccacattttgtttgtttatctactgatggacatttgaggtgttttcaccttttggctattgtgaaagctcctgtgaacattagaacaggtagtgtcttactacccattttcaattattttggtaatatctaagagtggaagagtgactcataattccatgtttaattttttgagaaactgctatatatatatatagcacagcagctataccactttacactctcaccattgtatgagggatccagtttcttctcatcctcaccaacacttgttattttccatatttttgattgtagctatcctagtgggtgtgaagtggtatcttgtggctttgttttttgagacagagtctcactttgttgtccaggctggagtgcagtagtagcctcacactcctgggctcaagcgatccccctatctttgtctcctgaatagctgagactgcaggtgtataccactatgccccactaatttattttttattattattactatttttttgagacagagtctcgcttttgttgcccaggctggaatgcaatggcgtgatcttggctcactgcaacctccacctctcgggttccagtgattctcctgtctcaacctcctgagtagctgggactacaggcgcttgccaccacgcctggctaattt

SEQ ID NO: 13884 - DNA, 1027 bp, Homo sapiens
ttttttcacaaattaccacgagttcttcagaaacattgtgagtttcttataaaaaacatatggctgggctggacatgatggctcgtgcctgtaattccagcacttgggaggctgaattgggcagatcacctgaggtcaggagtttgagaccagcctggtcaacatggggaaaccctgtctgtaccaaaaaatatacaaaaattagctgggtgtggtggtgcattcctgtagttccagctactcaggaggctgaggcaggagaatcccttgaacctgggaggtggaggttgtagtgagccgagatcatgccacttcactccagcctgggcaacagagagaacttgtctccaaacaaaacaaaacaaaacaaaacatatggctgtaccagagctttattcttattgcctgatgttcatttcattttctactatatttataaatagtgctgtgaagaacattcatatttgtgcattaatctttttagacacttaggattatttcgttagagttaattcacagaagtgcaattgcagggccgaagagtatgaacattttttgttttttttttgagacggagtttcactcttgttgctcctgctggagtgcactggcgcaatcttggttcactgcaacccccgcctcgcaggttcaagtgattctcctgcctcagcctcctgagtagctgggattataggcatgcgccaccacgcccggctaattttgtattttttttttttttttagtagacagggtttctccatgttggtcaggctggtctcgatctcccgacctcaggtgatccacccgcctcagcctcccagagtgctaggattacaggtgtgagccaccgtgcctagcggagtataaacatttttaagactcctaatatatgctgacaagttccttttccaaagggccttgactatagcttcactagcaaagtacatgagaactcattttccttgcccaggttattttttttttttagctttttttttttttttttttttgcttattttctagtttg

SEQ ID NO: 13885 - DNA, 1037 bp, Homo sapiens
gtgtgtgtgtgtgtgtgtgtgtgtgttttgtttttgtttttacggtaacgatggttactattgctctctgttttagaagtaatggtcatacataagagcacattgtgtacaaaaataaatattagtttgtaaaataggttgtagtacaggatgaatagagaggtttgaaaaataggtccgtttccattatttcctttaaaatgcatatacacacatataatctagatcaaatttttatatacaggtatacatgtgtatacacacaaacacacacgtgtatatctctgtgtaaacctttcattgatctcagaccaggaagggaacatgatggatcaggcagctgtacttccaggttgcttttttaggattgttgccctggtgtagagctgagatcagcaggtggcaggaagaaggcggggtgactaactgggcaggacttaggaagagactgctatccctttcttcctccatcttataggtaattgatctgcttttgctgaaatgttttctgctttgataagcttctgttgttagtagtgttgctgtttccagaaataggaggagaaatgaagggaattacagagggaaaatttaacttttaaaaatcctgcctttgagggaagaaaactaagtgcctcagcctcatttcttctgcttaatggattcttgatggggtactttaaaaaatgtctctttatacattttgctaattttaacaaaggtagatcaagtgagtattcacttgtaatattagtttgcttttttttccccccataaaaagaatatttctttactggtataatgcagtcactggtgtgctttgaaaatggcctgggtgtctttgatgtgttggggtgtcctgggtttcttttctgtctgatggccaccatgtggctagtttccataagcctttatgccgaagtcccctttgggagcttgatttcaagtcttcaggaacttttatttattaagagattttaaaaagactattaagagaatttgtttttaaaaagcaggttcttcagaattagagggag

SEQ ID NO: 13886 - DNA, 1118 bp, Homo sapiens
tttgagctcactgattcttaggccatgtgcagatgatctggtaatatgcattctttttttctgttgctgtttttttttatttctggcatttccttttgattctcagaattttcatctctttgcttatattacccatcaattcttaacatgttctctactttttccactagagcccttagcatgttagtagttatttgcaattgttggcctaataattgcaaaatatctgccatatctgaatctgattctgacacttgctttggatcctcagactgttttatttttcctaaccttttagcatgtctaatggtgttttttgtttgtttgtttgtttgtttttgagacagggtctcactctgttatccaggctggagtacagtggcacagtcttggctaactgcaacctccacttcccggtctcaagagattctccagcctcagcctcgtgaggagctgggactgcaggcgcaagccaccaacacctggctaatttttctatttttgtagagatgggtttttgccatgttgtccagactaggttcaaactcctgagatcaaggcagtccgctcaccttagcctcccaaaatgctgggattacaggtgtgaaccactgagcctggctattttttttttttttttttttttgttaaaagctagatatgatgtattgggtaaaaggaactaagatcagtaggacttgagtatgaagtttcatgtttatctggctaggggttaatctgtgtttatttgctgttgatgtcagaggctagaatttcctatagtgtccttgatcttgtctactctgtggtatttgggtttccctagagactcccttttatttttacttttttagagacagggtcttgctgtgttacccaggctagagtgcagtggcacgatcatggcttactgcagccttcaactcctgggttcaagggatcctcctgcctcaggctcttgagaagatggtactacaggcatgcgcctccatgcttggctaatttatcttttgatttttgtagaggtgggggctcactgtgttgctaggctggtcttgaattcctgggctcaagtgatcctcctgcctcggtttcccaaagtgctgtgattacaggca

SEQ ID NO: 13887 - DNA, 1029 bp, Homo sapiens
gatatatgatgttgaacatcttctcatacactttccactcaatctgctgagtgtctgcttaaattatttacccattttaaaaatcaggtttgttttttttttttgagttttaagagttcttgatatattttggataccagctttttatcgggtgtttggtaaatgttttatcccaatctgtggcttgtcttctcgttctcttaatattgtcttttgcaaagaaattttaataaagtctgcctttactgggtcatgattttggtggtgtatctaaaaatttaaggccacctagattttcccctgttttatatcctacagatttttttttaagttttgtgatttacatttagatctatgacttggtctcagtttttgtgaaaggggtaaggtttgtgtttacattgatttttggggggatgagggacatatgatgtccagttgttccagcaccatttgttgaagactgttctttctccatgaattgcctttgctctcttttcaaaggtctgttgactatatgtggttctacatctgggctctttattccattccactgatcttttctttgccaatatcatactgtgttgaatactgaagctttttactaagtcttgaagtctggagagtgtaaatcctctgacttggttcttcggtatcgtgttggccattttggaccttttgcttttccacatagactttcaaatcagtttgcctgtatccaccatgccaggattttgactgggattgcactgaatctaaagatcaagttgggaagaattgacatcttagcattattgagtattcctatctataaacatggaatatctctccattttttcagatctttgatttttgattagcattttttagctttttccttatatagaccttatatgagatcctattttgttagatttataccaaagtgtttaatttcttggtgttaatgtaaatggtgttttaatttccaattccaattgttcattgctggtgtatgggaaagcaattgacttgtgtactaaccttata

SEQ ID NO: 13888 - DNA, 1538 bp, Homo sapiens
ttttcttttctttaatatttggtaattgcagatttgatggttaaattcataggttttctttacttaggccaaactgtcatttctcatttgtacagaattggatatgtccctgtgcagaagggttagctcattcttttcatctttaagcttttaaaattacttagtctaaatgttgttaggtaatggaataaccattccttttcagcttttggtacatttccaaactggctggcagagccaggaggaagtgaaggcattagaaacactaactttggttggttgctaccgtcttagtgctgagactataacctttgttggttgattgatagagaacaagagaacacaatcctcgttccactaacaggtaaggaacccttgtgataactagttggtatgagagggagattacttgatagcatttcataaaaactttatcccaaaatataacatgtcctagaaataggatactgtgactgactgtactccgtagaacaaggatacgcagcacctttatatttagaataagatctgaaatttaatagggatgtattactctgtaccacaaagcataattgatctgttttccaaaggcaacactgttaaaatttatcctgcagtccctgtaactttaaatatgtatctgcctatcttattctcctttcagcttttccttgatcagatgctatgtgctttgaacttccttctcttatttattcctataataaagctaactattttctagtatctttgccatcatctataatttgggtatatcttactgctttaatttctatgttatagccattaatgattattcctggttcttcttgacccaaaagaaaatgattatgcattttaaaaaggattttgagtctgtattgcctatatccactattctgccttcccagttttaaagctgagtgcttgaagaataaatcttttcagtgacagtagtcataagctttcataaaatataggcttagctttgtattgctataatatgggcctatagtgtgattaattctttaagttaatgaagacttgaactcagagaagaaattcagcttcttagactttcccaaagtttagtagtattcctgttaatatacttggttttttctgtttctacttttcagtccatcttcttttctttgacagaagaattaactgggactcctcctttgatatatctgaggttgtgtgccttttccctgtcccttaaagacaactatgatcttgtttccagtcataatttatcatttttgatttggtcttccactcagagttgagtggtttatcacagagtgtgttatggcttagaccaatacaggtcccttcttaatagttactgaggaattaatcatttgtggtgacagacttctaaaattcaaattaagaaggcactaaagaaagtatgcccaaaggtagctcctttttatcctgaggattaagccattacaaactcaaatgaccagagaatgtaatttcttaataagaatttttccttaaatctatattcagctctctatttcagtgct

SEQ ID NO: 13889 - DNA, 1050 bp, Homo sapiens
tacactaagtatttatttatttgagatggagtctcactctgtcacccaggctggagtgcagtgacgtgtctctattttagtagagacggggtttcgccatgttggccaggctggtctctaactcctgacctcaagtgatcggcctgcctcagcctcccaaagtgctgggattacaggcatgcgccaccgcgcccagccccagtctatatactaagtatttaaaaagaagtactcagttgttaatcaaaataatatgatttggaaaaatgtaaattaaacctcagagtcctagagtcaaactggttttgaatttcctgttctttactagacatgtgatcttaggtgagttagttcaccactttgtgctttagtttccttatcaagtaaagttgtgataataatattccatatatgatagggttatgctaaagattgaatgaggcaatatatataaaatgcataatacagtgcataataataatgcacacagtggcaagttcctgtagttccagctacttgggtagctgagacaggaggattgcttgagcccaggagttcgaggctgtagtgtgccgtgattgtacccgtaactagccactgcattccagcctgggcatcataggaagaccttgtttctctttttttaaaagcataatacattacctaccatatactaagctctcagtaagttaaaaattaaaacaaaaagttatgaatatttacctgtaaccaactttgtaagtgaaggtattaatacattggagtttatctcttgaattttaatttaaaaaaaggaaggaggatatttatggcactaaactctatttcctgcgaaaatttttgaagaaacaaatgaggagaaggtcttcagttttaataatgcaggaataaacatacatgataatgtaaattggaaagaacttttgcttttttgttcacctgttctatgatatgcttgctgtagtctggagttaatttccacacttgctatttaatgtaaacattgtttttctatttgtaggaaagattttcccttttgatctctcacat

SEQ ID NO: 13890 - DNA, 1072 bp, Homo sapiens
acagctagtaaatgatggaactaggatttgaacctaacagtctggcaccagagtctgcttttaacacttgtccctatacttcttttcaaatataatttctacattcagtcctatgtaatgtttgagtattatgggttttgccactcttgtctaggcaattgaaccctgtctcccaacttctagaatagaattctttatatcatatcacactgattcatagtaagtaaatagtataactattggggagtggggagaggtgaagattctgagcttaaaatttgtgaattttcaactgttcatatggtttttctcctttattctgttaataatggtgaaatgtcaattgattttcaaatgtcaaaccagcctgtattcccaggataaaatctacttggtcatggtctattacccttttaatacattgatggatttgatctaatattttattaaggagttttgcatacatgttcatgagggatattagtctatggttttcttttattgtaagagatttggtatgagtagggatctatttcctcctcttttttaagggtttgtgtaggatttctaccagtttttctttttgtttcttgtttgtagaattcagtagtgaagccatctgaacctggcattttgtttttgggaaagttttaaattatgaattaaatttcattaataggtccaggactattcatattttcctatttcttcttgagtgggttttgatgatttgtgtttttcaaaagaatttgcttcacctaagttgttaatttattggtatatagttcataatatttcctgtgatatctgtaggatctataatgatgtcctcctcttttatttctcaagttgttaattgatttttttctctttttctcaaaaagtcttggtgcatttattaattttattaatcttttcaaagaaccaacttctggttttgttggtttttctctgttgtcattgattttcactctaatccactgattttcactttttagtatttcctctttcctcagaccctacacattacagtagaagcatagataattgattttagacttttctcatttct

SEQ ID NO: 13891 - DNA, 1031 bp, Homo sapiens
ttcttctttttagacacagggtcttgctttgttgcccaggctgtagtgcagtggtgcaatcatggctcactgtagccttgaccttcaagcaattctctcacttcggcctcctgagtagctgggactacaggcatgcttcaccgtgcccagctaattttttaatttttttgtagagatggagtttcatcatgttgcccaggctggtctcaaactcctgggctcatgcaatctgcccactctgaccttccaaagtgttagggttacaggcatgagccaccagggcccagccctacgtatccattcctacctgggtattgagtatcaatgattgttaatatcacaaaaagagagacaaccaagtatctgttacatacttcctgatggaagaacacaccaccaactatgaaatggccttgtcaaaagatcaaacctaaagctgattgacatccgtataccaaattatggcaactgtagggacagagggcatattatatgacactacagtgatgccattgctgaagccctgactggggaattctaaaggacaaacaacttgagtttgtttttgttttttttaacaaataaatcaaaagaaaaaagaaacagataaattctagattaataagagatttaaaagatcaaccaatcgcaatgtataaaccttatttgtgttaccggaaaggggttccaatccagactccaagagagggtttgtggatcttgtggaagaaagaattcagggccagtctgtagagtaaagtgaaagtaaatttattaggaaaggaaaggaataaggaatggctactccatagagcaggcccaagggctgctggttgcccatttttatggttatttcctgatgacatgctaaacaaggggtggattattcatgcctcctctttttagactatatagggtaactgcctgatgctgccatggcattagtaactgtcatggcactggtgggagggtagcagtgaggacgaccaggggtcactctcatcaccatcttggttttggtgggttttggc

SEQ ID NO: 13892 - DNA, 1112 bp, Homo sapiens
tcatggcaacccccacctcccgggttcaagtgattctcccacctcagcctcccgagtatctgggactacaggcacgcaccaccaggcccagctaatttttgtattttcagtagagacaggtttcaccatgttggccaggacggtctttatctcttgacctcgtgatctgcctgcctcagcctcccaaagtctgggattacaggtgtgagccaccatgcccagccagcgtacatattttttaaatgttttctgtgacatgggagcctttgtaaggaaatgaggacccaaagaaacaggtgagcttgtgtatttttctgttttggtttaatgaagagtgaacagttgtgcaaaagtattggacaaagcggatgatctaatggtaaactggggggaacttagcaaggcctgtttgttcagattcttctctgtgtttctgtgtcttcagagatgaggatatttattttccctgggtatatggagggtacctctcgaatgagagtaatttctttctttctttctttgagacagggtctcactgtgttgcccaggctgaagtgaagtgctgtgatcataattccccgtagtctcaaactcctatgctcaagagatcctcccaactcagcctcccaaagtgttatgattacaggcgccagccactgtgctgagcctacaccacacctattgaaacagaatattcagcatttaatatttcgggttttttgtttgttttttgagggagagtctcactctgtcacccaggctggagtgcagtggtgcaatcttggctcactacaacctctgcctcctgggtttgagcgattctcccgcctcagtctcctgagtagctgggattacaggtgcccaccaccacgcctggctaatttttgtatttttagtagacacggtttcgccgtgttgcccaggctggtcttgaactcctggcctcaagtgatctgcccgcctcagcctcccaaagtgctgggattacaggcatgagccaccgtgcccagccagaatatccagcattttaaaaacccttctgggatttcagctccctgctggggattgaggaaccactattgtagcaggaagcatgggaaggaaatgagctc

SEQ ID NO: 13893 - DNA, 1044 bp, Homo sapiens
gttgctatctgctgctatggtttccaccacagatgcaagaagaacatgtccttgcgctttccgtctgtctaattgtggcagctgagattgaatagaggaatacaggaggaaaaaaagcgggaagagtttttgaggcaggtcggtcacccaggcttgtagtgcagtggcacaagcaactcactgcattctctgcatcctgtgctcaagccattttcccacctcagtctcactagttgctgggactgcaggcatgcacccctatgcccagctaatttttgtagagaccgagtatcgcttagttgcccagggtggtctcaactcctgggctcaaggagatctgcccacctcagcctcccaaagtgcaggcctagcctgggaggggaattttcaaaacgtgagttttgggaaatagtctatcagccttacctggttgattacacttgtaaaagaaagattaaaagcaggccagtgactctggtctgcttgaacatgtgaatgtagtggtttgagcaatctggagtttgccctagtgtcaaattccagactgtccatagtgtccaaaacctgaggcagatactaatgttaacccccagcaccccgtgattggaaacaaacctaaatacgtattgggaacttaatagcaattttaagcattctgatagattttttgtagggatggggtcatgccatgtggcccaggctggtctgaaaactctggcctcaagtgatctcaagctttggccttctaaagtgttgggattacaggtgtgaggcattgcacctggcttagcgttctgatttgacattgtaatgaaaagtgtgagtctcatctacagggccttttgtcctctgaaatgatagcaggaagggaattttcaggcagtggtcaaagctggggaaaccaggatagtgaagaaggccttgaggtgagagatggaagctaattggtgaactagccttggaagcctgaaacagacaagtagcaattcagagactttgtgggctccactgctccaacttgttttgaagattttcagttctgca

SEQ ID NO: 13894 - DNA, 1332 bp, Homo sapiens
ctagatatggcctcactttcacttcataatcatattttgctgtatacgtatggatcagtatcagtggttttcactttggtttactgataatgggcagctgatcattgaaaagcctagtgcagtactagcttagtaaatagagctgactgctgaactggtatgcaaattgttttactaataataaataacttggtgtcttctatggaaggaactgctggaagctgtacagaaacaaaggcattcattatcctagttttcataggcttctgtataaggaagaagaaaaacataaagctatactgaacaagattagagtcaacagtagacagaaattacttagaacagtataagatgacttaccaaaggggttattcagacagtatctgaggtttttgttggtagagcagggtgtgggtggtacatgccacagccttctgaaaaatgagctaccgctgatttggtaagggtgttctgcatccactgatagaccttgaacaatttactgttgttcttttggtttgcactaggatgcaaaagaaagaaatccctgcgctttctgtctgtctttgtggcggcccagattgaattggggaatacatctttagcctggaaatgtaggctgcatgttaatggtaatgtaacttttgcagtgtaatgtttgaaaaatattaatgtagtttttgcttttacagtaacaaatgtggcaattattttggatctatcacctgtcatcataactggcttctgcttgtcatccacacaacaccaggacttaagacaaatgggactgatgtcatcttgagctcttcatttattttgactgtgatttatttggagtggaggcattgtttttaagaaaaacatgtcatgtaggttgtctaaaaataaaatgcatttaaactcatttgagagaatgccttttagtttaatgcatatttaaactaaattgatcctgtagtgttcctggagaagctagagcctgattgtaggctactactcatcaattaacttctacagtggagactacttctgggactggaatataaaaaagaatcaaaggttctgattttgagttgcaataaagggaaagaccatgctcatagcagtgccaacatctgaagtgtggagccttacccatttcatcacctacaacggaagtagttaactggaagagattaccaagagaataaaaagagactcattcagtggaagcaactttgtctcagcttatttcacataaagagagcgaagtcttttgggatgaatgttaattaaactccctggtaactagaacagggactggcaaactagcctatctgaccacctgttttg

SEQ ID NO: 13895 - DNA, 1044 bp, Homo sapiens
aaagtctggaaggattatgatagggacaaggatgataacatttcctgggaagaatacaaacaagccacctatggttactatacctaggaaaccccgcagagtttcatgattcttcagatcatcacacctttaaaaagatgctgccacgtgatgagagaagattcaaagctgcagacctcaatggtgacctgacagctactccggaggagttcactgcctttctgcatcctgaagagtttgaacatatgaaggaaattgtggctttggaaaccctggaggacatcgacaagaacggggatgggtttgtggatcaggatgagtatattgcggatatgttttcccatgaggagaatggccctgagccagactgggttttatcagaacgggagcagtttaacgaattccgggatctgaacaaggacgggaagttagacaaagatgagattcgccactggatcctccctcaagattatgatcatgcacaggctgaggccaggcatctggtatatgagtcagacaaaaacaaggatgagaagctaactaaagaggaaatattggagaactggaacatgtttgttggaagccaagctaccaattacggggaagatctcacaaaaaatcatgatgagctttgatagacactcaccagaatatggcagactgtcataggcattctgttattgtcttggattgttgctacaactgtctaatttacagcagttgtgatcccacaaaaagcaagtttatacctcagattggggtataaaaattgtttttcgctcagtatttactggaaaatggacatcactagtctttcagtaagatttctctcaaaacacgtgaaaaccttggtaaattgcaattcttgctggggatatattggtacaacatgacttaaaactttttttttttttctattaaaacttaaaggggaacaaaacttgaaaaagccctgttcttcagaagttgagtgggttgagggaggcagtaatatgaagtgactgctgtgtattttaactaccagattttttatatttgccactg

SEQ ID NO: 13896 - DNA, 1047 bp, Homo sapiens
acatgaaaattatctgttatatgatattaaagtattattaccttctactctgtaaaaattgacctaagacacttagaatttttccttttacattttacttaaggttgaaaggccaataaaatgaaaattatagcctatatgcctactcctttttaagtaggcattgtctatgaattagaaagggcctcatttaaaatagcaaaattctaaagtttattttccagaatttaagaatcatattatatgacttggaatctaaacaaatactgattgtctagcaatgttctttctacatggtagttatatggtacaaagcttcacaactgtggtgacacaagccaactttttaaacaacctgtcaaaaatttacagtagttgaaattatatttgaacactatatacctctatcaattttctaaatttggtaattattttgacttacagtactttgtgtgttgctggaactcattccagtgattataccatgaagcaacaccccttaatattcctcttgaatcattccaattagtgtctgattgttactaacaacttttttaaatcacagtgaggatcttttctttgattatataaaatatgaaatttttattttaatttgctcttatattttgcaattttttctactgatgtagaaggtatgtatgattgttatctttgttattttctggtatcaggtatttctaagtagaacattatttcttcaactgttccttcgcagtggatggattatttgctctcagtgttaataattgtcactctctgactcttaaagggatttcataatgaaatagttgtttttaaaaattaaaatgtatgtgtgcacacactgcaaacacatgtactcctagatttaacccttaaaaggattctggtaccaagtttcaaaagatcagacccaatctgagtgaaatcaatagagttctttcattggggatctcccatggagttaaaatgagttatttgtatgggtgggttgggttacctgttttcttttggtgggaaggttttttatttgtcagagtccttaga

SEQ ID NO: 13897 - DNA, 1430 bp, Homo sapiens
ctgctattcttcatgcagtcaaggctgcctcttttgaccacagaaaataagataggggagtaggaggagatcaaataatggagtgattagttctattaatgcctaatcattttatgtacttcttggaagatattttatggttatagtggaaatagacaaggaaacttttttttttatttattagaactttgagagaggaatttttcttaaaatgatttatatatttggatatttatagagagaaatgtatatgtagaatatagaaatatatagaacatatagagacaatatggaacatagaaagttacatagaatatggaaaaaggtaaattatgttttaaaggaccttgaaatgaagcattttgtttctattttatcatgtgctaataactctttatatatggtatatttattttagatcgccaggattcaagaagccatagttcaagaagaagttctccagagtcagatcgacaggtccattcaagatctgggtcatttgatagcagagacaggcttcaagaacgagatcgatatgaacacgacagagagcgcgagagagagaggagagatacgaggcagagagaatgggaccgagatgctgataaagattggccacgcaacagggatcgagatagattgcgagaacgagaacgagagagagaacgagacaaaaggagagacttggatagggaaagagagagactaatttctgattctgttgaaagggacagggacagagacagagacagaacttttgagagttctcaaatagagtctgtgaaacgctgtgaagcaaaactggaaggtgaacatgaaagggatctagaaagcacttcccgagactctctagccttggataaagagagaatggataaagatctgggatctgtgcagggatttgaagaaacaaataaatccgagagaactgagagtctggaaggtgagtgctacctctgttgtctgtgatactgctttatttcttttcagatttcgtgggaaacaactattttcttttgaaagggcacccactaatgggcaaattgactccattctccattcttctatagaggaagtagatttcagaaggaaaaggcctgtaagatagagatatatatatttttttaatgtggtccccttagcagtaccattaaggcagatttggttcacataaacctaaatgaaataaaagattgtttagatgcagtgtgtatagatgttgaagaataaccatcacatccttttcttagatgttaaaaaaataagattacaaaaattgaaatgacttcttagttcagagagggattcaaataattattagtgaatccctattttctagggcagttgagaacaaatatatgaaacaataacactacctaaaactgtatttaatgtaggattgactagaatcccactggtactccctagtc

SEQ ID NO: 13898 - DNA, 1004 bp, Homo sapiens
ataattcttgtcttttcaatcagtgattaggaagggaaatccagaatactgtattgaacccttcctagaaacatcctaaaattgttctgcttaatgagttgatgttagatgttccacttaccaacctgttggcctgattataatatgatctttatcaaaaaccagtagatatatagtatgtaaatggaaacatcacagtatcctagatcagaccgcagtagttgctttcaaaaatggctgtctctttgaaaaagttcatgccatcctcttaaacgtttttttatcccagactaattttctgctcaactgggtatttgggcagcatgcattcatttactctgtgtttatgtgatttgtgtgtacatggaaaaaatttatataaaatgtgatgaggttatcagttaacattttaagaaaacagctcttcatctgagtaatcatttatgtaattaaagctaatttattagtaattggttattaattacaaatatatatcactaatatgaaacactttttacatttatttcaagattgctagacatcagtacccttaatattacagttcatgttatattgcagcaacaaattctgacatatgttttgttctactatattttcctcacataatagctgcactttgatgtgtatatattttggcctgaaattagaggtgtgacttacgagggaaattttttttttccttcagctcctatgttctacacctcctgctgcccctatcctttgccaccagtgttctcaggtcctgctggggggacagagaagatcagaggtgaagggtagagatggcagaaagtggggttggagcagtgggctggaggtagggtagggagcatgcagagaaagatcaaagattgatcagtgggaggggggaagggggttgacggggagcaggaaacatggtcgttagagggcaaataaaaattatctttaaaaaatttaaggtctaggggcgattgttacttggatattaagttaaaattaaa

SEQ ID NO: 13899 - DNA, 1043 bp, Homo sapiens
agaattttataaggacttccagaaaggaacagtaaaaaaaaactgaatgatagggctggggattgtttagagaaatattttatttgtattctgtcctgagaagatatggtatttgctttagctaattttacgttcttatatgtcttaagctaaaactttttctgttcatctatcaggtgatctcttaaatgaattttgaagcaagattactaggaagcacttaagaagggttgtaaatactttctttggcaagcttttatttctgtacttattagggcctttaaacattaaaaattttatgaaggtcttactaaccttggctgaagtaaggttcactataatgctgagattaatatagcatgaaacttgatggcccagagaattgaatattgatactttactatgggctgaatcaaagaggtaatattatatcttgattggttagtagtgggagaagaataaagtttctaaggcatcatctacttttgggagcatagataggatcagaagtaggagaattgattaggttgagtttataaggtaagcctaatgcattttggttaaaagatgtgtagaatttccttagttacagatagggctggagtttctatgttctgtgttgatatctgaaattttttcttccctgggacttttagaactggtgatgcttttttttaaatttcttttttcctttttttctattttcatatccttgctcagatttttctcatctcatgcctgaattcaatagtaacatttggtttcaatcttatggttagttcaaccacatgtattgatcttctactaggtgccaagaactttgatagttgctttacatatattctgacttagtctttacaatatccttgtaagtgtaggtatgataaaataattcatgttttcacagttttggggattagatctaagagtagtaagattacaatattatagagaagtaggttccagagctggaattcaaactcaggtcttctgaccagaagttcagttctctattttaattttactgtaactacttcaataat

SEQ ID NO: 13900 - DNA, 1031 bp, Homo sapiens
gtgaacatttgtttcccacatctgttaatgaaaattttcacatacagtttaatgttgtcattaaccttggtgttctatgttggaatgttttcactgtaaactgtatttaagcaataatacgtacccatttttttctttcattatttttatatatctgtgaattaaatatgaagaaatagtttttattttttgttttttttggggggacaggttaattttaatgaatcttattattttatgattttatcatatgacttttatataggtagggaaaactgggacttcgtctactcaggtcagtcattggacaccttggttgttctgattcattgcttgatactcttttcaggagtgattaccacactttggaatattaaatatatatattagtgatgtttaggaggaaagattatgactgatgaaatttgttgaataaagtgtatgtggtaaacatttgtgtgtctatcctttgtttaggaagtcgaggctcaagaggttctcaaattgatagtcacagtagtaatagcaactatcatgacagctgggaaactcgaagtagctatcctgaaagagatagatatcctgaaagagacaacagagatcaagcaagggattcttcctttgagagaagacatggagagcgagaccgtcgtgacaacagagagagaggtttgtcaaacagaattttattaaatagtgaacaatatcaattgggcgaattgttttttcaaacagttaccaatttactttttaatataaaatatactttaaggcttgtgctcgatgacacatttgaaactattatatatactcatataatctttgttcacatggtttaggagggattatgtcaatagctagtgaccagtacctactggcaacaaagtgcaaaaacttgggtgccctactgtgtgtttctcatcttacccaaatagcttacaaacctttaaagaatgtagatggttgggttctattccaggcaattctgattcaagaaatacctaaacctttacatctgagtatcctgtcta

SEQ ID NO: 13901 - DNA, 1048 bp, Homo sapiens
tgacattttaaaatataatcacttacaaatccttccattgtattttattcattttaaactgtcttttccccagtggttttcacgtggaaacttactgtgtagctgaatgtcacaagtttgttaaagtattagatttgcattgtatatttttacatcttagctactctttaatatttaaagtttttgttctttagtaaaatagatgtagtatagtctacatctcttttagtttttgttgtttagtagtttttgttctttagtaaaatggagtatagtcttttcattgtggtgctaaactagaatttgtcactttctctacttagtggataagtgactatttacaaaactgattctttgatgaaacagagatgaatgaaattaaaatgttctcttattacaataaactacctcataatttttaaaaatatagtaatctgaatgtatgtatgtacttttttagaaagaatcttcaagagggagacatagggaaaaggaagacataaaaatcactaaggaaagaactccagaaagtgaagaagaaaatgtagaatgggaaactaatagagatggtgagtttcagaatcttggtttaaatggcgaattcttgattatttactttctagagttttcgtgggcttcagaacacctttcgactgtgatccctctcgtttcagaatcattttattgacatatttctatcttactgaattataaggcaaaaactggcatatagtagctgtacaaaggcagagaaagtggtttgcattgcatatttttattttcccttcctagttttccctctagaactttattgtgcagcattacagcccttcaggattgtattgcatatgtaaatttaaaaattcctaacgctaagcttaaaatgaaatctatatttgttttacataaaatattataaatgagatttttaaatcttaaggacttgggaaagttatttccaagaaatgtttgacttttatctttcagaagaaatcaaaatcagattaagatagagacctggatttattaataaaaaattagcaaaaaa

SEQ ID NO: 13902 - DNA, 1022 bp, Homo sapiens
aaggaaggaattcttatttgtgcttgtgggagagatacactgaggagacccagattgcttcttattatggtaagagataagctttaatgtgaagtcaacattaggcagagcggagctgtgataaatgaaaacaagagtgaatatttggtctttgatgatttcactgttactaagtcacttaggcctgaagtttaccctatatatagacttcattttatgtgaaataatagttcaaatttgtatagtttaggagattatagtttcttagttgaagctccatttttctctgctaaaacaagttagacttcattaatacaagtataatttcaattctaagtcaggggagttggaagctgtatgctttatgctgttctgacaagactagattaatttggggtatcatgtttcattgaagcacactagccgattaatatgcccagagaagatgacagaatgatgaagaaagggctagcacgtgaaagaagtattagatttgttttgcataattccagaggttagaactattcccaatcagtagaaattgtagggaggtagaacctctagagaggttaagaaagatgcaatgggcataagaaataattttctaataattagaactgtctggaaatgggaagaaagggtgcaacagcacagagctaagatttttgcccccaagagtcttgtaatagagggcttccatagctatacaaatattgtggaaaattgttctgcatagggtaggaggttggattatattacttacacagcctcctaaccatttttatactctagttactaataatggttctcaactctcttagccttgacacttcctatttcatattctttgtaatgcttgctttttatctaaaattaatgatgaacataatctgcccacgcatataatgttcaagaaataaatgtgcatatgagagtggaaatgaaagtaatataaacatctaaaatcatgtattacatttctgaaattcaaaaaacttcaaacatttttcctaagacacaga

SEQ ID NO: 13903 - DNA, 1054 bp, Homo sapiens
aaactaaatgtttatggtgatgtgagaggtaatgatgggggaactaccttaagcagaaaggtggttaggaaagatatctttgaggaagtaatttataaatcaaggcatttatgacaggaaggagccagatgtgtcatcatctgggggaggagcatttcagaaagaggaaacataaaacagcattcctagggttagaaggagcctatagggttcaataacttgcagtgtggttggggcttatggatgctggatgaagataagtgagagaggtttacagggacagcatcatgtcaggccttgagggcaaggtaaggagtctggattttattccagatttgatgggaagcctttgggggatttcgattagggcaatgacatgatctgatttaggtttataaaagatctcttgaatacctcttgattataaatgggcaagagtaatcgcttctcggccttttggctaagatcaagtgtagtatctgttcttatcagttaatatctgatatgtcctctatccgaggacaatatattaaatggatttttggagcagggacatggactaggagcttgctccgtccactccatgcatcaacttggtattgctgtacccctaggaacggcgcacccctctgggtgttaaaacacggtgttactggccgggcacggtggatcccacctgtaatcccagcactttgggagtctgaggcaggtggatcacaaggtcaggagttcaagatcagcctggccaacatggtgaaaccccgtctctgttaaaaatacaaaaattagctgggtgtggtggcatgcacctgtaatcccagctacttgggaggctgaggcagagaactgcttgaacctgggaggcagaggttggagtgagccgagattgtgccactgcactccagcctgggcaagagtaacagcagagaaatctattgggaagctatggctgcacgtccaggtgtgagaagacggtaactcagactaagacagcagctatagctataaacttgctgatggaatgaagttggagagctaaggaaagataggatca

SEQ ID NO: 13904 - DNA, 1072 bp, Homo sapiens
aggtgaatctttatcattatggaacttatggtcatttgttttggattttagatgtcttgtcttgcaatatattcctgggtttaccttgggacttctctaataataatgatggctattcatatgtgtctgatggctcttaacacacaagaaactaaggataaaaatatggcatactcagtcacattggaacttggtcacacaagtcttttgagatatctgtttccctgcatctgtacccattttctatcagatccatcttttgatctgtgaaaaatggcagataatacttggtacattttacaggtttggtggcctaaaactccaggcctgtttaacttcttaacaattcaagaattatatggatggaaaatgtttttctttacatttctttctttatataggaaactgtaatttagctctaaattcaactagccagctgggactagtctaatcattgagagacatgacaccaagtaattccgaggctcagctttaatcttgacaacattcctgtcacattcacttccatgatagaagacagattgctttagaagacttaagttaccttgaccttaaactagaactttttattaacagctgttcccaagataaacatttaatacctctctggaagggagagattgagaacatttactgattcatcaaaaccttggggatttccttgttctctgaagcgtcagtgatatttttattagctctatttttatttcttaggtgcttagaaaaattcccatcttttcccatcagtgaccattcactagttcaaaatgggaaaaacaaaatctttgttagactttcatttctttcggtttattcaaccttgtattttaattgtagatagggataaattatctggtgtttgatacccttagaaagttcttcccacctggagtgtaaattagtttaaccattgtagaagatagtgtggtgattccgcagacctagaggcagaaatgccatttgacccagcaatcctattactaggtgtatacccaaaggaatataaatcattctgttataaagatacaagcacacatatgttcactacagt

SEQ ID NO: 13905 - DNA, 1050 bp, Homo sapiens
taagaatattaaaggtttagaaggaaaaaggccattttcttaagaatccctgagatatgggattcttgccactagtctaggactgcttgaaagtagggaagagactattattagaaaatagaattccgaagaccttgtaaataaaagcctggcaagtcagattttgaaccaacttaaaagcatatttctgatttaatcagcctaagagcttaaataactttaaatttctgtttggtactagtatagtatatcctgaagagtatctttgaatttatttttcaatgttacttctctttttacaggcttatgatgctacccaccttgtgaaatcctatccaggatctcagctggacatactaattgatcaagggaaagatgaccagtttcttttagatggacagttactccctgataacttcatagctgcctgtacagaaaagaaaatccccgttgtttttcgattgcaagaggcaagtattaggaaactttagcttgatctagataatgtaactatgaaaaattaggattctgtgatattttcttaactttattttagaatataaaatgctacttctagtaagtttttaattatattcagacacttgaagtgaaaacctgcctataaaattaattatatctaacactaaatttgatagaaataggaaagcttttggcagtgaaaaatattgttttccatcaaaccagtaaataacaagatttttaatgcttgaatgatgattaatcttcagcattagcagatacttctttctttacacatggacctttgctgcagtagaataaaaaggacaaacttctacctaaattactccttattttatgtatatattttagcctcagaagttaagtattatttatcacacatgtgctttatattatttgactttcatattaatctattcattgtgctacttgatatttctagttgtttaagaataattactgaatcccaatgggcttgcaagttttttttaactaaaatatttttgaccgtccactactcacctaactctatatatgctaccatagtcc

SEQ ID NO: 13906 - DNA, 1044 bp, Homo sapiens
aatcccagcactttggtagcttgacgtgggaggattgcttgatcccaggattttgagatcagccagggcaacatagtgagacctcacctctacaaaaaataaaatattagccatgcacaatggtgtgcatgtgtagtccagcaaaatttaggaggctgaggcaggaggatagcttgatctcaggaggttgaggctggaaggggccatgttcacaccactggactccattctgggcaacagaggaaaactctatctcaaccccccaccccaagttttaatgttatacttctaacagtaacataattatgtatgtgtttgctttgagatatatatcaatattttaaatcacttttagtgcttatcatcatttcttctctttcatctttcctctggtaaatacttcaatagattttttagtacagatctgtgaatgggttagtccttctagtgtttctatgtcttttaatattatcattttattctcattcttgactaatttactatgttgactgtcatttcccctcatcactctgaagatattattcagtcttcagatagagtgtattttatttctactattctatcagaaataatatcttcagagtgatgaggggaaataacagtcaacatagctaatcccatctctattataactaataaaaagtctgcttttcctctagtcctctatctgtgtagggaatatgcttttttttctctgatggtcttcacagttaattcttgatttttgatatcctgcaaagtcattttattgccatatggaaagatatataaagatgtatgtttatgtttagatttgtatctagttttctattcagagtgtactctgaaggtcaggattcatgtcattatttctggaagagtctcagcaattattcttatgcatgtttcttctccattccttgttcctgggaatttacgttaaaaataatccactggggctgggcgcggtggctcacgcctgtaaacccagcactttgggaggctgaggcgggcagatcatgaggtcaggagatcaagaatatc

SEQ ID NO: 13907 - DNA, 1049 bp, Homo sapiens
tggaaagtagataagcccacaaagatgagaaagaatcaatgcaacaaggctgaaaactcaaaaagccagagtgcctcttctcctctaaatgaccacagcacctctctgggaagggcacagaactgggcaaaggctgagatgcctgaattgacagaagtaggcttcagagagtggctaaaaatgaactacgctgagctacgggagaatgttgtaacccagtgtgaagaagctaagaatcatgatagaacaatacaggagctgataaccagaatacccagtttagggagaaacataactgacctgatggagctgaaaaacacaacatgagaaattcacagtgcaatcacaggtatcaatagcagaatagaccaagtggaggaaagaatttcagaacttgaagactgtctttctgaaatacaataggcagacaagaatagagaaaaaagaataaaaaggaatgaacaatgcctctgagaaatatgggactatgtaaaaagactgaacctatgactgattgaggtgcctgaaagagactgggagaatggaaccaagttggaaaacatacgtaaggatatcatccaggagaacttccccaacctcacaagacaggccaacattcaaatttaagaaacccagagaaccccagtaagataccccatgagaagatctataatatcatcagattcttcaacattgaaatgaaagaaaaaatattaagggtagccagagcgaaaggccaagccatctacaaagggaaacccatcagactaatagcagacctctcagcagaaaccctagaagccagaagagattgggaactaaggggactaatattcaacattcttaagtaaaataatttcctactcagaatttcatatccagccaaacaaaacttcataagtgaaggagaaataagatccttttcagacaagcaaatgctgagggaatccaccaccaccagggctgctttgaaagagctcctgaaggaagcactaaatatggaaaggaaaagccattaccagccactacaaaaacacactgaaatacac

SEQ ID NO: 13908 - DNA, 1044 bp, Homo sapiens
atctgcaaacagataattttacttcttcctttcctatttggatccattgtatttttttttcttgcctaatttttctggctaggacttccagttctatgttgaatagaagtggtaagagtggccatctttgtcttcttccttaagctgatagacatttaatttgttttcacttttctgtttattgtaaatagtgtgctataaacattcatttacagatttttgtgtgaatatacatatgtatttctcttggttatatgcctaggagtggaatttcaggttcatatggaaactctgtgtttaaatttttgagaagataccaacttgcataaagataatgataataatagccactatgtatgttgtattatatctctgctgcagacagtggttaaattataaatgttatatgtaagtgcagacttaaagtactagtttataatgagttaagttggcttgaaagaaatttaagtgtggggatgtttttgtggacaaaagcaagaagatgctattgcaagtctgtaggaagagaccctcacaggtaccataaggaaaataataggctagttaaaagaaccatcaagggttaaaactcctgtacagagcaggcacttagaactcactcctggggaggtaaagactacagtaaaagtttattgcatgaacagaggcatccaacatgtttgttgcatgaacaaaacaacttcttttgcattaggaaatatatgtatcatgtttaccatagtccaaataacatggaattataaaaatatatacaaaaattctctgatacttcttctttcaagagttaaagcctaattcctctccccttgagtgtgagctggatttagtgacccgcctttaagaaacagatagaagtggaagtgatggcgaacactttggagaataggtcatggaaaggcactgttacttctgccttgttcactttctctagaattattcgctttgaggaaagccagtttccatattgctctgtgaagaggcctacatgatgaagaactgaagtctccaatcaacaatcacata

SEQ ID NO: 13909 - DNA, 1034 bp, Homo sapiens
aatgcaaaaacgttaagaagcagtttggtaattttttcaccatgtttcagtttgatatggctgatataaactttaaaagctcaacatcatgccatcaataacattcaacttcaatttaaatgattaactgtttcctaataattgcatactcagagcagtaaattgcacaaaagatccattggtctactagggcgtgtgctagccgttcaaacataaaaaacaaaaagaaaaacaaccctaaaaagaactatgagctggcagtgccccaagtccaatgggggttgcatttcaccctctgggcccttatgaagctcaagacagaagggacacatatagatagtattgaaagtttcaattcttgaacttcataggtctagaattctagaaaggttcagcaatatattaataacacatttgataaaaggtctaattcagtttttattttgcatttctaaatatgtaatactttcggcctggcgcagtggctcacgcctgtaatcccagcaatttgggaggccaaggcgggcagatcacgaggtcaggagattgagaccatcctggctaacacagtgaaaccccatctctactaaaaaaaatacaaataaattagccaggcatggtggcaggcgcttgtagtcctagctacaggggaggctgaggcaggagaatggcgtgaacccaggaggtggaccttgcagtgagccgagatagcaccactgcattccagcctgggcaacagagtgagactccgtctcaaaaaaaaaaaaaaaaaaaaaaaaaaagatgtaatactttctttctccaatccagacagtttcactttgacaatctcaggttgccttttcattgccaaattgatttttatggccattttgtttatttccccttttctatgttgtgtttcaatcaaattatgaaagcaagagtgttggtataattctcagctttatgcaaaaatcagatagttgttttggcttgtcagttatcaactatagcagaacttttctttagaaccacttctggagggagaggaa

SEQ ID NO: 13910 - DNA, 1073 bp, Homo sapiens
tgtgttctctgccctctctgtgttctctgccttgtgtatttcctgtaaactgggagttcagtctgtaggcttgaccatattcatatttgattttggggagcagggaacaagaatatttcatagtaggtgtttaatttcatcaaaacgtatacaatgttaatctttttgtggtattactagccattgacatcatagcttagatccagtattttgtttgtgttgcaaagcgttgctattgtaattctgtcattcttcacttattatatgtaatgcttctaaaaagtaatacttccacgtgtcaaccatttgttaccatggagtacattttgcataggaaaagtaggataattacctgattatttgcctttattgaccaattttcaaaataatgtttgttctattatgtccaataaaggtgacctagggttttttttgttttttgttttttttgtattttgtttactttttgttttcaggtgtgtgtgtgtgtgtgtgtgtgtgtattgtgcgtgtgtgcatacacatgcatacacatgtgtgttccactggcatactgttttgaacttatgacttaaaacattgatgtagttcagttcatgtaagttgtgattgaaattgtccaacctttggtctttgggaacctcttcaggttaactgttgcatccttctgagaagccctctatctggtatgataaaatgtttcaggctcatctttacgtttcttgagtcagaacttgaatgggccaaatggtatttagagagcacaatttggccttatgagtattcatagatactgggttgattattgtttctgagctttttaagtggcaagtctgagaaaacatgtattttttaaagaggtaatacttgagttcatactgatattttcaatgcaagtccaggagtatagatttttttttcttatctgacatctgtttgtaccttcgttcatgccatactatcataattattcatttgctttgtcccttagtacagatatgacagttttataataagaataccaacagtctgattactgaaagcaattatatctgcatttctttctgtccttt

SEQ ID NO: 13911 - DNA, 1058 bp, Homo sapiens
ttcttttgaagtatattttcactggatatagaatcttggcttgatatatttttctttcatcacttttttcctgtcccattctccttttcttccagtttcacattagacttcttgatattgtccaagaggtcactgaggtgcagtttcttttttctttttttttcttcctgcagattggataatttctctttgtcttcaggttcactgacccatcaccagtctgctgttaagttcatccagtgaattttttatttcagatattatactttttagttctggattttccatgttgttcccttgttttattctctgcttagattacctgtgtgttcatttattatgaccatattttctcttaaatccttaaacatgttttaaaaagtttataatagtcttctgattattctaaatttgggttactgtgggtttggtttcagttgactgtttcttctctttactagtggttacatttccccgtttcattacggatctagtaagtttgactcatacactgtgcattttgggagctatggtgtaaagactgaattctgttatcttcctctgaaagaatattgacttttggtattaagggtacttaacttagctgggctccaaactttttctcctgtgttgggcagcagctgaaattgcttgcttctttcaaccctgtatcttttcaggagctgcaaggagaatgttgtggttagattggagtgaggaaggggtagggtactgaaaggtgaagtcagagaggtgacctttgttaagagccattttggtagagtgctgggagtaaaagcctgattagagtgggtataagagagaatggcaggaaaaaaatttggtacaaggagtttaagcacaggggttggcatttaataagtattttaggctttatggatcacatatagtttttgatgctgctgttttgcttcttcttcttctctttcttttccccttttgacttcataatcctttaaaagtgtaaaatccattcttagcttacaggccatttgaaaacaggcacaagttgggctcagttgctcacacttttaatc

SEQ ID NO: 13912 - DNA, 1052 bp, Homo sapiens
ctattgtctaaactcttctgtgttctgttttctctttttgtgcatgaagatagactatacactggaaaaccagaaaagctacatatgacttacacagaccatccatgacatgcctgggctttccaatcagtaccagatttttttcctcttcctcctcctccttctcctgggctttccgatcagtcccagattttcctcctcctcctcctcctcctcctcctccccccgctccccttcccccctcctcctccgcccctcctcctccacctctcctcctccccctcctcctccttctccctcctccttctccctctcccttcttctttcttatttgtttaaataacatcattttactccaggacagcaagatcttttcacatacaaaattattatctttataaccttccttaccaaaaatacatgatcatcatatacataatttttttcatacctttctcccccacttgtttccttactaccttgtttcataaaaaactttttcaagcccataatttgaattaacttttagataacttctgaattaaacaaaattattatttttctcataacattttttggggcacattttttaaacagaattatatcttatccttagtaaccttaaatgttagtgaaaccctagaaagcagtcctgaactatattagcattttatagatgagaacagttccacaatttttagaaacgtatttccctatatcacaaccctttcttaactggaaatgacccagatatccaatgagcatcaaaaataatttcaaaattttaaattacacaagaagtttacctaaaacatttatcccaattacaagtattcagttctttcattttaaacagtttatctagattacttctgaaaacatatattagatgccatcatttaaagttatttccttattaaccattttataatctatgaatatcagtcattcactgaaataagaactttaaagttaactacataggcattttcaccaataactattttcattaaaccaataacttaattactcttttcaaaaaatttgcacaa

SEQ ID NO: 13913 - DNA, 1026 bp, Homo sapiens
acttgtgcaaggcacaatggtcatatttgttattttttgtttgtttgtttttttgagacagagttttgctcttgttgcccaggctggagtgcaatggcatgatctcagatcactgcaacctctgcctcccgggttcaagcgattctcctgcctcagcctcccaagtagctgggattacaggcgcccaccaccacgcccagcttatttttgtatttttagtagagacagggtttcgccatgttggtcaggctgatctcaaactcctgacctcaggtgatccacccgcttcggcctcccaaaatgctgggattacaggcgtgagtcaccacgcctgaccatttgttaaatttcaaagtggtatttctcaaagtgtaaccatgaaccatgcatatcagaatcacctgggtgtttgttacaagagtgattcaagaacctgttccttaccatctgaatgggaagttttgtgtgagaccctatgcatatttgagcactggagccctgaagcctttaaggacctgtcttagtcattgccattcactatctgagaatcttagcacctctttcccctaggcgtttttatttataagccaacatagacaaagataacaacaaagaaacccaaacagaaaaacaggtagaactaagaatacatagattacttttaagaagcattaatggggagtgaatttaaaaaaagaaatgggaatttcacatgtgcctctaagaaataaaattgctatgtacatgttcatgtgtatttatatatatagctccataacccctcatccaaaacctttgggtctaaatgtatttcagaatttgaaattctttttttgcattttggaaggttaataggatttatataccatgtgttatatgtccccattaaagccagcagcagcaccttataagtcaaacaagcatatgaaaatttgtttggcaaaaacacatatactccatgacccagccttttcactcctaggtttatattcttccaacagaaataagcacacacgcacatgtaaa

SEQ ID NO: 13914 - DNA, 1026 bp, Homo sapiens
gccaccacacccaactaatttttgtatttttagtagagatggggtttcaccatgttggccaggccagtctagaactcgtgacctcaagtgatctgcccgcatcagcctcccaaagttctgggattacaggcatgagtcactgtgcccagccataaggataaactttaaaatcgtgtcttccctaggaaatcactaaacttgctcatgttgccatattgctagttctgaaaggctagttttattttgttttgtatgaaagaatatctgaaaaagtagaaaagtttgatattaatgtttcccaaaataatcataggtaggctctttttattcttaacaagaattaggaataaaattttgaaggtgttgaaatttatagcctagccaattcagttacggattctttgtttcattggaatgcagcctttcagtagtctattgtctgatttaattgactgttatctgacaggtcctggagttgttaattcaccgagatggggaatttcaagaactaatgaaattggcacttaatcagggaaaaattcatcatgaaatgcaagttttagaaaaagaagtagagaagagagacagtgatattcagcagctacaaaaacagctaaaggaagcagaacaaatactggtaagttgacagaggttggttcttaaggttaaaaaggatgttgtttaatctgtttctgaaaaatctgttatcaatattttgaagagcagaaaactagactttccaagtctaaaggtgatatcttgtcactcaccattgccagtggttaaatgaaaggctattgtcattctcttttttacttactgttttcaaatagtctgcattacttgtgagccacattttcgatgcttaaagattttacagtattgaattatagaaatggaaagttttacttttatcctggtctgatataaattttaattatcagtagtctaaatctctctttttttttttttggtctctgatccttagcataaaaatcagggaaatttttcattttttatatattt

SEQ ID NO: 13915 - DNA, 1022 bp, Homo sapiens
cctagccacctggctgctacatcctcactttgctttcctctccccattgtgccaggccctggctacacctcctcagctccatctttggggcactgaactgtctgtgtcttctactgtgctctttccttccagacatcttggctgacttctctcatttaatccgtgtcttatgtcaaagctgtgcccttaggaagaccttctctgaccaccctattgaagtagccaacccactcccccagtagtctctaataaaacattgctttatttccttcccaacccttatcactctaggtttatttcttctcttagttcttcttgtctcttgtattagaatttaagtgccattgttcactttgataccccaagtatctagaaagtgcctggcacatgataggcactcaataaatatttgatgaattagtgaataaatgaagactttgcattcttatatctacttttttcattcattgattaattcataaataatggtatggggaagtagtagtgggaagggttgggtctaattgacatgatccagaaaaatgatatgatgctagctggaaggaaggtggaaatttgaaggtaaaaatagcctggtagccagtgagaaagtacaaatgctcaggctgatcagagcagtgtcaggtagctagttgtgaagctgccccttctgcataatttctcaaaagtcccatctatcaacaagtttgaaactaatatataaacattacctgctatacatttttcccaatcttattttgctcatcagatactaattttcatacagggaaattgtcatatttattaaatgagcattctaaaaggatatcattttattatgtgtaaggatccctcttagttgatgtttaatttaaaaaattcaaataaagtggagaatcattaaaaaatggtccatgcatcccttaattgttttattttaccttaaaatatataaacatatgttcattcactaatcatgttatgtaagacaggagtcagaaaactttttctgcaaaggccag

SEQ ID NO: 13916 - DNA, 1097 bp, Homo sapiens
atccttttatattggccgataccagttttaaaaggcatcttatatcacttttctgcagaaaaattatataaaagctacctcattggtaggtttgcgttgtccagtgaggtaaagttcaaattctttagtcagacttccacatcttcagtgccattcccagtctactcccgatttggtgaatgattcatatatccttcagaatccagctcaaatgtcactttttctatagccaacattctttgacagctttagaataaatcttacctgttgtattttaaaatatacgtgatataatcagcactttatttttggtgtaaatttagtccttgccatcgtattgctaccaagttaccaggtcagcacaatatttaatgatggaagaaaacccgaaaacacctagacagcagaaattaaatggcttatgtgtttgatccactgtttaaaataaactgtattagggccgggtgtggtggctcacgcctataatccgagcactttgggaggccaaggcgggcggatcattggaacttcttcacagaatgaagctgctctggtggtgtgactggcttccagaaaggtctcatgtgttcactcagaggtagttatgtgtactgattctgtgatctgtgaagtttgtcagtctctgaatgtaatttgtgtctggcttgcatttatgaaaatgagaagaaaaatcacgaatataccttacatatttttagatttagcctctttaaaaatagtggatttataacttaggatctttttttttctattaacctgattatatagcctttcgggatatttattagtttataaaatgtaatgcaaggagatagtcttaaaaagttgaaacacaggttgtaggctaaacgttttttttaacccatttgtaactcaaaactcattgttccacagaaccatgttgataggaatcttgagttttccacaccagcctgttaattctgtttacctgaaaagtgtattactgctaataatgtaggctctaaccgctatggaaattttatttctatggggaattgtgtctggattctaatgcagtatgctgggaatgcaccttctttttagcaggacagggc

SEQ ID NO: 13917 - DNA, 1050 bp, Homo sapiens
cctggcgcacctccccgctttggcagctgtggcctccctggccagtgcccttgcaggaggccggccggcagcctgatgacccgtactctttagtcactgacgtcagattatttttataacgttccctgacagttcagagtcccttcgaattgcacttttctggtttcgcttatttaattaaaagagatgagtgtaagtataaaaaatgaaggtgaaataaccattggaattgtatttggttacttaatactgttccacaacatcttgggacgtctgttttcctttggagagtgaggccttgttattattcttttctgataaagaaaacattttatttcctttgggcttgcattagctctttcctagcaacccattatcccagctcagtacctttcaaacagaaaactagagtctggggttttgttgtgatctgaatttgtaagttattaatgtgaaagggggagcaggaagctccccctttgcacaaagggggatttgtttgcacaaagttcactgtaaatactgtgagaattgaattctgaaaaggtcatatttagtgatttcaaaagcacacatttaaatgaagactgactaaataaaaggtaccacacacttcttggttggtttcattccattgcatgtgtgtggctgtgtttgttcttgccaccgttccaggcagggaaagccttatgctgccccagggccccagcacaccttcctgtatgccccaccaaccagtgaccctgcacccgtcccatcgtcaaggctgtgaactagggatggtccagggcatcagaaaccatgtggaactctcccccactgctgcctgggaggttccccagctggaagcgtcctagcgttaggccagtagggactgagatcataatgttcttggacgaggctcttggccagagccaggcatctgcccagaagttaggattgctcctggagaaaacactcaggagcaccctccccttggaaatgtcccagaccctcagcctcataggcggacctcctttgatggctctgggggagcaatgtggctgtcca

SEQ ID NO: 13918 - DNA, 1033 bp, Homo sapiens
ttaaggtgaattttttgggattttctttcagagcctctgctctgtcacccaggctagagtgcagtggtgcgatctcggctcaccgcaacctctgcctcccaggctcaaacgattctcctgtctcagtctcctgagtagctgggattacaggcatccaccaccacgcccggctaatttttgtagttttactagagacggggtttccctatgttggccaggctggtctcgaactcctgacctcaagtgatccgcccgcctcggcctcccaaagtgctgggattacaggcgtgagccaccgtgcccggctgggattttctttttaatgtgccactttaggttgaccatatctcttcattacctttctgtttcttaaactaacccacatcttaattcttttctctgatgtcttgaacgtgacaaaacacattctgcagactaaagtggcattctgccttttacaacaatgtctttgagcataactagattatgtgataatcgtgcaggaaattctttcccttgtagatcttgcgtgtgtgtgtgtgtgcgcgcgcgtgtgtgttttgaagagtcgtactttgagttagaggaccattgcttttactgcgttgaataaatagtatgtgtttttctcacacctacctgtggtcacctttttgcctagttttaggtatctggcctctcaaatatcttttctgggggagggtgagagatttggggtaaagggctcagagagaagtaattcaatcaaagttgcctaaaaaagccatttttgtttttatttttgttgtgtgtccaggatttagaagaattctgctttaagttttgcatcaatcatttgacagaagttacacagactgcagcattttggcaaatggatggccctctgctaaaggaattcattgctaaagccagtaaatgtggagcctttaagaactgaagcgcaaggctgctgggttctgtgtgagtgctctggggcactgttgaggatgtgtccagtttgtgctctacgggtgatgtgattctgcaggtaaaa

SEQ ID NO: 13919 - DNA, 1050 bp, Homo sapiens
gatgtggccttggggctgtgtgtggcagagctgtggtgtttggctttgtgattcttctgtttattaacattctcattttggacaaaagagataaccttcccttctcccttcccccttcctccttctccctccctgcttcccccttcccccttctccctccccccttcccttcccttcccttcccttttttgagacagagtctctgtcacccagactggagtgcaatggcacgatctcggctcactgcaaccttcacttcgtgggttcaagtgattcttctgcctcagcctcctgagtagctgggattacaggtgtgtaccaccatgcccagctaatttttgtattttttagtagagacagggtttcgccatgttggccaggctggtcttgaactcctggcctcaagtgatctacccacctcggcctcccaaagtgctgggattataggcatgagccccaccgtgcctggcctatgcaaaagtgttttgagtagtagccagaatgaacatgaggttgatatgattcttatgtagctctctgaaataaccacctgtgattgataggtgtgaatgcatcttggtataattactgcagtcttgctgttgcccttttagtatggaagacaagtaaggtctatggccatgttgatgtttatggtgtaatataaacttttactttgagccaagtaaaacaacttttaaataaatctgctcttgaaaggacattatctgtttaaatattgatttgatataatatgtgttactggaatagatgcttgatgttgttcagcctaattgtaaggtcttacctcctatgtcctggagtgctgacttctgattatgagaccttacccaagaagcatactactgagaaatatagtaagtttggcttgttttccttttggattggaacgttcagagtccgtgacccccagccaatgcttatcagcccaatgagtgttctgagctctggtaggagatgagagaaaaagttacatttataaagaaatgggccaggcacgatggcttacacctgtaatccccagcactt

SEQ ID NO: 13920 - DNA, 1022 bp, Homo sapiens
ctgtagtcccagctactttggaggctgaggctgccatacactggacccgagatcgtgccactgcacttcagcctgggccacagagttgagaccctgtctcaaaagagaaagaaacttaaatttccatcattgtaaattaactgtttttgattgggagtagactttgttatttccagatagcagaggagactcatccattttttaaatcagctttcttttactcgaacaccccttgcatttcatccattctcattataaagtcattgctggacctggttcctgtcagcgtgatgtactccaaggattccaacaataaggagtgtggtgtgactggtttctgagtactttggaatgaatgggaacattccattatctggacttttgattctattaatgtggggggagtctttcagttattttaccagcttcatcataattaggtttgtgatcaagtcacaccctctttatcatcagctctctttaacccaaatcgttgggcatctacccttttcaactctaaacataagaataaatttcatatttacttcagcctagtttttctcatgagatcacattctacatatgtatcctttcgatgtcttcagtcttatataaataagaattctgactaagcctttagaaacattcgaatactgaatactctgtcccgtgccaggtactgtgctatggcacaggatacttgtaaaaataacaggaataaaaaaaaagacaagttttgacaaatgttagaaaaaaagaggtatacaatgatacacatactagaggaaattggctactgagaaaggtgataaccaggctaatgttgagcccttaaaaagtgccagccaaaatttcactgatcgtggtgaaaaggcaggagtttattgggcacattgactggaaaagctttccagcagtgggaagagtctgtacaaagccttgtgggaagcaccatggggtatttgaggaagtgaaagaaagcaagtatagctagatgaaagattataatggagaggaggatt

SEQ ID NO: 13921 - DNA, 1102 bp, Homo sapiens
cacatgtatacatatgtaactaacctgcacattgtgcacatgtaccctaaaacttaaagtataataataataaaaataaaataaaataaataaataaataagttctattctacttctacctttaggaccctccagttgttcttttttttttttttttttttttttttttttttttttgagacagagtctcgctctgttgcccagggtagagtgcagtggtgcaatcttggctcactgcaatgtctgcctcccgggttcaagcgattctcatgcctcagcctctttgagtagctgggattacaggtgtggctaatttttgtatttttagtatagatggggtttcaccatgttggccaggctggtcttgaactcttgacatcaggtgatcctcctgccttagcctcccaaagtgcagacattacaggcatgagccactgggcccggcctagggccccttgtttgtggccaacttctcttcttctttttttccttttctttccagtcttttatatgtagactcatttgtgtgtctgtgtctatgaaacataacatataatacagaaaaatatgctaaaatatatacagcttaatgaataattatgaaactcagacctctgtaaccaccacccaaagcaaaaacagaaaattttccgtgatttggatctgactttatggatttgtcatgggaagttgtgttataatgtaaaaggccatatactttggagccagattgactgtggttcaaatccagggtttgctgttgataaaaatccacgtggcttttgaacctcagctatctcatctataaaaattaggtgatggtaaggaatggaaataatacatacaaagcactctacacaatgtcaaacttatgataaatgtccatttattttttatttttatttatttatttttttgagaccgagtctcgctctgttgcccaggctggagtgcagtggcacaatcttggctcactgcaagctccgcttcctgggttcacgccattctcctgcctcagcctcccgagtagctggggctacaggcgcctgccaccacgcccagctaatttttttatttctagtagagatggggtttcaccatt

SEQ ID NO: 13922 - DNA, 1045 bp, Homo sapiens
atgtaaattagtatagacattatagaaagcagtatggggaagttcctaaaaatagaactaccatgtgatcaagcaatcccactactgtgtatatatccaaaggaaaaatgaagccagtatgttgaagagatacctgcactcccatgtttattgcatcacaatacccgagataaggaatcagcccaaatgtccaccagtagacaaatagaaaaagaaaatgtggtatgtatacatagtggaatactttttagccttaaaagaaagaaaccctctcttttgcaacaacgtggatgaacttggaggacattacattaccagaaataagccaggcaaacaaggcaagtatcacatgctctcacttatgcatggagtctaaaaaagctagactcatgtaggatggtggttaccaggggctggggccaggggtggggggtacagggatttggggagatattgattcaaagtataaaaaatttcagttagataggagggataagttcaagacctttactgtagaacatggtatattggtcagttttcacgttgctgataaagacatacctgaaactgggcaatttacaaaagaaagaggtttattggactcacacttccatgtggctggggaggtctcacaatcatggcagaaggtgaaaggcacatcccatatgacagcagacaagagagcttgtgcaggcaaacttgtttttaaagccatcagatcttgtgacactcattcactatcatgagaacagcgcaggaaagacccacccccataatttaatcacctcccacggcacacgggaattgtgggagttacaattcaagatgagatttgggtgggaatacagccaaaccatatcacatggttatgaactatagttaataacaatgtgttatattcttgaaaaatcactgacagtagattttaagtgttttcaccacacacacaaaaatgaaatgtaaggtaatgcatgtgttaatttttttttttttttctgagatggggtctcattctgtcacccaagttggagtgcagtggcacaat

SEQ ID NO: 13923 - DNA, 1073 bp, Homo sapiens
acaaacccaacagactaaaaactgacaaactgactctttttttttttttttttttttgagacagggtctctctctgttacccaggctggagtgcagtgggacaatcacagctcaccacagcctcaacctcttgggctcaggcgatccttccatctcagtctcccgaatagctgagactccaggtgcacagcaccacacccagctaatttttaaaaatctttttgtagagatgtctcattatgttgcccagcctgttcttgaactcctgggctgaaacactcctcccacctcagcctcccaaagtgctgggattgctggtgcccaccacctcacccagctaatttttgtagttttagtagatggggtttcaccaagttggccaggctggtcttgaactcctgacctcagatgatctgcccacctaggcctccaaagtgctgggattacaggtgtgaggcactgcacctggccagtttttagtctgttgctttttgaagataatctgtttttctctggctccttctaggatattttcctcctgggaaaagaaatctttttattttcccacttggagtttgttgggtgtcttgaatctgtggtttattgttttttatcaattctggaaaattcttagctattatctcctaacagttgcttctgtccagaggaacccaaacaaacactgttttgtattttttattgtatcctttatgtttcttaccctcttttctatatttgtcatctttggccctcttttatttcataattgacggtttcttctgacctgtcttaaagttcacagaatctcttaaactactttaaatttgctgtaaaacccatctgttcagttcttaattttggttatgtgtctaacttaataattattttttcatatctcagagttctgtttggttcttttcatttttcagatctggtcatttctgatcatttcttctggcttgctgatatattttacttccatttttctgttcctgaaatatttgctgtagttattttatgttgtataacctaagtgttaatttaggtttaactctccaacctggcatcagggg

SEQ ID NO: 13924 - DNA, 1040 bp, Homo sapiens
gggaggagtgcataggttatatgcaaatactatgccattttatataaagggacttatgcatccttggattttggtattaggaggtcctggaacctgtatactttctttgcatttcctgtttcagaaacacaaaaggggtacagatccaactcttcagcatatctttgtggtgtttacagagggtgttaagacagatactgttgttatttttctttatgcaaaatgataataatagggactgaaaggtagaaagctgaatagagtatggaggaaggtagctgaacaggcattgaaataattagagggattggatattgcatgtgcattcctcaacatttgaatcagcaggaaaaaaggaattcagtagactgagaaggatgatcatgttggctaagtattgggctacagattgtagagatgcatatatgggtggtagagaaaaagtagaaaccagcttttatacagtgttaacctcagctagcagagagcaatggactatacagttagtatctttttataaatttgaactgactgtaaatttgaaactacttccatgactatatgtatcttggttttgaaataatatatacttgggaatgcttattgaggtgctttttttgtctttttagattatgcataaataaattttagttaacttcagcatctggtattttaaacaagggtcagaaaaacatcagaaatggatagaagcatttttcaataaatattttgggaatgatccttgtataacttaatttgtgtactaattcatattaagtattcacttatagttatttttctatttattctacttactagtagttaaaaattaactattttttaaagggaaggggaagatgaaaataaaaattgtgattctaaataaaatcttagcattcagatagattcacagatattacagagaaaatttataagctgataattcctagttaggattatcatactatttaatgataaaatgcgtatttactcctgtataataagaataaattctcttggctggaatccttcaatagatg

SEQ ID NO: 13925 - DNA, 1085 bp, Homo sapiens
atatttgctgataagaatgtaacccgtgacttttagatgcatgaaaaagagcatggttgctaagccattcagcctggtattggtcacaacattacatttctcgggattctatagtgtaactaaaacatgaaatagacattcaaatggtagttctaatgtggcagacactgttacgagcttcatgataccttatttaatctgtgtaacaagtatatgaagtgtggcattatccccactttacatgagtaaagtattttttgagacggagtcttgctcctttacccaagttggagtgctcaggcactcatagctcagctgcaagctcaaacttctaggttcaaggaatcttcccaccatggcctcccaagtagctgggactacaggcggacaccaccacacctggctaattttttaatcttttttagagacggggtctcgctttgttgcccaagcttgtcttgaactcctgggctccagtgattctcccgcctcggccttccaaagtgttcgaactacagatgctagtcgtcacacccagctggaactttagataaaaaacctcagtgtgcttatgtagcctgtgcatgtcactcagtggatatgggtattatttattcactaattgtctattgggtatctatcaatgttaggtcttggggataaggaataagatgcagtctgtacttcagggagtttacagtccagtgggggtgataattacaatgcagaacaacaattgttacagtatagtattccgaaaatgcatgccaaaaaaactacttggaggtgagcagaaagggaagatactctggttgatttctaatggatgaatgggagtgagctgattgtgaaggatgaaagaaaggtggccaggcaaagggcgggagaaggctggtggaagaaaggggcattccagactagagggagcagtaattgaagagtcctgagagaaatgtaggagagagagagactaaagggtaaactggggtcaaatctgatgaagggcctttattggggatttaggcatatctaagagtagataaccatgcttagtcttgtccattagaaacagtacaacttagctc

SEQ ID NO: 13926 - DNA, 1059 bp, Homo sapiens
caaagtgtgggattacaggtgtgagccactgcacccggctcttgtaatgtctttgtctaatttgaatattagggtaatgccagcctcatagaatgatttaggaagtatcccctctgcttctgtcttctggaacagattgtataggattggtataatttcttccttaaatgtttgatagaattcactaatgaatccatgtgagtctggtgatttctgttttggaagtttattagttattaatccaatttttttaatcaatataggtttattaaaagtattgatttctttttgtgttaattttggcagattgtgtctttaagtaggttatcaaatgtgtggacatagagttattaataatattcctttattattcttttagtgtccatgggatctgtagtgatgcttctctttcacttctgatattagtaattgtgtcttctctttttcttagtaagcctggctagaggtttatcaactatattgattttttttaaactagattttggtcgtgttatttttctctattggttttctgcttccagtttcattgatttctgctataattttcatttattttattctgcttatttggatttaatttgctcttctttttctagtttcctaaggcagaatattggattaattattttattttacttttttcttcgatggcatggtggagatggctggtgttgtatgaactcagattcatgacaactgaagaaagttgcaccttggccttctctgagctaaaagctgaaagctggattaatgattttaaatcttcttttctaatatatgtattcaatactataaatttctaagcactgcttttgctgtatcttagacattttgataagttatattttcatttatttcaaatatttttaactctcttcatcagactttttctttcactcatatattacttagacgtatgttgtttaatctgggaggctgagacaggtggatcacgaggtcaggagatcgagaccatcctggctaacacggtgaaaccccgtctctactaaaaaatacaaaaaaattagccaggcatgg

SEQ ID NO: 13927 - DNA, 1049 bp, Homo sapiens
aaattaagtatttactggccagacgaggtagctcacatctgtaatcccagcagtttgggaggctgaggtgggcagatcacaaggtcaggagttcgagaccagcctggccaatatggtgaaacccccgtctctactaaaaatacaaaaattagccaggcatggtgtcacatgcctgtagtcctagctactcgggaggctgaggcaggagaatcacttgaacccgggaggcggaggttgcagtgagccaagatcgtgccaccgcactccagcctgggcaacagagcgagactccacctcaaaaaaataaaaataaaaaaaataagtatttactatctgccagggactatgttggaaatttttcttgcattacctcattttacaagtcacagtggggaaactgagggttggagtagttcattaacctgcccacagtcacatagggcaggttacccaggtcagtcttcattccactgcagtcagaagtgaatgaagattaaggaagcagagacaaggagtatgaacaattctttctggaagaatgatggggaaagaagagaaaggattgataaagtatagtgacagataatctctgcttttataataaaaataaagctcagctcctctgaggttgacactgaaaaagagtaactgcaggggccagaagcagagagaccaacaaaccctggcccctgccctggagattcatctttctcccgagactctccctctgatgattttggctccatcgaagcctccttgggtcatttcttccttcatatctgaggtacaggcaatgggatgacaaaaggcatttttcaacatctctccacaactaagtcaaagctgaaaagtttaaaggacttttctgaacatgagggcaatgtttcccaaccttttgaggtcatagaaactgctctggacaccagtttaaatatacagaatcttgggggacatggattttgaaggtctgcagtgggagcctgggaaaaggtattttaaagtaataccggttacccttaaatttctgcaagttctagtatcactgtgct

SEQ ID NO: 13928 - DNA, 1025 bp, Homo sapiens
cctttgcttcaagtcgtcccaccttttctggactgaaccagtgttcatcttacacacgctgattgatgtctcgtgtcttcctaaaatgtacaaaaccaaactgctctgaccacctcgggttctgacctcctgaagctgtatcatgggcacgcatcctcaaccgtggcaaaataaactttctaaattaactgggacatggctcagatttttagggttcacacgcaaaacccacaaattatccttaatataattatataatatatatttatgtagttagatctggttggtggtagatactaatacacttttgcccaactaagtgtaaaacacattaaatctgtatagcaatctctagactattacacaaaattaactactaactagaaaacacagtatattaaattctcttaagtgtggaaaaatggagaaggaagaataaccttttctctcctcccgtggtcctaatacacagaacagcgactgggaaactgccactagaaaaagatgactgtccaactaaaacctgcatacacagctacatccttccctggaagagcacagtggaactagatcctagtacagatagcacagggattgtcaacattcttgtcacactgaaatttccttctactgatctccaagtaagtaactaacagctgaaacttggaatttatatatcagcacagcacgaagactatagatatatctagtcttatgtaagtttcatattgtgtgataaatgtattgccccccccgcccccgaatgccggccccttgagaaatatatttttacagggtagaatttctaatatatataaaatgcataatgttaaataatgtttatatattaatatgttatatactaatattaaatataaaatatactgcatattatatttttaatataaaatgtatattattgcattgatttacttcctggtgttgttttcattcctgggccttgacaaagataaaaacttctcagccttcctccccacctacccagacagaaatgatcagatgtt

SEQ ID NO: 13929 - DNA, 1082 bp, Homo sapiens
cagaacatctcataaaagaattaagatacaaatagtatatacagatagtagattgtaacaaagtggaacgtacttgcaagacatcacctagctaaaatacttgattccctatgaggacaaactgaaaaataaaatatttcaagcacacaaagaaaggacaaaataggggaaaccaatgggaaatataaagtttaaacttatttttaacatttaaaagcaactacacttttccatttgagccagttcaaaaaggagaagtcaaataaagactttagaatcctgtgaccaactataatttgagcttgataacatgaatggcatctgaaagatgcaagccaagtatttctagtactgtgaccttgagagataataactgagcaacctgctaggttaaccttgaggggtaaatcatattgatagaacaaactgaataaagtgaatgatacaccagacaattaggcaccaattaggctcacttctccattttccaaacctaccaaaaaatatctgaatagacagatagattcagaccagggagtgagcaaaaaataaaaatgattgctaattaggcaattatatactaaaagtggaccttttaaggccagagttttcatcccaatcaccagagatccccataatttcaccgtattcagattggctatctctacttttaaattggcactgtctaaaaattcacaaacatttatggaatggtaaaaattttgagcttcaaacaattgaataccatttggtgatgcaagaaaatgctaattttaaaaatagcttctgattttggaattatggaagtctaaatataatgttttctcactttaaaatggaaaaaactttcgtgctgtttctaaaacacaacataaaaagggaaaaccatttggcactgtgtacacacaggaacatcccagttttagtttttaatcatgtttttcaaggaaacaattactttctccaaatgcatggtttttaaagagtacttcatatttccaggacatcttcttttgacctagtgtgtttcttcttaaaaatcaatgacagttttgtctctaggtttctgactttttgaagca

SEQ ID NO: 13930 - DNA, 1089 bp, Homo sapiens
agactagcctgaccaacatggtgaaaccctgtctccactaaaaataaaaaaattagccggttatggtggtgcatgcctgtaatcccagctactcaggaggctgaggccagagaatcgcttgaactggggaggtagaggttgcagtgagccaagatcatgccaccgcactccagccttggcaacagagtgggaatctgtctcaaaaaaaaaatatatatatatatacgtgtatatatacacgtatatatatgtatatatatacgtgtatatatacacgtatatatatacacgtatatatacgtgtatatatacacgtatatatatacacatatatatacgtgtatatatatatatgcgcacaccaaatgtcacttaaggacactgtccctctggatgtttaccaaaatctagaagagaaaatacaccttttgcaactaaaaggctgcaaactaaataatccaaattctagacatagaattttcttaatatttcatgtcaatttaaagatctggacttatgacaaggcttaataacaatcactaatttcattctatctcttctagagcaataatggtagtgtagcaaattcctattcatccttcagttttttaggtattacctcaaaagggcaaccccatctcccacatatatacacttgtgttaaaaattaataactgctggctgggcacagtggctcacgcctgtaatcgcagccctttgggaggccaaggcaggaggatcacctgaggtctggagttcgagaccagcctggccaacatggtgaaaccccatctctactaaaaatacaaaaattagccaggcatggtggtgcatgcctgtaatcccagctacttgggaggctgaggcatgagaatcacttgaacccaggaggcggaggttgcagtgagctgaaaccatgccattgcacttcacctgggcaacaagagcggaagtccatctcaaaaaaaataaataaataactgccttttctgtactatcacccttaaaacagtctcattattgcttatgttaaatcatcacatgatttacatgcttctatatttccctgctattagcctgtaaggctaa

SEQ ID NO: 13931 - DNA, 1028 bp, Homo sapiens
ttacaggaccttaaaatgggtaaaatgggaaaaacactcttaatcaagataataaggcattttttgaagtgaagcaaatcaccatatcagcttgaacaaatcctagctttaaaaatgtaaggcagagccacgcacggtggctcaaacgcctgtaatatcagcattttgggaggccgaggggcggatcaggaggtcaggagtttgagaccagcctgaccaacatagtgaaactcagtctctactaaaaatacaaaaaattagccgggtgtggtggctcacgcctataatcccaggtaatcaggaggctgagacaggagaatagcttgaacccaggaggcggaggttgcagtgagcagagatcgcgccactgcactccagcctgggtgacagagcgagactgtctcaaatatatatatgcaatgaaaatactaggagtagagacataatttttaaatatctttagagatatttaaagcttttgtaagttagcgcttgtcttaagaagatttcttggaggcagtaggaaacccagtgtagaactggattattaagtagtcatttcccttttaagaccataaaagcaaataaaggtgaagaatctggataaacaggaaggaatcaattccacaaggatatataaccatatacttttggggagaattgagttagtagtatcaaaggaggattttttgatgtttatattctaggacgcttagacattaatgagactacggagccatagcttaggtttagaaatactacccttggaattcttgttctgtagtaaataggaatttagcttcaattagaggtgtgtgtgtgtgtgtgtgtttcccactaccaggcacataataggtgttcagttattgattaaaagaaatgtctttaatttcttcagtcttctctgaaattggcagtgggtcagttgattctggcatcatatatgcagaaaatactcattctgtactgtctttgccagtcttttgaacctaaattattgttgagagttgattaaacaatatcacttg

SEQ ID NO: 13932 - DNA, 1926 bp, Homo sapiens
aggtcaggagttctagaccagcttggcgaacatggcaaaaccccgtctccactaaaaatgcaaaaattagccaggcatggtggccggggcctgtaatcccagctacatgggaggctgaggcagcagaatcgccttaaccctggaggcagaggttgtaatgagccgagatcatgccactgcactccagactaggcgacacagtgagactgtctcaacaacaacaaaaaagaaattgtattcaaaagcttaaggacctttttgtttaaattctaatttgaagatcaaatattatattaaagttctcattttttatccagcaatattttgttcccaatataccatacatagtggatagaactaaatgccagcgtttgcatggaaacactgtcttggtgcttttaaaaatcatttatcaatctcttaacttgttttatttcctttcaaccattgcatgaaagacttcaccaaatatataatttttgattccactaaaaatattccaggacttaacacaaatgcttagaatatttattgaatgaattacaaagtttacccaatactgtctaatattttttagaacaacccaggagttaggtgttttttgtttctttttctttgtattcctaaatgtatctgaagtcaggttttagaaaattatattcaatctgtcttctaaatgacaagaaaaaatttgcattttacatttaccagatgattctttatatctttaagtgctcttaagtgtgatgaaggatcatttgcagcttttatagctaaatgaagacttttcttatttttaatcctgacaatgaattaaaggaaaattgaaatatttgagaagtaagaaaatataggaaaagtgttgcattaaaacttatagtatgtacattccagtctcttcttagagaagaggaggtggcctgtcgatatctaatgaaaaataacatttaggaaactctcaacagtgctggatgttttatttgtagagttataattttgaaacacataaggagccagcagtaaaatgaaagtttataccttttagtgttaatcttattttggctttttgttttgcaaaacaaactgcacatagttatataggggtatatattaagttttcattttttcttgtttggaaaaaaatactaatctttttcatttaggtttcttttttaattgatgccaaagagttccaatattgaacatcttaagtctgttacttggattacggattgagtttggagcttactcagaggactacaggagagtatccaggaagtagcaagaaatgtatttcagtcattctatttgcatcttatattcaagtacaaatctctcaagatcacacattaatatgtgatagtagatttgaaaacttagcctagctgtagactaaattccgtatttaacattaaagattttcttcagtcagttatgtatctttttggttaatatagagttataggtgtttttaagccactaagtgtcattactgttacatgcatcagttagccctacttggattagcaagattatgctttcataaactattctttctctaaattaatatatttatatatttagaagttgacattctaaatcaaattgtgtttttttccttttgcaggtggataattactgtaccttcctcatggaaaaagttttatttaaagtgttatttctcattgaatactatcaaaaaggaaaaaaaaatgacctaaacttttgagatagatttggctctagtaagtatttagttatatcacttgcatatctgggagaagaaataagagactatcatcagtacattcccatctactaaaaaaatttattttacacatgtcaagggattacttataacttccattttattactaatagcttgaacccttttaatgaagacctaactcctccaccagaaattta

SEQ ID NO: 13933 - DNA, 1267 bp, Homo sapiens
ccccatctctactaaaaatacaaaaaattagccgggcgtggtggcacatgcctgtagtcccagctactcgggagactaaagcaggagaattgtttgaaccggggaggcggaggttgtaatgagcccagatcgcgccattgcaatccagcctggacaacaagagtgaaactccatctcaaaaaaataaattaaaatgtaaaaattaaaactaaataaataaataaaaatagagacagggtctcactatgctgcccaggctggtttcaaactcctgggctcaagcagtcttgccttagccttccactgtgctgggattataggcatgagccaccacccctggcctaatttaattaaaatctgaacaaaaggccgggcacggtggtggcttatgcctgtaatctcaggccaaggcaggtggatcatgtgaggtcaggagttcgagaccagcctgggcaatgtggtgaaaccctgtctctactaaaaataaaaaattagccaggtgtggtggcgggcgtctgtaatcccagctacttgggaggctggggcaggagaatcacttgaacccgggagaatcacttgaattccagtctgggcaacagagcgagactccatcttaacggcaacaacaacaaaaatctgaacagaaatgctctatttacgttcttttccttatctgtagtgttttaaagtcattaaacttaaaaatgatgttcaggagaagatgagtgtatttgcatagtctgtcataactctggtattattttgtacaaggagtgtgttagggttttcagttgtaaccatgcagaaaatctacaaaataaaagcagttgttaattagtcctttacaatcagaattgtctattttggaaatttatgaagtacttcagatgtaatttaagaaattgtatttgagccaagcgtggtggctcacacctgttatcccagcactttaggagcctgaggcaggtggatcacaaggtcaagagttcgagaccagcctgaccaacatggtgaaaccccatctcaactaaaaatacaaaacttagctgggcgtggtggcgcgcgcctgtaatcccagctactcaggaggctgagtcaggagaattacttgaatctaggaggtggaggttgcagtgagccgagatcacgccactgcactccagcctggaaaggaggggaaagggaaaggaaaggggaaagggaaagggaaaggggattgtattcgaggctgggcacggtggctcacgcctgtaatcccagcactttg

SEQ ID NO: 13934 - DNA, 1072 bp, Homo sapiens
gtgtactgcaaggaacaaaatgtttgtaaattctccttttaccaaggtaaagatcaaattttataaatttacttgtttgtttatacaaggaaaaataacttcatatattgaatatattcaaaagtttaagcatttagttgtattgccctgttaagttggcatagcaaataaatgcttttcttttcctcattttattctttgtgtttcctaacctatagcactgtgctgggcacagaatggacttcagttaagtttttgatgtagaaatgttttattattctacttaaaatctccttaaaaataattatgcatattacatcaatgttataatgtttaaacatagatttttttacatgcattctttttttcctgaaagaaaatattttttatattctttaggcgcgaatgtgtgtttaaaaaaaataaaaccttggagtaaagtagcagcacataatggtttgtggattttgaaaaggtgcaggccatattgtgctgcctcaaaaatacaaggatctgatcttctgaagaaaatatatttctttttattcatagctcttatgatagcaatgtcagcagtgccttagcagcacgtaaatattggcgttaagattctaaaattatctccagtattaactgtgctgctgaagtaaggttgaccatactctacagttgtgttttaatgtatattaatgttactaatgtgttttcagttttattgatagtcttttcagtattattgataatcttgttatttttagtatgattctgtaaaaatgaattaatactaatttttcagatgtatcatctcttaaaatactgtaattgcaatttaataattgtattgaatgccatcaagtttttttaaaaagcttatgcagcattagaggaatttattttaatgcacatttatattcaacatagacattaattcagatttttacttgggataaaacaaattctagttttccctttgttttgaaattacttttaaaatatgtctttacagataaatataaaatatattaagcattttgaacagagcttagaagacaatatttagtactgtttctga

SEQ ID NO: 13935 - DNA, 1034 bp, Homo sapiens
gtggcgctggcctgtaatcccagctactcgggaggctgaggcaggagaatcacttgaacctgggaggtggaggtcacagagagccgagattgagccacagcaccccagcctgggcaacagagtgcaactctgtctcaaaaaaaaaaaagcaaacaaaaaaaaaaactcccatgataaaagtttacctacataacaaacctgcagttgtaccactgaacttaaaataaaagttaaaaaataataataataatttttttttgtagagatggggtgttgctatggtgcccaggctggtctctcaaattcctgggctcaagcaatcctccgacctcagcctccaaaagtgctgggattacaggcatgagctacctcgtccagcctagatacattcttgaatatgtaactttgggaagatttattaattgattaaggactaggaggtccagctaaaatgcaattggatttataaggtacttaaatccagatttaaggtatgaaatcaagaatggcgaagaaatcaatgaactgaggtcttaaagaatcaattcattttattgactagctgaatacaagggatgattgacacaagatgaaaattgagtgttaagaaagaataacaatgggcaagtatgaatgattaggacataaaagggagcaaaagaagaatgtaagaaaaaatgtaaatagcatatttatcaaacctttttatattgcatttcttgactaacatgatatatttgtaatttagtcatacttagtatttaggaagtaaagtcatcaaataaaatatgaatgtttgatttctaagaagtttaactttttgtataaggaaatgattataagagaatctaatattaaaataacatttggggggcttatatatatagtctgactttctggaataaattttccagattgaaatctacttcatacacagtttttaagcaatctttcagtcattttttcatcagaagaaatcaaggcagtttagaaacagtaaaactttatatttgcctaaactcaacaactaggtt

SEQ ID NO: 13936 - DNA, 1035 bp, Homo sapiens
tttgtaaagcagaaattgtaaggagcaccttctactaccatgttgttcaaaaacaagcaataacaaatatggcatgcttgctgagcactttcatactacatcatttgttgttgtgcatttgtatgatgattgtatatttgacaagtttttattttgcagtaatttacattcattcattttccaacccacttactccactttggggttgcaggtggctggagcctatcctagaagctcaggatgcgaggtgggaaccaaccctggataggatgccattctatcacagggtgtcctcctaccccgacactcagccatactgagacaatttagatgtgctaactaacataacatgcacatctttgggatgtgggagaaaacccatgcagacatggggagaacgtggaaactccacacactgtggccccagacagaaatctctatatttttcctcttcagtattaaaaatgaaacaatgttgaatgaaacatcatttgaagatctgtttataactttgttctctggccctagatctactgtctaaaaattgtttttatgtcttttctctaagctgtacattctgaggtccttccactgttgccatatagcattaatttctagaccatattttttctagaccatattaatttctagaccaatattttctggataccctactttggatctgttacattttgttagtattcctttttaaataattgtatttagaattaattgcaatatacttaatgtagtataggtacaaaacacactgcatctatgaataaagttctatagtgcagtctgattgcactagctttttttttcatcaatactatcgggtcatgttgagctgcagttcactgaaacacttaagtgtgttagaatttcaaatcctgtaaatttagattcagtaggcatttgttgaacacctgttcactactagatgtgcttgtataaatttctgctgtttattttactgatagtaagtttaaaatgtagaaattgaccagtagatttattgtactgaggatgatt

SEQ ID NO: 13937 - DNA, 1027 bp, Homo sapiens
aaaaagtcttggttatttttaataggaaaaaaatgaaagcaatgtaaatgttaagcaagaagagaatggcaaattgtgacatagtcatgtgatgaactgtaaagctactaaaatgagagctgtgtttatcatcatgggtgaatatcctacttcagcaaacaaataagttgcataaaggttatatacagagtaacgtatataaaatatgtatgatattataccatttatcaaaagcttgaaagcaatgataaagtttaaattcttgaattggtagtaatagtgtaaaaacataggaaataaatatcaaattcaagattatgcttgcatctttggaaagaatggaatggaatcagggtatagctcacaaaggacatcatctgtatgtgtaatcaattttcataaaaaacaaagggaagtaagtatggcatagttttagatttcagtacagctggattgggagtccagagataggatatggaggttcattttggtattcccttgatttttctgtgaattttgaagcaaatgattttgaaatttttaaaaacatgctgttctttttctgttaagattagtctacaataaagcgtatacttgcagtgctctgttaagaacatggatgaatttgtcatatcctttctattctgtatcttatagtaagtgcttaactattagttgatgtaacaactacaacttagaatcatgacccacagaagccaaacatgctaaccaactcagattactagcatatctttaaaaatgtcatatattccttcctttgtgtacttggaattgtgcaatatacaatacatggattatagatgatgcaattttatgtgtgtgagagagattaatcagtcttggaatatgatcttgaatttatcttaaaatatctgcaaatatatgatgtcctccagaagctcattgggctccaagttagagttttagctttgactaaaatttttgacttaaacttcaagagggcaattgtaatagaatagcaaattttaaaagccagtgataagca

SEQ ID NO: 13938 - DNA, 1046 bp, Homo sapiens
ttatgaaaatttcatagaaggtgctaattatcttctctataaaatttgatttaatgaaattttaggagatctcatttctattttaaacgtaattatacctaaagtaccagaactcctgggttttgctttttactgatggtttttgttttgagttttgtattctcattcaaattacgtgagttttgggaagagttgggggcaagctttaaattccaccaggctggttaagtataaccatacatttttagcactttggtttatgggattttttgtttgtttagggggtaatgggtaaaggattgtttgtttaataagccatttttaaaagaagtgattcctttatttaaaatacatcacttcaaatttgagaatacactagcgcctaaataaaatccacagcattcaaaatattttcacttttatgtgatgctatataagaggaagattttggttttagacttgtgggcatataggtataagttacaacatatgtgtattttttaatgtttatgtgcacttatccatatttctctgtagaaattgacagttgtaatttattttgtattacaaagtcatttattaccataggaaagcaactgcggggtgtggtgttgctataataggtcacccctttttaaagttatgtttacctattgtgggggaaaggggactggtaaggtatcagtcttcctggtagcattgattttcatttgtttgcccccacactatttttaaaaattcaaataaaagtgcagtttcagactttttaaaaaaatactgttgacctgtcttagttgtacattcagaaaatgtagcctcgggtgtttgtatgtaacactgcatattttttctaatcagattaatatgagttttaatgtttagcatgaactacagctaaggataaaaattttaaagtagctttcatagtctagattcctggtttcatcatgctttatgtagtacattttcgtttgttttgttttgtggagacttgtgtgtatttttgtttgtttgtttgtttattggtaggtagtaactatttggaa

SEQ ID NO: 13939 - DNA, 1047 bp, Homo sapiens
aggagggacgagagttgttatttgtctttcccttcggtgattttttttttcccccttagctggtggtttctatcaattcttactccacagctcttgagtgatgtgagccagtgacggcattaactttaggtaatacttctatggcctttgtaaaaatcccgcgttaaggatgtattagatcttgagttcttttccgcgctggaggcaccactagattaaccctttgccggtgtattgcgtgtggggcgcacggctctgggttgcaaatattccggagatgctttctgcagcagctattctgttcagttgttcgcaaagaggaataacgcttcctgggaaccgcggtgacacgcttctttaggactgcctgcctacagagtttttccccgtggaattgatgtaacgattgatttatttcttatattctatgaagactgggggacccgccctcgcttagaatgtttcccggaggagaatagaagagtgcaatgtgatgtttttcaaattgtgtctaacggagctccctaaactctggacttgttaccccctgattggctggaaggaagcgggcctggggggtttgaatgttgaacgctaaactataattctcgactttacgaaaaaatatacttttagccagagaaccacggaaatagctacgaaacgttaggacgagagtttagaaaaaaagttggtttttaatagttttttttcctctcagaaaggattttcgtgtggttctcaaatgtatattaaaagtaaaactgaagaggctgttttcgcaaaattatgtttctgctggttgaaattaacaagacttttatatatttgtcactgttctttattggttaaaaactgagtgaaaaatttagtttttttcctttgataggaatttttcaccttaaactacatatatttgttggatgcagattaccggacagttgtttcttttattttgatgcaaagaaactaattttcttaaggttcacgaatgatctttttaacattttccataaaaattgaacatcttatttaaaaaacttttcg

SEQ ID NO: 13940 - DNA, 1053 bp, Homo sapiens
ggacccaacgtattgggtcatgttggtgctcaaaaaattttggattttggagcattttgtatttcagattagggatgctcaacctgtactgttaatttggttacagtgttgcttgagtttactatatccttgtaagtttctacttgttttagcaatcatttaaagaggggtattgaaatctctaactatggatttgtctgtttttccttgcacttctgtcagtttttgatttacatattttgaagcttttattatttgagacaaaaccatgtaggattattgtatccttctgattaaccagcccttttattattataaaatggccttctttattcctggtaatattatttgctctgaaatctactttatttcatgttaatatagccacaccagttttcttttgactaatgccagcatcagtatgatatatctttttccatccttttacctttttttttttttttttttttttttgagacagagtctcactctgtctcaaagtgactgtactttgagtcactccaggctggagtacagtggcgtgatcaccactccctatagccttgacttcctgggttcaagctatcctcccacctcagcctcccaagtagctgggactacaggtgtgcaccaccacacttggctaattttttgtggagacaggatctcaccatattgcccaggctggtctcagactcatgggctcaagtgatcctcttgcctcaacctcccaaagtgctgggattacaggcatgagccactgtgcctggtcatccttttattcttaatgttattatgtctttgtgtgtaaaatgtgtttctttttcttttttttttttttttttttgagacggaatctcgttttgtctcccaggctggagtgcagtggcatgatctctgctcactgcaacctctgcctcctgcattcgtccaattcttctgcctcagcctcccaagtagctgggattacaggcacccatcaccatgcctggctaatttttgtatttttagtagggacgagatttcgccatgttggccaggctggtcttgaac

SEQ ID NO: 13941 - DNA, 1045 bp, Homo sapiens
caatataacaccattccacagaaatttctatagaaattccaagaaaatatttaaactgaccagtccagaagttttacgttacttcaaatatttctggagaaatgttacgaacacataggtgtctctgtaactttaaaatgtttttctttaggaaactgtttctctttagtttgtacttaaattgaacactgaaggaacaatttacagtcacatactataggagtgaagtaacaaaaaatagagcctgtctaaactcccttgaaagaccacactgacccagaaaatatggcttaaaagacaaaaaggtaccccgattgtttactgtcttttttttttgcagcatatgaggcactgttgagtggcacatacaatatatataacatttgaggcattatcttttgattgaaaatacagaagagatatgggtgtatgtgagaagtaacataaataagggtaggttaatgaagtgcaaactatacataattgctaaagggatgtggaaaatcaagtgatttaaatctagattgatattgggtagaagtctgctggaataggcaaatcttttttttttttttttggagacggagttttgctcttttgcccaggctggagtgaagtggcgtgatctcagctcactgcaacctctgcccccctgggctcaagtgattctcctgcctcagtctcccaagtagctgggattacaggcgcctgccaccacgcccggctaatttttgtacttttagtagagatggggtttcgctatgttgagactggtctcaaactcctgacctcaggtgatccacctgtctcagtctcccaaagtgctgggattacaggcgtgagtcactgcgcccagccagcaaatcttatgtagaatttttaaggagtggtgaatttggattgccagagagaaaagataaccattcattcattcatcaaagatttattgagtgcttactgtgtgccaggcactgttctaaagacacagcagcaaacaaaactgttatagaacaggataaggcaggtcatctcccagatacgacac

SEQ ID NO: 13942 - DNA, 1060 bp, Homo sapiens
gccaggcttggtggcgtgtgcctgtaatcccagctacttgaaaggctgaggcagaagagtcccttgaaccccagagtcagaggttgcagtgagccgagatcgcggcactgcactccagtctggatgacagaatgagactccgtctcaaaaaaaaaaataaaaatacaaaataatagtttgcaaaaatgcaccacacaaaccagctttttaatgtcatattatattgttaaattcttggtgggagagttgctgacagactcaaggaacttggtaaattaattgaggtatcccttctctaattatcttcatcatcaactaatatactgaaagcctgctatgtcagaatacttagtacattgtattaaaccattataattttataagttgtaggatatgtatgcgtttttttggaaatttcattatttggatttaagtaatatcaacttttctcttggtcaacaatgtacacacacatacacatacacacatatgtttatactcgtgatgatactgaaaacatatcattaggatacaaacacgtatctgattatagaagtagtacatggtaagtgaagaaagtgtgaaaataggttaaaataaagaaaaaaaaatttaaaggacaccaggaaaaaataaccaatagttcctttatttagaggcaactgttgagagttgacatatttccaggcagttgtttaagctgatgaagtttaaattgcttgtgtacactgcctttttatatgacaacgtatcataaatgtttcctcaaatgtatcataaattgaaaactcctcaaaagtttcagtgtctgcataatgttccttgtaagtggttatttattttctttacttacaaataatattgccatgagcttttttatgcataaatctattttcctaaactagaataaattcctagaaatgagctaaaaggtcagcatttttaagcttcattatctggtaaaaattttgctgtaaaaaattaaatttctcttttaattctgtatatattttaatatcaaaaataaatctaaggagaaaaatttatgtggactaccttt

SEQ ID NO: 13943 - DNA, 1049 bp, Homo sapiens
cccagtcccagcatcacaaagcagtgtttatggaaaggtttattgctgaaagataacagcttaataactgggataaagaggaattaaggacgatttctacatgtttgcccatagtaactagaaattatgccatatattgacatgagggaagacttagggagaagtaaaatgtggaggagaagaaaatcaagagatttattttaaatgtgctaactttgaggttctctttagacatttgagcggagttgctggacaagcagttgtatgtgagtccagagctccacagagggatcagggatagaatataaatgttaggagtcctatgatggtagacagtatttaacaccaagagattgaagacatgaccttggagggaaatgttgatggtgggtatgaggaatatgtctgggactcgcagacatttgagaagaggaaaatgatctgtcaataaggtagttggtaatctcaacaagagcactttaagtggtgctgtggagacaataatccaaactggaatggattcaagagataatgtaaggaagtgaagattgcaattatagagtctttgaagaactttgatataaagggccttctgttccctttgtaagcagatgtggatatggactgtagggtgatgagggagaaactgaggatgcaggatatggaggggataatcacaggaacaaaatgtttgaatatgcaagagaagatgggacctaggacacagtagaggggcttgccttagataatagcaaggatagttgatctttgtaacaggaagaaagtatatttgagtacagataaaagcacattggtagatttgatatgggaagataagtttctcttgtaacaacttctatttatcaatgaaacaagatttgaagtgaggagcatagagatgtgggagatttaggagagaagacatgggacataatcatgttgaagaagaaaagaatgaattcattaggggaatgttctgggactgccagtcttccttcttggtgagaatttgacttttccagctatgtcttatttcatttcttgctgtt

SEQ ID NO: 13944 - DNA, 1766 bp, Homo sapiens
tcctgcctcagtctcccaagtagctgggactacaggcgcccgtcaccaagcccagctaattttttttttttttgtatttttagtagagacggggtttcgctgtgttagccaggatggtctcaatctcctgacctcgtgatctgcccacctcggcctcccaaagtgctgggattacaggcatgacccaccgcgcccagccgagaacatcacagtacttttaaattggaaagtattaaatttaaaattattctaatttggtggaagagaaatggaaggaactgctgaatttttgaaaatgtttcgtcatcacaagagagcttagttcctaaaatacccaagattttaaaaattaaggctttagagactttttaatccgtatgtttcaaattcagaaatgccagcagactctgctatgaaaaatatatatttattggttatgttattatttttacaaagtcaagttttaaggtttatttgttttgtaactttcatttctttagttatctcatcttgatctgtacttaaaaatccagagcttacaacatgccttgcttctctatatcttccttattaattttgattcatcacttagtcatctgctctttactaagaagttttttttcccctacatggactcatagatgctatatttgcctttttcgttaattcgtgaacggtacttatttagatataatagttttgggtcatgctggctttgccttaaaactgtgcagacatttttcctttgttttctggcttcgaatattgcttagaggaagtctaaggccagcttgatttcctccctcttgtaagtgatttagttttctgccaagagatttgaaaagttttttcttcattctttatgagcatatgcctcaatgttgaatatacgtccattttacattgaacattttattctgcagacttgtttattttgtggaaattctcctctattacatctttaagtgccttttctgattcatttgttgcattatatatgcagggagatggatcagcttatattatgtcagctttgtcttacttccacattatcttctttgcaatttctttggtctacttttctactacattcattacaatttattaatttctagaatttcttaaattcatttattaactagaatttgagtacctactatatatgccaggcaccagtgataaatatgatcacatccctgcctttatgaagcttacatttcagttgaggatggaagaggaagaaataaacttgtagtgataagaaaaagaaatggaggtaaggaattggggcgggttgggggtgggtacagagaggattgtgcattttagatagagtagttagggcaggcatctctaagaggacatttgagaataggcctgagtgaagtaaggcagtgagctaggcaaagacctgggcagtccaggtatgagaagagcacatacaaaggccctgaggtggaaaagcagtgtgttcaagagagagtgattggagccaaacgagtaacgggaagcaggtgggagatgagactagagaaatgggtaggccagatcaccaaaggagctgtacaccctaggaaagaatttgatgtttgttctaagtgtgatgaggagcaggcagatggtttatgccatagaagaaccactctggctgctgttaagtatttcaagagcaatcactgagtataagagattggttaaatgggtgttgcaggactgaaaaaagcgaaaagagagcactgagataacagagtaacttggggaagcag

SEQ ID NO: 13945 - DNA, 1067 bp, Homo sapiens
attcttcaacagtgtataaatgctacacaaacagttttggcttcactttatgattttgattcttttttcccacctccaccccagtttgtaaatccaggaggtagatgttaagagagagcaattgccaggttagctgcagggaggcaagaggccaggtcgggcagggctttgtatataccctgcatgctgaagaatttggactttagcctgagacctacaagttttgggggaaacacataccttttgaggaaaataaaaagcaatgggctctttctctaggaaaaaaaaatgcgcttacatacctatactaaaattttgcatacaattttaggggggttacttgctttatgagtaaattcctattctgcctcaggactaaaacataggaaagggagagccatgaaaggagttttggaaatgtcatattgaggtgtacactggttgaagtcctggagacttgaagatggaatgtaaaacagcctgtgacctaagtaacaatcaattaggaccaccgctgtgtacctagggatagtggggatagagaaaagaggaattcaaggaagtaattaaattggtggaattctgttggtggaatgggaaaactggttggctgtaaagggcaagagcaagagatacccagatttctggtttagggtgtggactaaaaggagaagtaggcctcaagtctaggggaaggaactctgttttgtccctgtagaatctgaagtatcagagaactactgggggagcagggggtgttgaagtagtttggctctctggagtcattaaaatgtaggtgatagctaaagcagtgggaggggcttagatggaccacaaagggtgccctgtaagaagtggtctgaggagggaaccctgggaacacccatattcaggggaagaaggggagcagaaggaatctttgaagaaccgtgatgagtgactaaagacagagcagtgtccgtagcatataactgatgaataaaatcctgcttccttgataatagaaacatgttgctgctttgttccctttatatgactgaaaaagctgtgttctctttcagtgaaaa

SEQ ID NO: 13946 - DNA, 1047 bp, Homo sapiens
atgaatgtggtgtattctaacaatagaatgctattcagtgataaaaataactactgatatgtaagacaatatagatgaatctcaaaaacattatgttgagtaaatgaaaccagatataaaacagtatatactataagattgtacatatgtgatgttctggaacaggcaaatcattctttggtaaaagaaataaaaaaggccaggcgcagtggctcatgcctattatcccagcactttgggaggctgaggcaggtggatcgcctgagttccggagttcgagaccagcttggccagctggccaacatggtgaaaccctgtctctaataaaaatacaaaaattagtcgggtgtggtggcgggggggcacctgtaatctcagctactctggaggctgaggcaggagaatcgcttgaacccaggaggcggaggttgcagtgagctgagatcacactgcactccagcctgggcaacaagagtgaaactccatctcaaaaaaaaaaaaaaaaaaaaaaagaagaaatgagaatgtagttatctctgctgaagaagatggggagagagcttaactagaaggggcacaagataattttgcaaggtaatggaactagtttacattttattttgggtggtggttacagggatataagcacttgtcaaaactcatggagccaaacactttaatatctttttttattttatgtaaattatatctcaacttacaaataaaatcaagagtattagatggtctcttttcagtgatgctgtctctgtacagctcagagtggggatccatactggaccagtcttagcagatgttgtaggagacaagatgccacggtactgcttgtttggtgacactgtgaacacagcttctaggatggaaagtcatgggcttcccaacaaagtgcacctcagtcccacagcctacaggtagccttccatttattcatgccttcctttgtcccttcctctttctagaacttacagagtgcctagcagccatgggttggggtagtgcaggaaactcatgtttttccttccatgtctc

SEQ ID NO: 13947 - DNA, 1043 bp, Homo sapiens
tcaattaacaggtgaaataaccagttagcatcataaagacaggatcaaattcacacataacaatattaaccttaaatgtaaatggactaaatgccccaattaaaagacacagactggcaaattggataaagagtcaagactcatcagtgtgctgtattcagagacccatctcacattcaaagacacacataggctcaaaataaagggatggaggaagatctaccaagcaaatggaaagcaaaaaaaaaaaagcaggggttgcaattctagtctctgataaaacagacttcaaaccaacaaagatcaaaagagacaaagaaggccattacataatggtaaagggatcaattcaacaagagctaactatcctaaatatatatgaacccaatacaggagcacccagattcataaagcaagttcttagagacctacaaagagacttagactctcatacaataataatgggagactttaacaccccactgtcaacattagatcaacaagacagaaaattaacaaggatatccgggacttgaactcagctctggaccaagcggacctaatagacatctgcagaactctccaccccaaatcaacagaatagacattcttctcagcaccacattgcacttattctaaaattcaccacataattggaagtaaaaactcctcagcaaatgtaaaagaatagaaatcacaacaaactgtctctcagaccatagtgcaatcaaattagaactcaggattaagaaactcactcaaaactgcacaactacatggaaactgaacaacctgctcctgagtaattactgggtaaataacaaaatgaaagcagaaataaagatgttctttgaaaccagtgagaacaaagacacaacgtaccagaatatctgggacacatttaaagcagtttgtagagaggaatttatagcactagatgcccacaagagaaagcaggaaagatctaaaattgacaccctaacatcacaattaaaagaactagagaagcaagagcaaacaaattcaaaagctagcacagaaaa

SEQ ID NO: 13948 - DNA, 1055 bp, Homo sapiens
ccattttttcagtggttcattttcagaaatgattctagttaaaactacaatccctccttcagccagtatttcctaaacttcagtgatcatagggtatgtgttaaaatgcagattctgtagcccgggaatcattttcaccaagcttcagagatcatttcccttgaatgcctttttggactgcactttaagagccacttttaaatgacaaagtcacaggtttttattacaggctttattgaggcacaattcagagtaatatgaatgtgtctagtgttgcatgactgtattctgtatacttaggtgtatcagttatgcaattaatttgcctcatgggctagaatctacaaagcaaatgagaggttagtataaatgttctatgtgctaacagtttcacagattataagtttagcaaataggactaagtgataatttagaggaattggctgatttttgtaagctaatcattaaccatttttaaacagctccaaagatgaaaggatacttgatgacacagtaaaaaatgaaagatttagaaccagaagaaacttaggaaatcattcagtccaatcctttcattttagagtgagctgtgaactcacctgagatcacacatttgaaaagcagagttgagaatattctgattgaaagcccactcccatcccacccctctcctccattcaaacactgccgcctttcagaaagtgtatgctagtcagctccaacatgccactgggaggtatctgtggcatgaatgttaaaatgatcagtttgatgaacacatattgtgtgagggagctttgtttcatcttagactaacgcttaaattggtttgtgtttgtcacgcacacacaggagatagcccatgaatgccatgagagaataaaaccagaccaaaataaagaatatgcggcattccatccatcttgtaagatgtgcacaggatgttgggagttggctatattcactgtaaggaacagttattttccagcatcagtgaaggggacaggaagggccagaggaagtaaaaatcaatagaaacattcactagtgtcact

SEQ ID NO: 13949 - DNA, 1031 bp, Homo sapiens
ttatcagacatttttttaaatttcaagggtatagcaaaatgaaattataactttatgaagaaaagcattgatgaaagtggagaacatgcatttagtctaggggatttgaaactctcccaatactgaagacaaaccctgtcaagaaaaagaagaatttaatattatatagtattttcatatgcagttctttaagctttgtttacttctatacaaatacttttaagtaatgcaagataacatttaatagatggaattgttaaggtaattgcctgtagtcacattgctaaattcattgagagttacacaaaatccagaatatattgtctgttcctaaattatatatatttagattctggaattactaggaggaattagaagtcattcagataaaaattcatacttaacaagagtatctaggaaagagattcagcccatcccaatattgagcagctttccttatcagaaagttttattttctgtttcacagattgctcatgacctttaatacatttttctgaatgaaccctggagggaggtgagaagtagcagttttgttcatctcttctttttgtcctttatctctctgccactgttctcacctcatcctaaaacctggtcaggagggtttgaaacctatcagaactaaaggttaatatctcatctccctcaggcttttttcatttaaaaaaaaaatgggtatattagttaaattagaatacttgttgtagaattattgtcaaaggggaagggaaatacatctaggggaaacatcatgtcttttaggccctttatgtcactgaatgacttaaggctcgacaaatgatattcttggaaagtttaatcttgaggttttcaaatctttttttttaatgtctcccatgtttctcatttgctgattgattcattagttgctcttagtaagatttgtcagttggaaataatgaaggctgagactcatttctaaactcttccataaccatcaccagaagagcagccactgtgttgtgtgatgtaggctaatgcctcccaga

SEQ ID NO: 13950 - DNA, 1035 bp, Homo sapiens
tgggagttacaattcaagatgaaatttggatggggacacagccaaaccatatcaatcaccattattattattgttattatataaaagagaaagaagtaaatgtgacaaaatgtaaactgtctatgaatctagatgaatgggaccctggagctcatagtacaatcactgcaacttttctgtgagattgaaatttttcaaatagagagatttttaaagaattttttttttaagtgaacggttctgtgccatttagtacatcctttcctttaaaaaaaaaaactctcatacttgtcagggtattaagttgctataacagaatgcagtagttctttaattgtgagtttcttatatattctaggataggcagatctgtttagtatacctttttccactgcatcatttcagtttggatattcttgactttcgaattgttcttggaaataattagaaagaagtagggattgggattgttggacggtgaaatcatagggagagaaaggaagttgaggaattcaatcttgagtcttagaactgtgtgtgtgtgtgtgtgtgtgtgtgtgtgtgtgtgtatagaagaactacatacatacatatatagaaggaagaaacggaaatgaatctataaaggcctgatagtacttacatattttcttgttattgtctgttatgttatgaataggacctgcggctgtattatatttgagaaataggatttaagaaatacccactcagtttcaccaaaaatgttaaaattttatttgctttaaaaaaagcttttattaagcttcttttccatctacattatccaagcaaatctgaataattgggactagagttggactagatgttggagggaccaactttctatttattaaatcacggaaagatttagcattagtttgattagaatgggtgctttcctgcccttaacacacatacagtgcctctttgaatgcatattttctgcaacaaagaaaaacaaattaacaaacaactagttgaaccttcaaggattctgaaaagcttctggcaagg

SEQ ID NO: 13951 - DNA, 1815 bp, Homo sapiens
gtgggctatagtttgctgatcgctggtgtataccctgttttgtagactactgttctagaccttggagttgtattgtactacttctgttagatccttttcacattagttttagagagtggactttatggaattgatttttcctttatgaagtgggtagaacaccactagtagagagtattcagttaaagtgaacagatgcttattgaacagtagtgaagttcagatgcagggttaggtactggctcatgagtttgatatgagaggtacagttatggcatagtgtaagatgtaaaattattaaagcacaagctaataagatggtacagttgagaaagtgaggccggagctggctctaggaaatgtcttgagttggattttgaaaggttaattcaagtttgtgaagtagatgtatgcaaagacataaaggtcactgaagagagtttgggagaactgtatgtacctcagtattgatagctggcaaagtgttcaagaaaaacagcagcaggaaatgagactagatagattggcatggcacgtcctatattctctgccaaggagtttcgactttgtcttacagattgatgaaaaccttatagattgaaccttacagatgggaaccttatggattgaagagattttagtagaggagaaagttattagatttgcattttagaaagaagtagcgtggactatacaaagagcaggtttttttggcacctcatctgttttcacttcctcataaaagaggacatgattgtaggttgaactataccagacataaaattaagaaacttggagtgctatttagcaataaaaaggaatgaattgtgacatgctacaacatggatgaacttgaaaaacattaccctagatgcaaaggacctcatatagcattattccatttatatggaatgtccataaagttgattagtgcttgcctggaagtgtttgggagactgactgcaaatgggcacagggatctttttaagatgttggaaatgttctaaaactgcatggtggtgatggttgtacaactctgtaaatttactaaaactcgttgaacacataaaatggatgaatttctcaataaagttgttaaaaaattagaaagactttacctttgcaatttgttggggtaaaactttgttgaagaaagtatttcagtattgcaggttgtcaagtgattgctctttcctctgaacaaatattgaccttaaactactagaagctaaaaaaaagttttgattttttaatcaaaaattccttttggatgtacattggatattcctaaggatacacatttttaactgtggagtgtaacaataggaactaacaataaataattgggttggcattaagttttatgggattcactttgactttaataattttttttgagacaggatcttgctttgttgcctagaatttcttaattttcctttccttaataaatatgatatgaggagaaccttcttcattgcttatattggataatagtattaaagttagaaatagcctaagggaaatttacttgatttttttttttcaaggaaatatactaaagaaaaagctgatataggatgcttttaaatttataaattgtttcctcataatcttaacagttataggaaatgaataaagagaatgcaaaacaattggaaaatggttaatttcattcaataaatatgtatttagggcttaccatgtgcctaggcactgttcttagaaacagattgtgaaggactgttactgtattactttcttttattcctggctactaaaataatgtatgaggttgagcttaattattttaaa

SEQ ID NO: 13952 - DNA, 1048 bp, Homo sapiens
cgtatgtgacatctgcttcttcatgaagtgcatttctaaggtaaaactattggtttatttgtatgtatagttaggaaggcttataaaacttttttttttttaatgataggcacaagtattatgtagttagattttttttgtttctggaaaatgttatctactttgaaaattttaaatctataaacacttgggaaggtgtttagcacaagcatcaataaatgtttcaatcagaatctagcaagaaaggattcttagaaacttttactcctgtacatgtactgtgtaatggatttagagaaatttgtttcctcctaaaaaatcttagcaatgttgggttagtaccatttctttccttgaaaacaaaaaaatccacattttttacgaaccagggccccttaaaactaatctcacattatgtcttttttttaattattattgtttttgagacacagtcttgctctatcgcccaggctagagggcagtggcatgatcttggcttactgtaatctctgcctcccaggttcaaacaattcttgtgcctcagccttcccagtagctgggattacaggcaagtgccaccacacctgactaatttttgtatttttagtagagacagtgtttcaacatgttggccaggctggtctggaactcctgacctcaagtgatccttctgcctcagcctcccaaagtgttggattacaggtgtgagccatcacgcccggcctcacattatgccttacccaattattttcagattggccttcagccatagcatatgggaaacaatatactgttagagttttccaagtgcttttcatgaattttttttccctttttaaaatttaatgctttattgctaactttcctgatctgaaacatttattaggcagttcttcattttcagttgtagcctttaagatatttatatagaaggctgtcatagaatgccatcttcttttgtaggacagttgtgtgtgtgaattgattttttttttttgagaccatatttgtagtgtgatgtgtagaaggaagtaaccagaatggtttt

SEQ ID NO: 13953 - DNA, 1577 bp, Homo sapiens
actatgagctaggcatgatgcattaatagcatagagatgaaagtactcactttctttgcttgcatttgagtgggggagtcagaaaagcaaacaagcacaagaaaatgtcacagggacggtggcaggtgaggagagcgacatgctcacgcaggtgcgcagcaggagacctgcaaaggcaggtcaccatggcaccgtttgctcgggacacagccgagacgtctgcttagggaagtggacagacaacttgcgatgtgtgtcataagagaaagtatttactctgcagcattcagaatgaaccaacaggatctgtgtgtatcaatatggggaaaacacagtgttgagtgaaaaaaattacagatacttaaagagtcatgaagattaaaaaaaataattttatgtattgttctagacaccagtctctgtggtcaaagtacaaacatggtctggggctatataccaagttcagatcggtggtttcctatggggagcaagagaagagaatggggtctgggagaggtgtgtcggggccttcagctatatttgtaacttgttatttctaaaactatgaagcaaatgtaccaaaatgtcagcactggttaaatctgggtagtgggtcagggattttgtcttcttattctctgtatttatatacatatttaaaatatgtgtaaatttttaaaaatacacgtgggtctggtgtttgtagagagggcaggactaaagctatagcattggctcaccttcacagcaggctcaggtgaatcagtgggctggggagtttcacctgggcctcggcactggccactggcacttcacacagaggcgagcaagggccttgggaagcacttatttttcacaaagcaggtagagaaagagaaggaaaagatgggaataggaggtttcagaaaggagcagagccaggagagatgtgtcataaggaggtccaggaaagaaaaataatttctaattatggggccggtcatggtggctcatgcctgtaatcctggcactttgggaggccaaggtgagtggatcacttgaactcaagagttcgagaccagcctgggcaacatggcaaaaccctgtctctacaaaaaaaaaaaaaaaaaaaaaaaaagaatttcaaaaattagccaggcatggtgacgtgtccctgtggtcccagctacttgggaggctgaggtgggaggatacttgagctggggaggttcaggcttcagtgagctgtgattgcaccactgtgctccagcctggatgacagagcaagacgttgttccaaagactaactaaataaataaaaatagttttaaaaattacatggaaaatgtcaattgctttgtatgtagaaatacagagactaagagtgaatccccatatacccaccctgaacatcttgaattaaataattgtcaaggttttgccatatcatttttgcttcttctattcctccttttctttctttttctcttttttatttgctgaagtaatttaaagtaaatcccggatgccatgtctttccaccccttcatactgccttgtgcaattctaaaatatccagacactgagaaagattttta

SEQ ID NO: 13954 - DNA, 1087 bp, Homo sapiens
gtgggggactactaagggcctggtttcactgtcagtttcagttgattgcaagtgatcagaactggccctggaatagcaacctccttgctgcaaggtgtggtgaactctgtgtctccaatgtgcatattgtttaggttaatttacgtttgttgctggaagcaacaactggatcacccttgagcccatgccactcttgagtgttctatcttaaaaggtggagatatggtccttgtctttcaggaagttataatttaaaagagaaaggcatgaaacgtctgctttggtggtgatattaaggaactagctgtgtgtctggtgggaagtgtgccctctatgtgtatattttggaatataaaactaaatccctgtcctaatattggaatgtttaggggctatttgggggcaagcattggtaggctggatttttttttttttttttttttgagacagggtctcaccctgtcacccaggctggagttcagtgatgtgatcatagttcactgtagtcttgaactcctgggctcaagcgatcctcccacctcagcctcctgagtagctaggaccacaagcgcctgccaccatgcctggctagatagggtcttgctatgtgcccaggttggtctcaaactcctggccttcaacagtcctccaagctcagtctcccaaagctctgagatgacaggtgtgagccactgcacccagcctgaatttgtgtttttctatattttgtttgattataagtgtaatgtacacttattattaacaattcaaaccgtactgaagtataagaagaaaagaggaagatgccctttcactgatcacattctgcctcccgcccaatctcattccccagtgttgctatggtgatattaatagttgggcattaatctctccaaatctttatatagagaaaatgcacacttgcgtgtatgtgtatgtatatgttcacgtaatacagatacagacttttttaactgaaatgggatcatacaagatagactgatgtgcagctggctttttcacttaactatgtattagacatcttttatgccagtgggttatagatagagcccattctctttaggga

SEQ ID NO: 13955 - DNA, 1055 bp, Homo sapiens
attcctattagttcttagctttgcatagaaataaattctgttctttgggcacaggctgaaggttagcttttttacagatgtacttgagggcacatagagctcaggagagggtgaatggttgagaaacaatcttcaccactaccagatgaaagtagctcaaactgaagacacctggtattaatgagaggttatcttccttgaatataagtggtttataatgatagctacacagttagaacaacttggggaacctttaaaatgctgatgcctaggcccacagcacagtgattgaattaaaatctctgaaaatgtcctgggcattaatgtttttaaaacaggtgattacaatgtacagcccaagttgagaaccaccatagtctacaaataaaattatttttaaaattccaacatcttacaattctttacttcctgatgtatctttttcataatttacatgtatacgttcttcttttttccagcaagaatgagtattaaggactatagtgccctgaatatttggcatgagatctgtcatcccttgtctgctcgaagacaaaagttgttctcaaacctttaggaaacacagatagttggtgtaatggttaaaaagccagaggcaaagcagattcagtagtatttgtcattatcacaatctgtcctttgttatgtgttgatttttctttttcatatattcacttacattttatattcataggacaatacactttttaaaaaataaacttcttttaaattttaaaacagttttagatttacagaaaaattacaaagataatacaaaaagcttctatataccccacactgtaattaacatctatcatagccttgaggtgtagaatcatttcttaagcaagattcgacaagcagaaattattaaggaaaaatgatgaataaatttgactatactaaattttaaattttgcatagcaaaagataccataaataaaaacataatatgcagatcagcagaaaacattttcaaacgtaactagcaatgaattaataaaatatcttatttaaaatttttattttaagtt

SEQ ID NO: 13956 - DNA, 1022 bp, Homo sapiens
atttgtggacgccaggcagggagcatttgggtatacacagcacaatgctaaattaaagtttagcagaaatttagtaaattgatcagtgtgaaatgccaagcagataaataatgtgaaaatgtatccaaattggctattaactttgataaaattaagcaaataacaataaactctccacgtcaggatgtgctgtaaagagaagagactttggtgttgtgcaaagataattttagtgggtgttgggcatacctgcatattcttgacctgtgagttataatggaatgaaaaaggcttgtataattataagtcattgccccagggaaaattagtgtcctctctagtttcctttcaatatcacttagaaagtttgagttttagaatggttttgtcatttaatgattactattttatcaatcacattgaacggagccatcattttttgaggttctaatttcaggtgtttttggggaaaaaaatcacaatctggacgtgagaaaggacatgaggagactaaagacctgggattttgtcaatcagaatgaaaccaatgttgaaagacttttcaaatctattgttggtggtactctgtgactatggtgagtattgtgagtatacttaacgctactggtagcaataagacataaagatgacattataaatgcattgatgttgatgactcttcctgaaggaggcagggtagggtatatagtgcagtgctttctcaactgtgacccttgcaaccctgggttctcttatgcttcagtgattctgcatgattgattcgtatttcattttatatttttaactcttaaaaaaataaaaaaaccaactctctcaaattttaacaaattggaggcaagcatgttaccttgagttctctttgatttcccagtaattaagtgtgataaatcacttcatacacacatgcaatgatgttgtgtatattagggttctacataagatttcacttgaccgagttttggtgctaacatacatttggacccaatctgaatttcaatcct

SEQ ID NO: 13957 - DNA, 1003 bp, Homo sapiens
ggggtttcaccatgttggtcaggctgctctcgaactcctgacctcgtgaaccgcctgcctcggcctcccaaagtgctaggattacaggcatgagccaccgcgcccagaccgctctggtttcttttagtgggaaatgatatttcagaaccacaatctgcctgctagtaatattcatcagtattgggttgatctttgtttctaggctttttcaatggacagagctagaattttgttgttgttaatataaagtgcctaacaagagcgtacttatcttttctattcaaatttaagatgacactaccagataattactaaagcagttgaaaaaaaattttatgtgttttccccattctttgtacatttgaaaaataggtgcactgtgtttacgctgtctgagcatacagccactacatacactctctgcctcagctccagctctcattgactcttagttttataagtacctccatgtttagtaccactagtccttatgctgagctctctgtggtcgctttggttgtctgaagcctcattctgtagtagatttttaaggaaatgatcataggaacaatattccctgtatctgccatgtttgtcttccttatacatgaaggtcagttttcttggatttaaaatcctcagctcacattttctttctttgagtgccttcattatattactttctttcttttttttttggtctggcatgaagtgttgctatcaaagagtgatgataattttattttttccccttaaaagacacttgctgtttttcctagatgggcaaaggatttttaaattttactttaaagcccagtaattttactagaatgtgtctgtgtattagtcattctgagttgttattcttaggtgcgtgctgtgctttttcagtatatagtttcaggaattttttaatttcagggaaatttttctgcattataacttactttttttttttttgagatggagtcttgctctgttgcccacgctggagtgcagtggc

SEQ ID NO: 13958 - DNA, 1036 bp, Homo sapiens
aaaatatagattactgttggggaaccaagggcatttgacctattaagtgcccatagtaggtttttctggatatgtatctgtggtgaagttgtatattttcctcaaccctgtattttccccaaattggcagctggatccagaatctctgtcacactcatgttctgtccgtttggcaaaactagaggtgatgctgtgttctttcgtcagaggcacatcttatctctgtcatgttagcagctgttaatattcagtgcctagatctattagttcattggtggtggtaaatagtgataattctgtgtttatttttcatttattagttggaatactttttaaagaaatgtttcccttatctactatttggttgtccagttcatataggaaaggcaggataattgcattttcctttatcatcagggtaataaattgtttccttattatcttttgacgatgactaattaggtttgtttgtttttttgttttgttttgttttgttttttgagacagagtcttgctctgtcgcccaggctggagtgcagtggctcgatcctggctcactgcaagctctgcctcccaggttcacgccattctcctgcctcagcctcccgagtagctgggcctataggcgcccgccaccaaacctggctaattttttgtatttttagtagagacggggtttcaccatgttagacaggatggtcttaatcttctgacctcgtgatccgccgccgcggcctctcaaagtgatgggattacaggcatgtgccaccgcgcccagccaactaattaggttttttttaacatgtcattatgaattcatggagtttagcatatttgatggatttcaatcagttataattattatcctatttgaagctcaaattgtcccatctttggccagtgggagctgcttcaagttggccctctaagtgcttttgttgtgactaggtgaactttgctagcttcttcactatctggtgttgcaaaagctccaggaccatcttgtacatttcctgcctcagatccggaatcaacc

SEQ ID NO: 13959 - DNA, 1028 bp, Homo sapiens
gggaaataaattagtaagtcagattggatgagataactcttctcaaaaccctccagtgaagtaagagaccaagggccaaaccatctgtccccatcatctctctgacctcatttctgctactccagccctggctcactccccttcagctgtcccagccatcttgctattcccagaacacatcagtctttgtacttgctgcttctgtctggaacatcttcaaaatatatgtatactcactccatctattcctacagatctctgctccattatccctttgtgagagaggcctactccaaccattctttgtaaagtagcaaccacaaccctcagcatgttgacactgcctttttctccaatgtactgaccaccctataacatatgtgtttacctgtgtgtctcttgtgagctgcctcctgccttactcctagaatataagctccatgagagccagggaccttttcaactttgttgtctactattcctagaacagagcttgacccatattagaagttcagtatctgttgaattaataattgggtattaaagattatcctttgcaatcactaatattttactcttagcatgttttaataccaaaaaggagagaggacataattttaaatttgtataaatttaacttcccgaatcattatttttctcattttgcttcagtgaacacatgtaagctgcagttggggaccactgcaccatgccatcctaattcttttaggtctgttaatccttgccatccagtatttgtgttactcataggaaatagattacttcaagctgatttaaggaaataagaatattgcttacttcctattttttaaggaagcaggaatatggcttattgtgctattccttttggtaatactttttcatgcactaatttagcaacttttttgcacatttgttctaatatttatgcaagagagattttaaaaagatagatgaaagggatttttgcttagttaagtattgttaaataggatttttatattcaggttgcttcagcaactgttgtg

SEQ ID NO: 13960 - DNA, 1258 bp, Homo sapiens
ttctgccaggttgcctcatgccaagttcacactgcctgtggatcagataccatcctttgtccattgagccatgttacccaaaggatgacaacttttatttattcgtgcaacaatttttttttagtgttaactctgtgccaaatgatatgctaagccatggaaacatgtgccttggagttattcaaactttgatctgaattctggctttcccattcacctaatataggaacataggccaaaaattattaagttctctgggccttgatttcctcatcgatataatggatatagcatatcttgaattgttctgaggactaaatgaagtaattcaagtaaaagacttagtttacttctagctcatcattagtggtgttggtaagagagggggtagtggtggtgatggtggtggtggcaacgatggtactgatagtggtagtaagagaggtggtggtggtgtggtaatggtgatggtagcaagagcaatagcatcattgtggtaataacaaaagaagtcattgagtcagtgagaatggtgtggtagaaatggagataaatagttcttgatcatgacagttgtggggatggtggtagtagattatagggaaaaaaaaacctgctgttagctgcaggatgctcagaagggctgtggataagaaagccactccaagcttcaaggactgtccagtacaaaggagtttttaaatgtggttgggctccattgttaggaaacaaatcactatgctcacttaaacttggaccttggggagtgtattttatgagttcagtacttaattactttcacggttcaagaacactggcaaagtgacttaaaagtacacaacaattatctaactatttcataaagtcaatttaagggtggaaagtctatattaaaatgacaagaacagtgctcacttgcatgtactttaaagagcaaggtaaagcctcgcttcttggccagggtgcattatagtcattcagttacatcctctgagtgtttttgtctttttgacagaagaaactcatctcaaagtattgttttgttctgtataataaattgtgttgcttaaaaactttcaagctgaactcagagctctgtgaattttttttaacttgtttatttgaatagcttttgtgaataaacctgttctgaaaaaggaggtagtaaaacagtttaagaaattaatacaaaggcagtaatagccaacatttgttgaaaaggcctgatactctgctaggatatttacgtatattatct

SEQ ID NO: 13961 - DNA, 1049 bp, Homo sapiens
actgaaaacaaaacctaatcatttatggagcttttaaaagttctttaaatacaatatttgtattgtataatcatttgtaaccgaataggagacatgtggctagaaagtaagacttatcccaaatggtctgagtgagtggtcagactgtacacactggccttggttggaccaggaagagtgggctgttgggtggcaaattaatgcaagacttgaaagtagaggaagcaacagagaccagaagttcctgccaccatggatcactggatggcactgaaggtgactagttggctgatggccaccccatctgcacactgtcaagtaggcccctgagaagatacttcaaaatacttaaagtacggaaaaagtacttaaagcttaatcggtatgtatagatactattcttatttaaaaatttaactgctgttttataaattcttaacattttaatgattttttaattccttcccaaactcggagtagttctaaggtttcgttaacttactgggtttaataatttttttctaatgtcaaccctcctggactgctgcattgcagatcttttgaatatattttgtcactgtttttaagacagtatgtacacgcttgacactatactgttctttgtttctgttgcattttatgatagttaacacagtacatgaaatttttaaaaaattaagtgagatttttttattcttactacttttttttttaataggtccatctgtcattgtagttacagaatcatcacaaaagagtgctgacgtaataatgtatgctaccagagtcaggtattcccttgttgatagataatctcatttaaagcagaatttaatgagtgatatattttaaacacagtaattgtgtcagacccacccattatatgtattaagggagcaaataaagggagtctaacatcaaagaacagatttcaaatccagcctcagctgcttataatgtgatctttttttgagttatttaagccgtcttacattcagtttcatatttgtaaaatggaggtgataataatgtctacttcaaaagggttt

SEQ ID NO: 13962 - DNA, 1050 bp, Homo sapiens
atgtttatatataagtcaacttgttccaattaaccatgattatattcattttataactttatttttaataggtaatacattattatacctaaaaatggaaaatttacaaaaattttactcctacctatgtcccttatacacacaatttctttctacagtgtcaattaatgttaccactatctcttctatcttttcttttttatgtaacttaaatctctttatatctttataccttaaatctcttttcccatttttattgggttattagttctttttcctaattatttccaggaattctttatgtattaattcataaagatgtcagtcaacattaagtcatttataataaaaattatctatagaagttttcttaggaacagataagctaattcttaaaatggaaaagcaaataagcaaaaactagataaagtaacaattaaaaataaaaagagtaaccagtgggggtgtctagccttaccagatactacaacatgaagcaacaaacaagaaactaggagaatatatttcaactcatgtaggactttctcctttatttttatttatttgttttttttgatgccctgtttttttttttgatgccctgtcagactggtctagtaaggactttctttaagtttccatgtactactctaggcatttttaaatttatctttaaaagttgacaacaaggtatcccaggcccattttgactttttgttgttgttgttaaaccctgctgcaggacttagaatcaattactgtccacactcaccttctttaatggaagagagtgtctgagaccaaaatacgggtattagggctgcatgtcaaattgtgtatggtggtagaccctctgtatgaagccgcagccaggcctttttaataacagactagacaagaaattcccttttcaagttcacaagttcatgatggtttatttattttctctacatcacgtcttcctaaccatagaaataagagccaatgcttatatagctcctactctagataggcagtgttttgcccttatatgtaccaacttacttcatc

SEQ ID NO: 13963 - DNA, 1144 bp, Homo sapiens
aaattcttggtgaatctacagttttagagacaaataaattgtttaacctaaacagttacaatccaacgaggtggtgctactgtggaggttcactgagcatacagaggaaatgacgtcatgtgtacctgggatagtctttggtcttactggatctctcaagctggaaggagtgcagggctcatctgggtcatacaacttggaaggagcaagaaagagaaagagaagccagaggaggagcgttctcccctaggagccaccagtgacaaagaagttgggaaagaatagtcaccaaagccacatgttcagaaaggccaggtacaaaaaggatggataagcacccgagcacagattggactgaaggactcgggtatcactgcttaccttgagaaacgcagtattggtagaaactgaagccaggtagccttggctggaggaggagtggagctttttttctttctttctttctttttttttttttgaaagcctagatatgaagaaaagaaaaagtaggaaaatagctgaaccaaatggtttgtgatttaatgagcatattatgtttctttgccattcatatgacaaaggctttactgtctttgtattctgaaaggaagtattaatagttctggaggtgtggggctaagacttaggggagcagtagcttaggttaggttcccggggaatgggatatgaaagcataggtgcagagcacctggacagttacaaaggaaggatgtttgaacagaagtggatgcagacagtaattgagggaaaattctgagctcccatctgataacacctgttttctctgagaattaggagataagatctcttccttaaagtcatagtctctggctgggggaaggaggcaaggtcattggggctgacagatctctagggaatgtcagaagaaagtgatcagggagacacaaaataatttttacattaatggcccagttgcagagggagatgattacttatgtagtgatagtatagtgtgtgaaatccatggtaagaaaagtagccaaggtgcctcccgggccctgtgaaaaagggcaaatgatccccagcagcctaaaggttctaaaaagtaatcaccacgtgtgaccacaatgctcaggcagtaggcagactgggtgtgctatag

SEQ ID NO: 13964 - DNA, 1054 bp, Homo sapiens
cttaatttggtgggcttacaacttgaaaattgtatttggagtcttttcacataagacttatgtcttcattagcacatttgttattctgagatcaaacttggagctaaatgccacaaacctagaacaaaataaatatgctaactataagactgtttttcttattatcctttagtatttgtttatttaaggaattagatcaatttcaggtgctgaatattttgagtttgcaactttgaaaaataatttaattctgataggttctcctagtctttactctttaagttcttcacagtaaaaacagacctttactaattggcttacttttctttcttggtaagatttattcgtactatgcattgctaaatgggataataactggatttgactgccaggttctgtatgactgctaataactgctaatttttatttcttttccacattttcagtattttgtttgttccctgaaataacgtagcaaaaggtaatgcctagattattctaatacggtagtgagaataaaaatagattgataatatagggaaaagaaatcaacttaataactaatacataataataagatatattaactcatgtaattaaaaaggtgacaacctagaataccacaaaaaaaaatgaataaaatggtatgttctttgtacatcaaatgcagtggccttttctagattattctcatacaccctcacatagagacaagaggaaacagagagatagaaggagaggatacatgttaacttaaggctattttttatgttacattttaaacataattaggttcatatggctaggcctggtggctcaggcctgtaatcccagcactttgggaggccgagtgggtggatcacgaggtcaggagattgagaccatcctgcacaacatggtgaaaccctgcctctactaaaatacaaaaaaaaattagccaggcatgttggtgcacacctgtagtcccagctacttgggaggctgaggcaggggaatcgcttgaacccaggaggcggaggttgcagtgagccgagatcgcaccactgcactctag

SEQ ID NO: 13965 - DNA, 1042 bp, Homo sapiens
atattagtaaccaatgtcaattaaggtcaattagcatatatcagaaatagtttgtatactggaaatgtcttactttttttttttttttttttttttttgagacagagtctagctctgtcaccaggctggagtacagtggcacgatctcggctcactgcaaccgcctcctgggttcaagcgattcccctgcctcagctaccttagtagctggaactacagcttggtgcacaacaccaagcccagccaactttttgtatttttagtagacatggggtttcactatgttggccaggatggtcttgatctcttgaccttgtgatctgcccacctcgatctcccaaagtgctgggattacaggtgtgagccactgcacccggccatatgtcttacttttatcatgtatcacttagatacagttttctagggctctatatcctgtagagtatggtatacaaatttactgtgggaattatgtcaatttctattaaattgtatatccttgaaacttctaaccactaaaccatgtgatgtgcctaatttttcacattttctgtaatatagactttcatgttcatatttatgtctctgttgaaattggaagcaaaattatttaatgctgatattacctctctttctaattaagtcataaatgtatatgtagtagacatggatactttttgtggtactcagttcttagttgttcatctgtcacttatatagtaattcagaaacttaagttaccttcttgaactgatctccttgtggttcttgtcactggacatgcactcatttgatcaggatagctctcaaggtgttctagagctgattatccatgagtggggtaaagtagtgctggtaacatgtggtcgtaagttggcttgtacctattaggattgaaatccagttatatgatttcaaggccttagagcttaattatattattgacttttttttgtagatgatcatatatttatatgtcctgtgttttctaggagattttggtatatgaaaagtaacacatcaaaaatccaataaactctca

SEQ ID NO: 13966 - DNA, 1143 bp, Homo sapiens
taatgatttcatatttaagacttcttgggttcagaactgtgtgtgttggtgatatgaatacagatgatgcccttgttaatctgtaggtgatacatgatattctcacaaatcaggaatacaacctcaatacagaaaagaagtagatcctgtttcctgagttttataaaaaatagtcatcctttgatatcagagggattggttccaggacccctgatgaataccaaaatccacagatgctcaagttccttatattctgcttttatatccatggtttctgtatctttagattcaacctactgtggattgaatttgatccacagttggtcagatttgtgaatatggaacccacagatatgaggtgctgaacatagtttctttatctagaaatacacataccagatgacatagaaattcattaaataaaaagaaaaataataggctattgatttgcaggtgctgagtatggttaagaagtgacatcttgaatgtaaaaacataatagtacaataagggttgaactagcaaaagcgttgtatctgttgctgtgaaaatatccttctacttcagtaacttttgaaaaaatcattataatagttgatataagagccatcaagaaagatgtttagaattctcagtaataacatattatactatctagtacatttggataattttcagtgagaatttgttttctaaaactggatattttaagctttggttacatgtgaaggtttccctagcatactgtttacaatgtttctgaatagtgaagtgctactattacttgtaaaagtgttaatgtactgcttagcagttttcttaaaatactttttcctgaactctttcctaaggctagaagagatacaagcaaataatacatatgcttagacaaatattacatgcacatactgtggttttcttattattttcattacaatgtgatgtttttatagtgtaccttatttcattttttgttatcacatgaaaattgacatcattcctatggtagataaataactgagcatttaaaaatcaaccttggatccagtgcaataacacaggactgttgtttaaacactagttctaaaactagagaagagtataaaatgtagtaatgaaagtttcccccataatatgtttccc

SEQ ID NO: 13967 - DNA, 1050 bp, Homo sapiens
ataaaattagaagtgattattagaggaggtgcacagatatcactttagggacacacaaaaaaatctgaaaaagaaaggaaacatgatacctcaaaggaacatagtaattctcccataacacaccccaaataaaaagaaatttataaaagacctgaaagggaattcaaaataatgattgtaaggaaactcagtgaagcgcagagaacacaagtagacaatataaagaaatcaggaaaacaattgattagaatgagaaattcaacaaagagatagatataaaaaaagagccaaatagaaattcttgaatcaaataattcaataaaggaaataaaaaatataatcaagaccttcatcagtagactagacaaggacaagaaataatttctgagtttgaagataggtttcttgaaataacccagacaaaccaaaaaaagaaaaatagagaaaaagatttaaaaagtctgcgtgacatgtgggataaaattaagcaaatatatatttgtgttttgggattactggaaggagaagagatgggaaaaggcatagacaacctatttaatgaaataatagctgaaaactctctaagtcttgggaaagaaatagacatccagatacacgaagctcaaagattcccaaatagattcaactcaaaaactcttctgtgagacatattatattcatattttcaaaaggcaaaggcaaagagtgatttataaaaatagcaagagaaaagtgtcaagtcacatataagagaatgcccatcagaccaacatcaattttttttagcagaaaatttacagactaggagagaattggatgatacctacaaaatgcttaaagaaaataactgtcaggtaagaatgctttactcagtatagctgttcttcacaggtgagggagaaatagtctttcccagccaatcaaacactgagggaattcatcactgctagactccctgcttaagggagtcatatatctggaagcaaaagaaagctgtatctaccactgttaaaacacataaaagtaaaaagctccctatagagcagacac

SEQ ID NO: 13968 - DNA, 1050 bp, Homo sapiens
acttagagtacgtctttcaccaggcattggagagcccacctggattctgcccctgtcctccacattccatgtagttctctttctaccttcaaacagttgagcccttttttctcagtatctggaaaatgctgaagcttctggaaacattttattctcccactccttggcttgccaacttcatttcctattacctctctttcaattctttcacttctaccatactgggcaaccttcatgatgtaccccagatatgccaggtatactcctgccatgggcttttccctgccaggaacattcatgctccagatatgtgctccatgagccccttaccaccttcaagtcttaactcaaatgtcgctttctcaatgaggttcccatgctcaactcccaaattaatcctgccatgttttcctttgtcctcacgccatccccattttctctactgtgttgtagttttcatgtcatttatctccttctaacatactgttagctacttatatattcggtatgttgtcttattctctccctactcccactggaatttaagctcctttactaaagagctctttgtttcatttactgatgtatcacaagcacctagaagaatgcttggcacatatgggcattgaatgtttgctggataaatgaatgctttttcatttctttaaagcagaaatgcaataatttcagcctcctcaagcaaactgtcttttttcattttaagcaaatggaaattttggaaggggagtagaaatatttaaatgatctagattccaattaactctgcctctgatgactttagctctgagtgaatagcagactcttgtaaattaggttaaaaaaattcagagaataatgaaggtggttgggagtggaataggttcaggacctagatgctaaaatgattcaccttttttttccttctgttttagcagcaaaaagtaagaaggaggaaagtaaaaattataggtaaattctgtgttgttgttggatgcaccctgattggtgtctacaaaccaggagcaattaatagcaaacatactctaacac

SEQ ID NO: 13969 - DNA, 1027 bp, Homo sapiens
acaaggttataaaaaaagattgtttatctatctctctgaaatttaatcataatattcatatattgaacatttggtatcatcaaaataatgctaatgacctatgtatttttttttttttttttaccagattggaagcatctgttggttaatttttacaggctgttggaaaatggattagagtatactaacaggttattggtgttggatttgtcaagtaaaattaatattaactactttcattattcacaaactgttaatagggattaaagggctttctgaaagtatatgaatagtctaattcacttagactaatttattatgaaaatgtggttccacaattgttagctttctgaagtaatcatattttataacaggtgtgtcatttttgccagatagggcccataaattggtttataaattatttctcaactgaatagttatggcatatggaaacagttaatggattatccacttaaaaacaaatcaagcttagatttctgacatcatagttcagtggacaaagaattgaggaagtaggtgataaacgtggattatcccagcaacttggcggtgttcaagatgttgcattgtgtttgaaacataatttattcctctatacaaacaaatgtgtataaaattttttaaactacctcacaaggctacattaaggtgaacacatagaaatatgtttttttgtaatgcatgctaataaagagatgatgccaaaataaatgcaacatgttttatagatagtaaagtttcctgaaaagaacagaatatttcacaaatactgatttggaaagattggggagaaagtcagtagagaatgaaatatttctctagggacatatcatttggttcttgtctgtggctgaatctcaaaagtagtaaagacttaaagaaattatgaaatgggtcaagaatatcttatcttcccattaaaggatcttattgttaccagttatagtatattctctgttggggtgcggaagaaatggaaatttattttgaaagctttagcgaaatg

SEQ ID NO: 13970 - DNA, 1036 bp, Homo sapiens
tgctcaaaaatttacttctacaacagcttctgaacttgaatctattgcctctgttattgtgcccctgttgcataaaattccttatgattttcactatttctggttgaatctgaattttgtgacttgacacacaaggctatgccctctctcctgtctccttgttcaacctcatttcttgacttcttcccgttactcccctttctaccttgacaaaccgctcataaaatttgaattgcttgtaatttaaaggttccatgtctttgaacatgttaattcctcggcttagatcttccttcttcacttcttcatcaggccattttattaatcctttagttagtactttattcagctgtcttagttctcatttagcatctccatattcccattatttaccaaacatatttcttacagtatatagtatatttttatcattttactgatatatcttcattggacaggcaaaatgtcctgttaacctttgtagttttttaacgtttctcgatatctctaggcgttgattgatatggcataaatgctgattgacactcccttctgctggtatgctaaattattgtgaaattgtgtgataccgcaggtatgtatctcattatgtataaaacctacaaggaactccttggtctttaccttgattatagaattatttatccataaagaaacaatgcattttagtgcatacctatgtgtattcacagacatgtttgcatgatttaaattaaatagattgtaagccatgctaatggcaaattatgattagaattgggaagcaattttataaatttaacttgaattcattatttcaatttaatttcctattttttttcttctatggagaatcacctttttgaatagttcccggaaataatttggattatcctttcccttatttctaaatttcatgctactgttgtctacatatatgtattttccatttaggtaatatttgctgctagtttttgtgttccttgtttttgctactttctgtgagttatctgtaatttgtgtttttctagaagcc

SEQ ID NO: 13971 - DNA, 1098 bp, Homo sapiens
tcataccataagtcacatgtgtaaagacagaaaaacttgtgacaagcagtgagatcagtgtactcatttttatcaacatgatctgaggaagtctttcaagatcagaaatttgaagttgctaatactttgacttactttaaatttttaaattagatattaaacatttccaaaagacaatttgtcataacaatataacatgcatctccttgcctactaatgaggctgagacatataatattgcctatagctttgaagcttcctttcatccctttttaatcctataccctcattcattcctaaacaccccttccccctactattctgtggtaaccactatcctgagttttgggtttatcattcctttctattatagttttagtatatacatattcctaattaacctactgtttggttttatatgtttttgaactgtatgttaaccagtcatcttccatgcattcttctgagagttgtatttcctctcaatattgtttcatagatttatccatcttgatgtgtgcagctgtttacatttttcccaactaatcattttcataccttgtattttaggaatatctattataaatagcatatgaataatttttttatcccgtctgataatctttgtctttatctggtagttttaactttttgtatcaattgtgaaaatatgttggaatttatatctgatgtttcattttgaatttttaatttatgctactttttccaggttcatcatccaaactgctcctgctcctcctcatttcttctttctgcttcttccttttctatattcatccttcctctttattctccttaacttcttttggattgatatttaatttcttattttatttttcctcatttactaatctaattctaatcttagaaaagaaatttaacatgaacacactttaaaaagaaatttaacttgcatgtacttcaaaggtacaaaagtaagcaatatctcttctcttgaaccaaagaatactttaaaatcttttttcacttgtatgctagttttgagtgaaatttcagtgtatctgttttcttttaataagttagattttactattattgagtcatattataactgtg

SEQ ID NO: 13972 - DNA, 1035 bp, Homo sapiens
gctggagggcagtggtgcaatctcagatcactgcagcctccatctcccgagttcaagcgattctcctgcctcagcctcccgagtagctgggattacaggtgcgcacctggctaatttttgtatttttagtagagacaggcctcaccatattggccaggctggtcttgaattcctgacctctaatgatccacgtgccttggcctcccaaagtgctgggattccaggtgtaagccactgtgccaggctcaagaagatacttttgaatatttctttgtccagtgttccaattagagaaatgacttagctggacatgtaaaacttggaagttatgcctgtgatcaaatttttggactttcctgttagttatgatatgcctgctctttgaatcagtttttaatttttatacagtatgtgactaaaaagaatttctaatttttcttaagtttgagatcattgttagacctgtaatatcattaagtaaattagagttaaagtttttaaaatgtctgaatagaacaaaaaagaaaattgaactgattgatggttttccaatgctggtgtaggttcaggatttatttaaataaaaaatgaaggaaggctgagtacggtggctcatacctgtagtcctggcactttgggaggctgagacgagcggatcacttgaggccaggagtttgagaccagtctggccaacatggtgaaaccccgtctctactaaaaatacaaaaattatctgggcatggtgatgcatgcctgtactccctgccacttgggaagctgaagcacgagaatcccttgaacctgggaggcagaggttgcagtgacctgagatcatgccactgcactccagcctggacaatagagtgagactctatctcaaaaaaaaaaagagaaagaaatcaaggaaaaagtagactcctctgtactcccaattagctctcccctcttggctctggatatgtaatatttttagagccactcttcaacttctgaaactgcctagcaattgtgagccatgtcagccttttactctct

SEQ ID NO: 13973 - DNA, 1037 bp, Homo sapiens
attttcatattgaggacatctaatgttttccatcactgcatcttatgccaggctaccaacaactcttgaccagacaatgcagtagtcttctaactgacctccttgtttcacgttgtttctgtctgttgccacacagtagatagaaaaatccttaaaaaatgtttatttcatcttatactttctatgctcagaactctccaatacttatccatcccactcagaataaaacctaaagtccttaccatggtttataagatcctatcaggggatggcatactttttcttaaatgtccacacagtaaatattttagactttgtcacatatggtctcagttgcatctgctgctgctgctgcttctgatttcttcacttcttcctcctcctcctcctcttcattctcttcctcttctttttaacaagcatttgaaaatgtgaaaattattctcagccccaagatcatacaaaaacatttgacactcaggctgtagtttttcagctgcctgcctagaggatcggagccctgccttttctgtctgtccttgtcatctgtaactcttgtcgtgttcactgagtcttcttactgtcctctaaatatgccaagttcattcctgccacaaggctttgtattttctcttctgtttgctagaagttctttttctcagctttcccatgtcctctcctcttcattctggtctctgcacaagtgatattttctttccttctgtcttttctttttttgagacacagttttgctctgttgcctaggctggagtgcagtggcacgatcatggctcatggcaacctcaaactcctgggctcaagtgatcttccaacctcagtctcctgagtatctagatctactggcatgcaccaccatgctgggttaattaagaaaaatgttttttgtagagatggggtctcactgtgttgcccagtatgttttcaaactcctggcctctagcaatcttcctgccccagcctcccaagttgccggaattacaggcatgagctaccatgcttagccgcacaagcgttat

SEQ ID NO: 13974 - DNA, 1049 bp, Homo sapiens
gcttgaacatataaagatctgtgtaccagcatgttcttgcagcactgtgtgaaatgtcaggaaatttaaaaccaaaatatttatcaatagagacatgattaagtaatttatagtacagtcatgcagttgatggataatacagctgttaaaaccaatgacttagatctgacttagaaagttacccaatatttaaaaaaaaaagcatatgtatagtatgaaccaatttttgtttaaagacattgtgagtttatactgtgaatgagtgggtgtctgtgcatatctgcccatgtaaaggaaaacccttgatggattctaaccaaacttgtaaaagcatttgcagtgattatcttgcactagggctggagaaactggggcaagaactttcatttccttgtgtacttaaaaaagagtagtgagattatgggtgactttttattgtggtatttttgcatatctcaggatagtattttttgacacacacacacaaaggataatgtggtataaagagctagaggaataggaagggcagccatccctcggatcacgtcaatcttctggagtggtgagatgtaaaccattgcataaatgactgctccttgattttagcctaaaataatccagtctttcttctgttaaatgcaagaaacttggggtagttaatgtgaataagataaggtctatagcacttcagagagctcacagtttagtagagacaaaatgtataagcaggtaagaggagtacaatgtgatatatgggccctaagtatgtgctaaagtgctgaattattgccaggacagtgttgaaaatgcagtactctgacttattggagttaatgggagagaccctggattgtcgtcagcatcttagcaggcaacctaagcactgcaacaagcatctcctactgtggcctcctttatcaaagttttcagcattagtaccagaaaatatccctttagaataatgttttcttagcagaaacagaatctgatattgttcctaacagagaacaccatttttgtcttgtttaccaggtcattttgccacagtg

SEQ ID NO: 13975 - DNA, 1028 bp, Homo sapiens
aaactataaagtgctttgtcttttgctggaaccagtactggatatttgatgtggctatcagaatctgaaaattggttggtttatttaccttttaatttttatgacacacagagcagctctttcaaagcagtggaagatagcttcaggtgcagctgttgtaaaaataaataaatatattgaaattgtgtgaccttatgaatggcagaaatctgcaactgtctaattatctatagttatgtgaatataattttatttgcctgctgtgaattttaaaagttcttttagtaagtgttttacctgttaaaatgatctagaatactttcttctctccctctccacctcttttctctctccttccttcaggcagaactacacgtaaatcattccaaaacaattaatgctgctttagtcacaaattattgatttttccatttgtagtgcatgtagaattgctgctctacttagattctaaaatgaggcattttaattgtgttttccaggaagatatgaatttaaatgaagataaaaaggcaccattgcgggaaaaggacttcagtatcaaaaaagaaatggtgatgcagtacattaatactgcttctaagacagtaagtaaaactgtcaagttgaaaaatactgccgaacatgttttaacatggaaaacagcacatttatctaatgaagtacttaagtttgtgggcaactgtaatcagagggcttctgaatgtataattaagggcacaagtatattatacatttgtttaaattaaaaatatttctcatcttaaaacttttaagctgcttctgttttttagctagttacattgctaagaaacactgggagggggtctactctgtcacctttccttgttagtgaattaatatagtcattgatttttaatgtcacttataaatcacagtgatatctgcattatagaaaagtgagaccgattttactctgtctacatcaaggtacataatagtggcttagaaatgtctttaatgtgagtctccctatgaataaaattatc

SEQ ID NO: 13976 - DNA, 1042 bp, Homo sapiens
gttcacgccgttctcctgcctcagcctcccgagtagctgggactacaggtgcccgccaccactcccagctaatttttttgtatttttagcagagacggggtttcaccgtgttagccaggatggtctcgatctcctgacctcgtgaacgaaccgcctgcctcggcctcccaaagtgctgggattactggcgtgagccaccgcgcctggccaatcactggcagtgttcttatctgcaggattacacagcagttgtttgtgattgtaggtgcttatgcatacacttgaacaattctggcaaggttacattccagaataaattagagttgtgcagctttctgaatattcagctctcttcttgtctgttctgctaaaatttacagtatatgaaagaaaagtgatatttaaatttctttttttctcatcgtgtgtgtgtgtgtgtgtgtgtgtgtgtgccttgatactgcattaggataaactgaaatttgtttttcaattaagatagtttacactcttcccatattctccagttagaatatttggccaaaaaatagtgtttatgagttcattatcagtctctgggtaaatgtcattctttggctgctgttctattaatgagctagccatctgactttcttttaattttaatgggaattgagtaatccagtgtctactggatagtacagtggaaattcaaccccactattggtaaaaccaaaaaatataacttttaaataatcatatttctgttaaaaatgattatttaaaggtttatataaggacatagtaaagctgataggcaaaatattttatagctgttttaagctattttatagcttcaatgtatttatagacatcttgaatatagaaaagtagtaataaagttaattctaagttccaggttcttggtagtatttatcttttagttttctaattatgtctaaacccaataaaatttattaaattgcagaactagataagattcatttagtctgccctgttcaacagtgtataatgaccttgaatgaggtcatgaaatcttctg

SEQ ID NO: 13977 - DNA, 1022 bp, Homo sapiens
ggaccaacactaaattatctaagtaatctttctaaactgcttaatttgctaatatataaagcaaaggtcacctgtcattagaagctcaaatctatgtgtggttttaagattagaaggaatctttcaatgttgtctgagctctcttcaatctttagatagaatggttgctgaaaaattttcaccactctttattattattaattttaaatattccaatgctgaatgcctcttgatgaaatcacaatgataacacgattggccctctttgtttttctcatttttgagatgagataaatgttgggaaaggaaatacttacacgtgtgtcattctgtctttctttgtagctggacaaatttgccagcataagaattccagggagcaagaaagagagacctccacttcccaacctgaagactgcatttgcaagcagtgattgctcagcagcacctttagagatgatggagaactttccaaagccactgtcagagaatgaactcttagaactttttgaaaaaatgatggtaagaattttgattctttaggaaatgtttgaggaaaaagccttagcttttgctcatgttaatggaactctaagcatttttggtagtcatactccataggctaatttctgatgtcacttaagatagcacttcagccacaaagagtttttggattacaaaaatatgaaatctgaagaaaaacaacataccaggttttggttttgtaaagagtatgtgaaaacaaatactccaaagtatcgaacggtatatttttgtcttgagtagatatttaagtcagcggtccccaacctttttggcaccagggactgattttatggaagacaatttttccatgagcgtttggggggtggtggagatgattttggaatgaaactgttccacctcacatcatcaggcattagttagatgctcataagaagcgtgcacagttcaccatggagtttgtgctcctttgagaatgtaatgccactgctgatctgacaagaggcggagctcagctg

SEQ ID NO: 13978 - DNA, 1031 bp, Homo sapiens
gtgcagcttaggtgctagggtaataaataaaggtgaataaatgtttagcttataacttccattgcttatacctgggttttgaagaaggttttcctcatagaggcaaaaaggttgggaggaggggggagtgaggggagacaggtttgaaaaggtaagttggaagacattgaatgtggatgtgacaatgctaaattatccatcagtgtgtccactgagtgtttttggagtataggagttgtttttgacttgctgttttctctcctgtccttcataaccatttgtctacagtatagtacttctatgatcctcatctctttgttcatctgactgcagcctgctttactgtttggcctgcagcaatggttttcaaatctttttgactagatactgcattaagaaatatattttattttgtagcctggcatgcataaactcctaaactctctgcttctcagttgaaacaaaagtttaaaaaccagtatttaacatttctaagcaaaatgaattctgatctttttatttccattcctttctaattttcttcactcctctccattccttaaaaaaaaaaaaaaggtaattgaatccactaaattgatttcatgacccacaaatggttaacagctatagctagaaaaccaaacattggcctgcacagaaactagaggaagtcatgaggtctttgcattagtgtctattctttattatatgtagttgcatgtaggaaagccaggttagaatgccacctctgccatttactagctgtgtgactttgtgttagttatgtagcttttgagccttggtatagagatagtttaagggacaaattaagtaagatgcttggtaaaccgtgcatttataatttagtgctatgtttagtaatacacactttcaaaaaatgaggtatgatccagcaatctcattgctgggtatatacccaaaggaatataaaattttctaccataaagacacatgtacacgtatggtcattgcagcactatttacaatagcaaagacatggaatcaatcta

SEQ ID NO: 13979 - DNA, 1067 bp, Homo sapiens
tgaattccttgcataatgacaattacaattcttttttaatgaaaaaattgacagcctgggaaatgaacatgaaaaatggagtgcatataatctgcattgagaaattcaatatgactatttcacttctttataaaaggtgacggtctccaattaaaaccatgttctaactccactcagtctcttttgagggtataattttgctcttattgttatgttatattgaacctgcttttagttactttatacatgtgtttgtaagcttttggaagtcactttctgtgtggtgcctggtatagacttgtgcttacagtaggaatctgaatgtttggctaattgaaaatcaaaacaaagtactcttgtaactttatattgcctggttcattaacccattcatgatgaatttgtttaaatgttattaataattactcatttctttttataaaagatcctagtggtggtgggcaagggtatgtaaagactaccagaaacatatgtgggttattgaagaacttgggcctggcaatgtggctctgaagtcccacccttaaactgtgataaaaagacttgagagagactcaaacgtgtctgtatatccttgggcaaattatcaacctttgtgcctctgttttcccttctataaaatggaagtaattagtctgtttgcttatagattgttgtgaggattagttgagttaacacatgttacgatagcttaggcacagcacaattaatatgtgacaactattattaataggggagacctcatcactatagtgttaagttctcagttattgacagtattttaacctcttcttcctgcttcctacttcctttatcctcatagcttttttttttttttttcctgggggacactggtattgtgtccagggactcagccattcattgcagtgggacacacaccagaggtttgtttggtgcctggatatattcccttcctttctgtttcatgtagacctactacagcctctgtacattgcctctctttctctgtctgcctcctgctgtcaacatttgctccacactaaacccacactccacaaaagtaa

SEQ ID NO: 13980 - DNA, 1037 bp, Homo sapiens
acatgtttacctttttaacaaacctgtacatcttgcacatgtaccccagaacttaaaataaaataaaataaaataaaataaaataaaataaaataaaataaaataaacaaaaagtaacctgatgttaccttaattttggctatcatagtcaattataatctgggctcatcaatatttttatattcaaaacctgtttatttttcttaaagtaagacattggagtggtagttgcacgtttctttcacagaaattttccatctggatgatttttcacagggccatggctggaggttttctttgctttttgcctttgattcgaaagatgatgttcaaatgttgtggctggctaaatagaatactgttctcctgaaaatgttatggatattttttcatctctgtgccctcatataacacatttcttagtcatattattctgacttcaaaaaatattctgtcccaatgcatcacttctaaattagcttaactttagtgaagctctatttccaaatagatattttgtgtagtcctgtggtatgttgtattaaaaaacagtaactgtgtcacttatgccatatcacgtgttgtccaaaacaccactattcctgaaaaaaaactaatgattaaagactataaaaaaactttatatataataatattaacctcttcatgctccaaattctgatgagtactatctacatattctacagatgtgtagaagaatttgatgtcatgttgaagaaaattattaacaaagtacaacaaattacaaatcacaaatcaatttcatcctttgaaaaattatttattctctttggttttcaaatacaaacatatatttaaaaataaaacaaaagcaaagattttccccttcctgcttcaaaaagaatgttttccacagatatttgtaattagactattaactaatgcttttgaggtactggagaaatagattttctggctctatgaccattgtcaaaaatttttctcctataagaaaaaccacgaggtattttaatgttttctgcttcttacaaatg

SEQ ID NO: 13981 - DNA, 1043 bp, Homo sapiens
aatactgctgtgaggatagtagctggataagttaagtttgtttggattttttttgttttattttgttttgatttttcccttgagcctttaagatactgacttggagcccagcaaaaaaaaaaaaaaaaaaaaaaaaattactgtttagctttgtaccctgggagatgatagactgaagtttcaacctgaaattcagagtggaagtcagtgagctagcatgccaattccaaaacctaatattaggaacaataggaagatgctgagcatgctggacgtcacgataaatgcctttacaaatactattcaacttaactatcaattcttattatgtgtatattgttattctatattatagatgaggcaggagaaagtcaagtgaatcatataacttacccaaggttaatgctatggtttgaatgtatcccctttgaaattcatgtgttgaaaacttaatctgcaatgcaacagggttgggaggcgaggccttttgagagggatttagttgatgagggctctgctgccataaatgggttaatgccattataaaaagggcttaaggaagaccttggctctctcttgccctaccaccatgtgaggatgtaacaagaaggccctcatcagatgctggtggcttgatcttggacttcgggattgtgaagaaataaattatggtgtttataattatctaacccaaggtatttgttctagcaacacaaagtggatgaagacacttgctaaatatcagtatagtacaacagaaatttgcacgaactctaggtctcctgtgcctacactgttccctctttcaaacatgaaccaaaatgagggtacaaaaaggttgtatattatcaacttctatacctttatctttggagaactctcctcttttaataagtggattaattaccttgatatgctttcatactaaacactttattactgtgtcatagttaaatagaaggcctatattccacataaaaataggtagttatggcactgggtcgccaactgattggatgaaggggaagaaaaattctcttttg

SEQ ID NO: 13982 - DNA, 1062 bp, Homo sapiens
tggaattgaatggcctgttggtacattattagtattctcttgtgaggcaaatgtgtccacatacctgaagtgtccattaatgcccataatgagtacaacggattttaatgtgcctgtaatatacttaagggtcaaatattttaaccacgtctaaaaattcattttaaaatttttggccatgtttccaaactatttagacagtatcttttggaaaagaataaaactttattttatgaagcaaaaacttcataaaagtatgaagattctgttttagggatatacactgttaatttttaatatatttgcaaaacttaatgagaagaatttgatttaaagatcttggcataattctttctcttgtatttgtcctccttctgtagttctcgtctttcctgcaggttctcaccacggcaaagtgattgagaacatgtgctgggctttctttcttagtacttttgttcaacacctgttcatttttgctactttccaggcaactggtcagctttcaagtttatttgcatttttaaaacgatgcacaaaataaaacaccctcagatctgattaatgcttcctagtttcacttctaaaacaaacaaacaagcagtgcagtccagccacctgcaaaacactaaatgagccttgtgattagtgggaaagagagaattccagagaaattttgggggcaggaaaaaagtgggcagagtttgactatggagaaaattagtttgctcacacattttggataaagtgaaatatagcaaacattctaaatgtccaaatacattttgaaatgtgttttgatagtgatgtaatgagatattgagagtaaatcatccacaatcacatctgttattaaataacttaaaggataacacaaccaccaaaaagaagcctatgcagattttagaataaagttggtcttgtgtcaaaacatctgatatttgcttttgtcttttcacgccccccacccccctttttgaggagagggaggtgcctggcatgaacctcaggaactgaatggttctgaatgacagaagaacctcagaaatattgccattgtga

SEQ ID NO: 13983 - DNA, 1070 bp, Homo sapiens
aggtcatagtcctcacatttaaaaactattattttatgtagttttatattatttcacacagcttattatgtttgtaagtggtagataattatagatttctgactgttataatattttaatgtaccttttcttttttatgtgctgaaatgtatcctgaatgccatgctttttgtactctacaaaaatcctccattccatgtctcgttattctttagtgtatttagtatatttcaggtcatagtaattatattacacactgctaccatgttgttcaggctggtctcaaactcttgaccttgtgatccgctcacctcggcctcccaaagtgctatgattacaggcgtgagccactgcgtctggccttacatgtgaacttctttaaccacccatgactctcagattgtgttcatgactataaactgccattttcttagtttctgatttgtagactaggtccagactggccactgcaggactgtaaccgagaattgctttctgatttatttcaatgcagtgaaagatttagatataaatgtaaagaggggctgtagatcacaaatattactttatttaaagaatttaatacattaaatagctgctgaacttctagaagttccaagctgctgtgtttcttccttacaaagatagtaaggcatggttcataccatcaaggcacttaaagtccagtggggtcatggaatattgtttcggaagagctataagtaaagaactttttataaaagttcacaagttggaaagattacagaagggatatattatgaggcacatttgggatttgagcttaccattttatggccacataaggtttagaaagatagaaagagaaggagggtattgtaggaagagcaaagacagagttgagaaacatgaaacttttttgaggaactgtgtgtcagtttgaatcctccaacagaagcagacactaagatggtaaaagacctacaaggcattcattgaagaataaaggggaaagagctgaaggaaacagggtgagccttgagattaatgtgggtttcacacttacaaaagaagaggtgggcaaggaagga

SEQ ID NO: 13984 - DNA, 1027 bp, Homo sapiens
tggaaacgcataattcttagacatgaactcaaagacatgcaggcaggtttacttttagctcatggcatatgcaaagataggcatcaatttgtggtgaggatatgaggaagtttttatctgtacatttgtttaaagagtcatgtttagagaagcattttttaatagatactcttttcaatggaactcatatttaattagaccaaacataaaagccaacactttaagtaatctctttttagcagattttcatggaagagtgccaaattgttttggtttcactataggtttacagtcttctgatagaattcccagttgggatttgaaaaccaaactgtgtcatacagacatgaatacagtggcctaacgtgatgtgttgaattagctttctagatgacttaaagtatagctggggttttcctttatccagggactaacattcaaggttttgtgaaaaagaaaattaattttgcattgacattctggatgttggtgataatttgtagtgacattatgcctattggttgtgattgtgacaggcaggcagactggatccaaatggacattacaagagccaaattaaatagtctgagcattggaaatttctgccttaaggaaagcagaagcttttcagcatgcacttgttttctacctccacaattatggattaatatacatcaattctaggcagttgaggaatgacatgagaggattaatggaactggacaacattacacaagtgaagtgaaaattctgtaatgatttttctgaggtgatgtagtagacaaggcaaatgggcatcagctcctagactttgcacctttagaatttcaagaaaatgattgaaaagagaaatggaaaacaactatctaactaaagctggcataataatttttctcatcaaatatatacatcatttttcacaaataaggaggagttattcaactgagtaagccagtactgtgtgcagtgtatgattttatccaaaaattgtggccacttttatctcttaaaactgtttagagaaaaa

SEQ ID NO: 13985 - DNA, 1096 bp, Homo sapiens
tttgaaggcggtatatgacaaccaatatttgttagagacctcttctttgttggactatgagggcaccaaagaattcagctttaaaattgttgcctctgattctgggaagcccagtttaaatcagactgccctggtaagggttaagcttgaggatgaaaatgacaacccaccaattttcaaccagcctgtaattgagctgtcagtttctgaaaacaaccgacgtgggttatacttaacaactattagtgccacagatgaagacagtgggaaaaatgcagacattgtttatcagcttggaccgaatgcctccttctttgatctggaccgaaaaacaggagttttgacagcctccagagtatttgacagagaagaacaagaacgattcatttttacagtaactgccagggacaatgggacccctcccctccaaagccaagcggctgtgattgttactgttctggatgagaatgacaatagccccaagtttactcataatcattttcaattttttgtgtctgagaatctgccaaagtatagtactgtgggggtaatcacagtgacagatgcagatgctggagagaataaagctgtgactctttccattctaaatgacaatgataattttgtgttggatccctattctggagtcataaagtcaaatgtctcatttgatagagagcagcagagttcctacacttttgatgtcaaagccactgatggaggacaaccacctcgttcctctactgcaaaagtaactatcaacgtcatggatgtcaatgacaacagcccagttgtcatttctccaccgtctaatacttcctttaagttggtgcccctctcagccattcctggctccgtggtagcagaagtttttgcagtggatgttgacactggaatgaacgctgaactaaagtatactatagtgagtggaaacaataaaggcttattccggattgatccagtaacaggtaacattactctggaagaaaaaccagcacctactgatgtgggattgcatcgtttggtggtcaacataagtgacctggggtaccctaagtctttgcacacgcttgtgcttgtattcctttatgttaac

SEQ ID NO: 13986 - DNA, 1074 bp, Homo sapiens
actggaacataattcttttgtgtagctcactattagccagctaagttcatctttttaataccataaaaaggttatatgtacagttcctattttagcttgcttacaaagggagcattatttttatttaaagtattgctagtaaatgatttgtagaaacttggttttctaagcatagttcttccataaccaccttttgttgtttgagcacaagggattcttttcctagttctatgtgtttgtttccctatatgcagtctttaaaggattacaacacttaaaattgaatggacttgtgtcaagctttttgcatcatacattttttgaaagatttttaaaaaagcctacaacttacatatgtagtagaatcagccattgctctgctcctggcatagagtcacctgtttgttatgtggattaaatagttttaaaatacatatttgaagacctttgagaatgctttagtgtttgatttgaaataaaaggaaattttagcaaggattaaagaaaaaagctatcagctgtatgttaagagagactcttactaacatgttgtaaatattacaattcatgaaatgttattgtaagtctgtaacttaattttttccctgttttagttatacaggttggtttggaaatttgtgttttggcataaacaagtaaaatgtgcccattttatggtttccatgcttttgtaatcctaaaaatattaatgtctagttgttctatattataaccacatttgcgctctatgcaagcccttggaacagaacatactcatcttcatgtaggacctatgaaaattgtctatttttatctatatatttaaagttttctaaaaatgataaaaggttattacgaattttgttgtacaaaatctgtacaaaaatctgtttttacatcataatgcaagaattggaaatttttctatggtagcctagttatttgagcctggtttcaatgtgagaaccacgtttactgttattgtatttaattttcttttccttttcaacaatctcctaataaaactgtctgaaatctccctgtgactttatttacagttcatctttattaaat

SEQ ID NO: 13987 - DNA, 1046 bp, Homo sapiens
ttcacatagcaatgacactcattttcggcttggagactcataaatgaattagagctatgcagagctgataagaagagaacagggtatcaaactatggcaccctgtgatggtgcctagcatttctcttcatttttgctttacttctaaagtcatattaactttgaaaaggccttggatttatgagacaactcttcctccctccccccgaaaattctcaaagcacatttcagaaactcatttttggcagatgtaaatttaagtaaattggccaaggtcacagcacaataagggcagagttatcaagggaatgcagtttcctgctttttccaccatccatgaaattagagtaactccaccccttaaaataaaagggtctacttttttttttctttctgaaattataaaccttgatttggaaattttttttaatcattaactcagactttcaaaagtggtcatttagagctgtggaatgtttatgggtgcactatgcatctactattactattactgaacatcttacgacctctacaatttgttttaaaagggagtgcattttttgtttgagctgaaccatcagattttcttttcatgcggtatgacatgaggaagaatctatctgtaggcacaaaactggttcactttctatgggcaagcgcagactttaaagtagattattaaagtacacagaaatagaaaattagatcagaagtgatgttttactgtgaggtcttctttgggccttataaaacgagaaagaactaaccttgttctatttctgagttctgaaaaaaaagcctcatagcaggcatatcacctttaattaggtttctgcttttgggaagcattttaccagccccctttcatttatttttaatgatgttatcactaacaggcaaacagtcccttaataaaacaaaaacagtttctatataaagcctggtgtacatgttctgagtcagtcatctaaaaacaaatgttatgattgtttccgttgtgctcttagaacacttaatggccctactgtgcagatatgcaaaacatca

SEQ ID NO: 13988 - DNA, 1003 bp, Homo sapiens
ttcttgtaaagaaaaagttttattcagatcttagagtcaagcaatgaatttatttctttaattgatgtttttataattgatacttttattgaaggtgtttcatagtttatttgcataattaaatattaaggcaaactatgccagtttgttttataatcatgatcattatgtgaaataagctcaaacatacaataaagtttaaaagcccttacaaaagacatttcaggaaactataaaaatacttctttgagtaactgatactcattgtcaaggaagcaatatttctttggtgttggttagtaaatctcttgcacctagttgtaaagtattctgaagtaaaatttctatagaaccataaagaatcaggttttttaaaaaataaaattacatatgaacttcattatccataaggaatagcatcataatttgcacttattacttatgaaaatatttctaggatggtaacgtaattcattattacataatatttatttctctcctacttgagaaaaagtgctatgtaacatgataatctaaatttaacaatacataaaataaaaaacatagcatttcctttataataggcatattaataggacaagtatatgtgttaaggaaagggtttatgggttaatagataaacaatcatatatttttatgttggtgatcatttaatcagtgactttaaaatttctttccattttaatttaggcaatattatagaagttgaagttgagtttgttcaatgtgatatttttgtcatagactaaataccctaagtcatgagagttacataaattaagataaaacaaaaacctacaggttgctgtaatgttcagagctctataaggtttcaaaatgatctttactccattgtaagaattatgatgtcatatggaatgaaagctccataaaaaatctggattttttgatatgtagtatcagtttcatttattaatgatagttatggtgatatatgattctgtgataacccacatataat

SEQ ID NO: 13989 - DNA, 1050 bp, Homo sapiens
ttctgaatacaggattccaattctgctatttgtcttctttgcacatttttccaaagcaaaggaatttgaacaccactcttagtgtcaatgatgttgcatttcactaacaacatttaccaggtgtgatatatgctccatggggacaataatttttgtcagttttgtttaattttatgtaaccagaacctagatcctgcctggtacatagtaagtgttcagtaaatactcattgaactaatgtatttgagcctgagttttcttaaagctgagaagttttggttatataaagtgctggtcaacttcatcaattttataaattaaaagttatatgaagataacatttaggctgggcacggtggctcacagctgtaatcccagcactttgggaggcctaggctggtggatcacttagaccagcctgaccgacatgctgaaaccccgtctcagctaacaatacaaaaaattaatcaagtttggtggcagacgcctgtaatcccagctactcagaggctgaggtaggagaattgcttgaaccagggaggtggaggttgcagtgagccgagattgtgccactgcactctagcctgggtgacagagcaagaccctgactcaaaaaaacaaacaacaacaacaaaaatttaatattacaaattgttttcccacttctatatcctgttcagttagagaatctctattgaaaaacaaaaaatgaagagaattaaaaggagagcaaaataaataaaaactaaatgaaataatcctttagagaaatgagttgtgattatacttaccctaagaaaatattttaatttgataaaatataatacatttttaaggtgcagagaggagaactgagataatgaaatttttaaaatgtttaatcacatgtgtgtagtactgaacattttacactgtttattttagaatttgagtatgttgtttttgaattctatttttgattctgaattatcctacacaccaaatacttcttgttcttcccagaggcaaaaatgcagcttttccttttttgtcctccggttactattagtt

SEQ ID NO: 13990 - DNA, 1058 bp, Homo sapiens
tagagaaacagaaggcaaagtgggtgtagatggctttgataaaaaagggttaaggagaatagaaggtcaactcattattaagaaaaaaaggaggcagttaaaattagatatggtttattgtaattaaagaaaacacacacagattttccttctaacaatgttttctatttgactaaataatttagtgacttgcaattatgcagtttattttatatttacttagaaaacactttaagaactgtgcatgcttggatacacaaaataaaatttaattattaaaggaaatgttgaaaatatacaggaaattttgtgttgctttccagaatgtaaaacatattttttgatagtgccatatttatagagtcaaattagctcaatgtagccagctggtcaggtatccatagcctgatattctgattttactgtgccttcaattaacaattagtcaatatatttgcatgagccaagggtattcaatgcatactattgaatgtttattaaatttgtaactgtttactgtatgaaaatatctagctcactcatgcctcattgtttagcattacacaaattacataaaagaatattgcataatatatataaaatatgtacaagagtcaaatgttgaaatagcatattctggcaacccataacatgggttattgtactattttaaaatatgctatatgatcagtggttacattagtttcaaaaatgtgaaatgtaattattctcatcttttacttttagactacaaactgtaaaacattttgacctgataatagagtactgacatttactttatttcaatcagaaaaaaagtcctcagaaatctttaaaacaaagtataagtttttgtttttgttttgtttagaaaaaagacgggcagagattttgttcctacaggtgttcctccaatagcacagaataagtaagaatacagaaatgtattctacttcactctatatctgaagcataaaattcatattaactagaacaatacaaggcaaataaaagaacagaaagcaagaaaaagtcataaattactatgtagtgatgcg

SEQ ID NO: 13991 - DNA, 1025 bp, Homo sapiens
gtggattttagtaacaatcattttcacaagagctgtctggaaacatacacagacatgaatattagagtaaaatatatagacaaaacacaaaatactgtttcagtgatgctaaaaggcagcttttgtaatgtaaaaaggggaaaaatgcatcttttcagcacaactatgtaagggaaattgcaaaggaccagcagtagtggatttgaatggagagtaggtgtgagtgcgagttcctagacggatgaaaagacatggaagagagccaaaagagatggccctacaactgcagaggactaaggataatatctgtgctcatgtttgtaatgctcctggagggaagacagggagggatgaggattgtttcggtcatggtttacacacatatatttagacatttaaaaattaaaacagaattgaagcaaaatgcaagaattataattctgtttttagaactattactttaaagtaaaagccttttattagactgagaaaatggggcactgttggacactttttaaaacaagtaattagccacttatacattatatctattattacaaaacaatctggattgttttcaaaattttagaaaaggaggctgttcatgaaggctgttcttaatagttggttttatgagaagggattcttaaaataggcaatttaacaacatttaaagcaaaacacattaaaacatggtatctctgtttgaattttccagagcagaagttggctttgcagaaatcaacaggcataagataaagagaacatggttcataattaagcatcaacatatttttcatatttgatagtacatgacaatatttgcctactaaccaaattgtagcttactttaattattttggtacgtagcctatcgcaatgacttaaaaacaaacaatttgaattttcttttgtattttagctggaataaatgactttttttcattaaggtatgcagttgatggatattactattttttagttttgacaccccccatccaacgccaaaatgaaccaagagcaga

SEQ ID NO: 13992 - DNA, 1052 bp, Homo sapiens
tgccttttgaaattcagcagaatccacaattaaatggatattttattgcaattgtctttcagagtttaatcagagtgtatttattgctgcaaatgcagacttataaataattccacactcactaaaatgctcaaatatggcattcttatcattatcacaaattgaggtaccttgaataaaacaaaataagtacggaggattttctattttccactaaatggtatataagaattactttttagatatatttagtgtgtttttgaacaaattgaagtttttcatgtgattaaacttgatcaaatagatggatcaactttctctgtaacaatgagtaaacttgtagatagtgttcacatttttatgtccaaatgtagaaagttgggctaatggatcacttctgaaattcttcatgtttttatgacatgtattagactctgcaattatcaacactactttttccttattagtaacttttgagtggctgaagaaaacaatttgctttgactgtatcactgtttaaaagaaaaacgattacagaagggttgttttttttttcttttttttttttgagacggagttttgctctggttgcccaggctggagtgcaatggcgcagtctcggctcactgcaagctctgcctcccgggttcaagtgattctcctgcctcagcctcccgagtagctgggattacaggcacccgccaccatgcctggctaatttttgtatttttactagagatgggacttttaccatgttggccaggctggtcttgaactcctgaccttgtgatctgccttccttggcctcccaaagtgctgggattacaggcatgagccaccgcacctggccgattgcagaagttttatatctcttttggtcctgttaaacaggaaagagtatattccagtctcaaaggcaatttcttgaaggacttttcaagacagagttcagtatctcagtttgtttccaaacttgaaatttctcaagtttcagaaacacagacttattaggccaccaggctagtgcagcaatgtttagatatttcaatcaa

SEQ ID NO: 13993 - DNA, 1028 bp, Homo sapiens
aagttgaagttaatgaaagaaagaaagttctttgtagagtcacacaaggcaatacctcctgctgtggtcactgcatttattttgactgagcacttgtcataaatcatttttgataataactaccagtttgaaataattcatcctagcaacagacttccaataacattcatactttttataagatgacgtctatttaaaattaagaaaggggttatttaggaattcaaaatactcccctcttgtccaggaatgcaatttggatagtgtatttgccaactttctgatttcatctttaagtcagtatgcaaattaattttgaaatacaattttcataaaaatactaagaattaattgagtcctcagtatttgcctttgacatataaaaattatttagtatcttaaaaatacactcaaattaaatgaatgaatgatttgtagttttgtctgttggatatgtcttttccctcactgtgatcttgtagacatataactaatacgtattcaggtaaagaaagcaattctacacacataccttatgcttaaaaggtaagaatttataacttgcaaatttatcgttttggaaaaaatactggaccggggcaatattaatctagaattaatcccattgaaacattcttatctttaaaaaaatttagagaaaaatgttctcatgtagtgaattcataaacatatttcaaatttaattttctttttttctactaaatagtaaacagcaacaatatctaaacaacctcttttgtaatattagcatttgtaatagtttaaatgcattaaacatttcaacttctcaggagaaaatttacaatgtaaaactgtgcctaggctgggcacgtggctcatgcctgtaatcccagaaatttggggggccgaggcgggtggatcacctgaggtcaggagttcgagaccagcctggccaacatggtgaaaccccatctctactaaaaatacaaaaattagctgggcatggtggcaggtgcctgtaattccagctactcgggaggctgagg

SEQ ID NO: 13994 - DNA, 1033 bp, Homo sapiens
tctttctgtgtgctctgatataatcatggattaatcttatttcatatgtcataattgggtggaagtttcttgacatcaatgactgtctctaactcatcttcatttttgcagtaatgtctaaacagttcattcacctttgtggatatttaacaaaaatcattgagtttaatttgtagctatttcggctatttgttcattttatatatttaatatttttttcagcaaggcctcaataattttaattttaattttaatttttgtttttaagacaaagagtctccctctattacctgggctgtaatgcagtcgctcagtcgtggctcactgcagcctggacctcctgagctcaagagatcctcccacctcagccttctgagtagctataactacaggcacaggccaccatgcctggctaatttttgtattttttttctagagatggggtttcttcatgttgccctgtctggtcttgaacacttggactcaagtgacccatctgccttggccttccaaagttcctggattacgggcatgagccaccatacccagccaccaaaggtttttaatagtaaataattgaaaattccatgaaaatatttttatactaatttcatgcatgaaaaattgagatatagaaaaatgaaatcaatagctgaaaactgcccaatttcaaggcaactatcgtcattttactttatttaatcatgtttttcaagtaactgaatcctactgcctgatattctaattccaatttgagatttggaaaaatcaaataggtagtacgttgttaatccttgctcatttatgtttaactgaatgataaagatttctgtttagaaaatttgggacttgggaattacataggaaaatcttttatactacatatgaaaatcttaacttctcttttccgtttttttttttttttttttgagacggagtctcgctctgtcaccaggctggagtgcagtggcgcgatcttggctgccttagcctctggagtaggtgggatcacgggcatgtgccactacgcccg

SEQ ID NO: 13995 - DNA, 1031 bp, Homo sapiens
ttagactataagttgttaaacagatatttgaaaatccagtcatatatattcctaattagctcctgaataagagtggcaagtctctttaatatgatcctcatataacctcttggaatgttatggtctaataattttttctcttgtgcaaaattcttgtgaattgattaaattgactttagaagagatctatttttttctcactaattttaaagaagtaatttatggtttaatcctttaaaataaaattaactctcgatttggcagcatcatttatgctgttgtcagtaccaccttttcctaagataattattatcatgtgtttcaggaaagatgttagggtatatttcaatgcttttctttttttaatcagcattgttccctgtctcaataaatctctattattatacaagttcaatgctaccttttgcgtgacaatattttctgcttcaatgtagaggaaaaataaatttaaagtaattactttcagaagtttattgttttataggactgttgtaagtatataggatgcaaagcatttgttaatgtttgcttgttaagctcactgaaggtagatgtttatacaagcccagaattattttctttcttccctgttccaaagtacttcaagctaatcaaggaaataattcactggtggcaaactttggaaattgtttcataagaaatctagatttaaatatgctgtatgattttcattttaatttagtaagttaaaggggaagtttatataaaaatgatatgcaatttaggatcattttaaagttgagaacttcatatatttcaagtctttagatgtgaataatttgagcttggtgtatacatttcttgtgacttgcgtaacttttaaaactaaaagttagaataaaatggaaaaacatggattttgcatcattttatatatgtgttaaatactttatttatttatttttttggataagaagaagaggaaaaagagaagacagataacagaaactgaagctttcccatgcacacgcaggcatgtggagttggta

SEQ ID NO: 13996 - DNA, 1035 bp, Homo sapiens
ctattcaactttgccattatagtgtgaaatcagccacaaaataaacaaaaggttgtggcagcattccaataaaactgtatttacaaataaaggtaggcaagatttggcctacagactattatttgctgacctctgctctagagaagagggacccaattggtgactttttttttttttttttttagaaatagtctcactcttgtcaccgaggctggagtgcagtggcgtggtctcagctcactgcaacctccacctcccgggttcaagtgattctcctgtctcagcctcccaagtagctgggattacaggtaccgaccaccacacccagctaatttttgtatttttagtacagatggggtttcaccatgttggccaggctggtctcgaactcctgagctcaggagattcatccgcctcggcctcccaaagtgctgggattacaggtgtgagccactgcgcctggcccagttggtgatttttaggcaaaaaggagaggtaattaaactaactgctgaactaggacagtagaagaggtaatgaaggaagagatagattggacagagcttttgaagtagacattatagatttcatgaaaaattcaaggaaaaaaataagtcgtctttcatattctggagcctagatggagctatagataatggtggaatcaagatcccccaaatattggcaggctggaatgatagatcaaatatagttaacataagttttataaaggtcaatgtatgatcttcgttgaaaggattcaaaatggtgtacttagcagtttacattcagaaattatttgaagattttagttgactactctcaagctcaattatgagtttgaagagacagcataatgaagcaaaagagtattgaaatgatctcagaagaacccttggaactataaaactagttattccattggatccttaaaataactgctgaagaatgtaaggcatgaacttttctctatagagacagaatatttgggaattcagatctaagtttctttcacaattggatccagttggattg

SEQ ID NO: 13997 - DNA, 1054 bp, Homo sapiens
tatacatatatatatacacacacacatatatattcaagtgtgtttttattttgattttattttattttttgagatggagtgttgctctgccactcaggctggagtgcagtggtgcaatctcagctcagtgcaacctccgatccccaggttcaagtgcttctcctgcatcagcctcctgagtagctcggactacaggtacgggccaccatgcctggctaattgttgtatttttagtagagaagggtttcaccatgttggccactgactgtgctttggtttggcttataggaaataatttttatgaaccaaaattacatataacattcattttaagagaataatatgaattatttatgatgacaagtgaaccattatgtaaaatgctactgtcattaataaaatggcaccttatgatgtgaaattgcaaaatgactagcttacttttaggaagtcaccaacacactgggataatctgattgacaattacatcatatttttatatttaaggagtccttgctcctgtgtgctgtctaaaccactggtggatgaatacttttaacaattcttaatatatattagtgcagtgctgaagttatcaaagtgggtccgaagaataaatatatcaaatagcagtaataggccaggtgtgttggtcacacctgtaatcccggcagtttgggaggctgagataggcagattgcttgaacccaggacttcaagaccagcttgggcaatagagtgagaccttatctctacaaaacacaaacaaacaaacaagcaaacaaaaaacttggccaggcatagtggcgcacacctgtagtcccagctactcaagaggcagaggtgggaggatagcctgagcctgggagacagaggttgcagtgagtcgagattgtgccactgtactataatcttggtgtcagaatgagactccgtctcaaaaaacaataaccaaaaaacccccaaatagtagtaataatttaaaattagaataaaacgtgagcacttatgatgtattgtttttcaccatttatgaataccatttttttttaag

SEQ ID NO: 13998 - DNA, 1023 bp, Homo sapiens
tcattcgcctctcgctttcccatggcagcatgatagacgctcaatcaaagaaccccctcctctcagcaaagcaacaattttgtcaccacgagcaaatccaattgaaaagtcccttggactgagaggagaactccagttgtcagaatcagcaaacagaatgaaaagaactaagaggagtaaattggcacctggggccgccgtggtagcctgtgataggctgtggcattgtgttgggtagacattcagccattttcagatataatgggagaaattaatgcaaatgagtcaatggaatgaaatgcattttaatgcagatttgagggactatcctgaactgcttgataacaagtcgctttaagaaaaggcttacattgtgaggactcattttttccccatttcttctcactagtgcctcataagggccctttgttctctaagtaaactctttctaaactattgacattgctcatttatgtgaatttcagattttttttttctccctgacaaagtagccttgggtgatctgggaaaacgttaattgcaagaggacaaggaaactggctgaaacaagaaatgcagtcattaagtgtaatgttgcagttgtccatgcctcattataacatgcatacaaggcaataaaatgcatgtttcacaaacaaatcttttgacaactatagttcaagagcctccagctgtcctgcttttttacatctatttctcttggtttagtaatcattattgaagctaaactttaaattcccagaacagtccttcatattatgcaagaaccatgaagatattagagttaaaaattgtttactttaatatttaaaaatatttgctttccaaagttaactggaatttctcactaatgttttgttttgaaaatgacacttaataatagtgagggcagcgtgggggttggggggaatgaacttaatcccaaaaaaggcactcttttataaaccaatatttaaaatatttagctcccttaggctgtctttccatgaagaaaaaataaag

SEQ ID NO: 13999 - DNA, 1045 bp, Homo sapiens
tattagtaagtcctagtacagggaagttaacacaaattccaatctaatgagagtggtgtcacagcaaaaaccatgtagtcaaggaaagatcagtattgcactggagggaaagaggcacctggctattctgtacatagttttgttgccataagtctttgagttctgagttacttaatgcttacatggaatttactagatttagttaattcagtttcttatggcctttaaaaggcaaaaaaacttaatgaaaacaacacctactttagggggacgttctgagaaaataaattacgttttctacccaagcacattttggtacacataattttcttataataaagcctattatgtcacttagttttaatttgttacaagagcatacataaaaattaatctttaaatgcgttctttccttcttgagcttcagattgaagaaaatgaaatgttactggattacggggcatgtgaataatataactgatagaattaaaggatgatttaagactagcagaatgatggataatttcagctgatattgtataataggataatttttaaaagaggtgacaaaatagtctgattaagagccaaatattttaaataccgttaacttactattagaattggtttaaaataacattgttgatactttagactgttcggtgagtgtgaagatttcattgcattcaaaaatgaaaacaagataagaagtaagactctggtagagaaaacgtacgaaggcaaggatttcaggccttgtaatgaaagtgcatatctgccaagttcaggttataatcttttaaactttttattacttaatatgacacagtgacatttaaaatatggagaaattgaagataaataatatggagtgaatggcagaattgatttaaaattttaaagctgtactaaaagtattctaatgcactgaaggacatttgtaagttatacattgtttataggtttctgatgagaatcccaaagcataatgtattagagcttgcctttgccatgagggcaaaagaatattgtccatagaaaatag

SEQ ID NO: 14000 - DNA, 2074 bp, Homo sapiens
cttaggaattaagactgttatttctccttttttattgcttattatagcatcacccaaaatggaaacaatgaattagcattaactgatctaattctttattaatcaatatattaagaaaatattgcattaaaataacatctaaagttataataccatactatttaacttttctttaggtatttccaaaattaataaactcaattatacataggtgttacatgtcaaaattagccatggtaactctcacttctataatctgacctttctaaaaacctgaaaatcaaaagtttatcttgaatacatcctaaaaatagcagtaaaaagtgacttcataatggtgttgccaaccttggttgtgaaacattttactatggactatttccctcatagattgtgcccattaaaaatggttctgctaaaatttatagtgtaatagtgactttgagaaatacacaggaaggaaggaaatgtttggtcaaattactgcttaattattccaaagctggagtgactggctttgttttgcgcccttttactgaataacttttgataacaatcaaactgaaaagtcaagaaattaacttttatggaaattgagtcatgccttaaattcatttttaattcttatactgcttatttagtaaccaataaaactaaaccaagttgtgctatgaagtgaaggatcataacttcaaataagcaattccattttctccattatccctacacttggctggcaaagagtctctaggaattttttaatgtattatttaaaattgaaaatactaatgttcatactaatatgatgttagatttttcagttatgtttactggcaataacaaaaaatttaaattcagttctgtttactgcctatcattgtgttattttttccttcctctgtcagtgaccttcaaataatcttaataatataaaggaatgtctgtgacaactatattcagtttagacttcacattttacaactaagacaatgttacatataaatacataagaacatatcatagctaatgtatatatctttgtgtgaatatgcatttgtttatatatgtatctatgtttatttttagagacaaaactttaaaaccaatacaaagatattaaatcattttgcgattgtactaagacagtagaaagtgaaatgaacataccattatcttttaaaaatttatatcacagccttaattacctggtttgtctatatggccatggcaccagaataactgttatctgtctgtcttcttcagtttgtcaatttgaggtggcaattgtttttcttgaagagacttgccctgttgcccaggctggagttcagtggcatgcatttatggctcactatagcctcaagctcctgggcttaaataatcctcctgcctcagcctcctgagtaggtaggattacaggcgagcacctagctaatttaaaaaaaaaaaaaaaaaaaaaaaaaaaaaaagcttgtgttgagatggagtcttgctctgttgcccaggctggtctcgaacttctggcctcaagagatcctccttcctccatctctcaaagtgctgggattataggcatgaaccactatgccctgctaggggagcattcttgtagcacctttcagtgatatcttttggtaagcaagatggcaccgatttcacatcacttttggcctagcgatatgtttgtaaagacctaggaacaatgatctttctaacaatggcctgtgttgatgaatcatcaatttagtttcatagaaaatgacagtgacctattttgtccctgtctaccataatgccttatggttttctgaagaagagttggatttgttagagattatagtgccttttgaggacatgtacctagaaagtgtgttctagaatggacagcattctgatctaatacaatgagcacactgactttggagtctgattaacccaagaatgagtcaaaagttactaagcttttaaaatccgtttccacatctgtaaagcatggattataaataatgacttcctcaaagggttggtatcataactaaattatacggtttctaccatataatatgcactcagg

SEQ ID NO: 14001 - DNA, 1030 bp, Homo sapiens
ttatttttatacctcttaaaaaaggaaacaaaaaaaaaaccttaaatcaaacctaaattattttgtgtcttttatgtttttttccattcattctttaaatgccagctccagtgacactttctctgtgaaactctccctgcccagtcactctgagcaagagttaagtataccatagaaagatatttaaatttcaatcactcctcttaagactccttcttataatctattgtaaccattccttcttctctgcctttcctactaaaggcaatgctcttgggggcaggtatcgttggttatcgtttctgtattctggttccctggtacaatatctgagccataagagtacaggagatatttcttaaattaactcaatcatcctataattactgttatcacattatttttatcttacatttttggaacctctgcctgtcctttgataggaaaacataagcggggatcttgatcttgtttgtatatgttagtgactaaatttcatctctttcttttctgtaggaatattaagtaccttttcctagactttagttataagtttatgttcagaatgagaatggaacttgatagtgattagccagttttcaccgtattttgttcatcttgagttgccttttattgttttatgaaggcatcactatggatctaatacagctatctttaggttttgatgttagacctccaaatcccttacatgtcataatctttctggtgatagtgttgtaactcctttctctgtgcaggaacgtgtgtacgtctgtgtgtatagccactgactggtcttttgaagcaatgcctttatctttgttgttatctttcactgtcaatgccagtttcttattattgatccttccctctttcactgtcaatgccagtctcttattattgatccttcctgtgataatggcttgagggactttgaggaataatttttaaaaaatatttttggtggaagaaatcttcttactttgaagaaattagataaaataatttcaactttggctgacaaatcctg

SEQ ID NO: 14002 - DNA, 2037 bp, Homo sapiens
gtgccactgattctcagaccttggaaagtaacttaactactttatacctttttttttaaggaaaaaatggataataattggacctaattatagcattaaacacagcaaaatgcctgccccttataaagtctcaaaacatattgaaaaaattattaatggaaataaggaggttttaagaccagaactgtgatttggattctagctccagctcgccctcctactcattagctgtacgaccttggtcaagttacttaaactttctaaacctcaatttttttcactaaaaaagagattaccggctaggcatggtggctcacgcctgtaatcccaacattttgggaggctgaggtgggaggatcgcttaaacccagtagtttgagaccagcctgggcagcatagtgagacctcatctctacaaaaaataaaattagccagacaagtggcacatgcctgtagtcccagctactcgagaggctgtgcttggaggattgcttgcagccaggaagtggaggctgcagtgagattgcaccactgcactccagcctgggcaacagagcaaaaccctgtttccaaaaagaaagaaaaaaataaatagagagagatatcactgggttgagaagtaagtaaaatagatgttcacatacttacttcccttttgtcttcaatctatagcaaggaatctggagacttggaaggagggagattgaaatgaaaagggtgtcttagaatggaaacttaattcagattcttccattttgaaagtcgctgaagagtcttctaccacttctattttcttgagtctcaaagatatagttaagcagctttcgactgaaaatattagaagttcagttcttcagtaaatacatgttctaacatccttaaagtataactcaaagataactgagaattctggacatttaagtaaaactgctaactagttttactctttttcacaatttctgcttaactatatgctacttttggaacaagttaaccagtgttttgttatgattgtcattatttcagttaaaactttaaaaatgtatttttcttaatatgtttgatacttctcccattgaagaagtgaatttagttgaattgaaagaggctaccacacaggttaaaagctgctccaaaagagaggacctttacaataatattcttaggaatatagtattttgcagctctcatattagtccactgtaggctacttacctctttctttcattctgtcctctcctctttcatgaagagtcaggtaaaattaatgtaggtgctcctagctctagtgaccaattactaatatttcctcccaactgaatgtggcatattaacactgagagcaaagaacttagtgtctacaaaataaagttagggctagataaagtcgaatgatggccagccaccactaagagtatatgcctccttctagtggcatgctcagtttccatttaatagagggtgatattgaacatacagtgaccacggattgatcatatacaaacatctgaccaggttgaactctcaatttaacatctcaattttaaatttttacaagttgagtttgacaatattttttgttcaccctgtattgtataaaattattttcagaatttattgtctattatcaaaactaaaagtatcctttgactttgaggaaaataggaaccgttagccaccatcttcagaataatgtaaaggctgattgataatcatccatcttgtttttttcctgctgtctggattccaggggtgtgtgtgtgtgtgtgtgtgtgtgtgtgtgtacaaaacacttattttagaactcacatttcctttaaatacacaatttgttctgctttaaattatacttaattatttatttctatctacatcacattttgcaaactagagttgagcttaatatgtcatttattcagagaaatttactgggcggaaaagttagagtaaaatgcattgggttgggttatatatgaaatgttaacaagtattaaagtggtctcaataccacaatccggtaaggaagcaagatctaca

SEQ ID NO: 14003 - DNA, 1449 bp, Homo sapiens
tcccaagagtaagatactaaatttagtcatttaagtctgcttatggtgtttggagaggtgacatttttgaaaccctggatttggagacacacagcctgctttctttcttaatttacttttctatacctatttttattttaattttgaccaggctaagttgttctgtgtttatatatttctacttggttccccttaaacggttacatttcatctggggacttaaagtggagtttaaaaatcggagcaacttctctggaaaactcttttgaaattacagtgaaactgttctgtcactttaattaccatgaagttgcacagaagtactgaatttggcaacagatccttatatagaaggaggtgctggagtaggatgctgctattgacattgttctgttacagcaattttggatggacaaattgcagttgagaaaatttcatgactcggtaaaatgagcaatgatgacatctgtggatgcgggtctgttcatatccttgcagagcctttagggaaataaatatctcggaacattcggtgaagtgaagctcactcaataaatcaacctgacacaataacacttctggcacatgagccctacttctcctcagcaccaactacccctctgtgttcctgtgctaccaaatggtgtctccccataggcctctaaatcaaatcatagcacacaaatacagtgagaatttattgggaattggttttgttcggcaaaaacattacttattagatgaactgaaatgataataaattttgaccctttaaggactgagccagttcagtcaatgtactgtttgatggaaggcatctagaattatcttaagggtatcatcttaccatgagctgttttaagttttattgggattacttttctaattttcagcttaatttttttgatcacatcacatggaatgtactgtctgcaagtaccacgttttcttttctaaatccttcagggtgaaactgggacatttgttaggaatatttaaagtaatgagcaaaagctaaagtgcgtgtatattaaagcagctttgaatcaacacaaggtaagtacagggtggttcaaaaattacaatatgcaactaaagatttctaccattattagtaaaatgatcatacctgagttaacaaagtgagaaaggagaatattatcattaataatattagaactattgacacatacgagaggattatgttaacttaggtgtatttggaatttctatatgtgaaaaaaaacaaaacaaagaaatataatattaatatttcttaccatggagaaataatagctggtttctatttttattatttctttcactagagatagtagttaacaaagaggatcaataagagaaaccagtttcctaaccctaagtgtccgtagatgtccttgggaaataaaatatttttctacaaggcaaagtttactggtgaattttcta

SEQ ID NO: 14004 - DNA, 1030 bp, Homo sapiens
agcatataaatggtctatgctttagagaatccttcagaattacacatatgtcaagaaatctaatttgtatgcatcagctttcattcctgtgtttgtgttggctttaagtagcagcacagcttttaattgtgaggttttaagttctgcaattaaaatgtaccctttttactaggagggttgagtgatagtttttgatttactttagacagtttagacaaattatatttaaaagaacataaagatgcacagagcatttcctgattcagagaaggtcaaagtgtcttacttgcattttttgaaagttttaccttgaataactaatgattcttcttactgtattgactaaacttctctaaagacatacaagcaggatgtcaaactgctttaaaacatcaacttctttgaaatcaatgaccaaatgaccttgaacagaatagggaacatgatattttacatctcatgatgttttattaaaattacttctatgaaggatgcagaaatagattacattagtgcctccaaagatgcttatatttctctttttattagttatgtgtttataaaaataatgaaaattctttgcaaactactagaaaatttgtttagagctttgatcatagcaaaagtgtagtagaaattctgcagacagatgtttaatttgatcaagggagaccataaaatggataatcctggtcaataatgaaagttgaggtcacagaaacaggtttgtggaataatgaccacaaaaaaatctcatggagacctttgagaagaagcacagtaaagaggcattacaactatgaaatagaatttaaattaattccaaaaattctggggatatctgtgtaagccagaaagaaaagcatttcaaagacacagaaatataaaagaaagcaatttaagatctgcttggtgtaagtgggtatggtgaagacgttggtccaggttgggtggtgatgtcaaggagagagtaatggtcagatcacaaagaatcttatgtgtaaggatattaagcaggggagatgtataa

SEQ ID NO: 14005 - DNA, 1034 bp, Homo sapiens
taagttacattcttcctgttaaagtttacaaattgtagttccatatgacaaaaatatctctttgcccgtactctttttgtaaagtgtagtgtgatagtaaggacactgctttggcattagataaacctgaattcaactcttggcctcattcatgctatttaacctatctctcagctgtaaatggattaattctttctaagtgataacgtttttgtgaactagataaaaactgaattatctagtacagcgcctggtatttaatagtctctcactaagttgtggttgtcattatattaactagtgttaacctctgaaaatttgtgaaattggtaacattggtcttcaaaatcagctttctctttctacatttttgtatgttgttttctttcaggacagtgattcagttctctgtctacagcatacacacacacagcattgtctactatggccttccagaataccagaaaaatatttaacattcaccacacctgtctcaatctctttttcttgaggactctgaactttcgggaattaacactcaaaaagtgtggtgcttaaaactttacctgtttagcttcctttagaactgagaccttcatattagttaatttttgattatattattactccatccattgcatcctttctacctctacacttataaggcccagtagttctggtattgaagaattatatcatttgagcacatacatttgctgtgaagttattatcaaataagactatgttccatataaaaggcaacactatcttctttggaaaaaataagaaattgatgttactatatgcttagcagcaattacattcatttaaaaaaatattccttatatgttgggtagagtttttgcttaagttttacttattaatttgtggcaccattttcaacttaatttcaaaagtgcacatcttaaacactattaaaagattctaggctgggcatggtggctcatgcctttaatctcagtactttgggaggccgaagtgggaggatcacttgagcccaggtgttcgagaca

SEQ ID NO: 14006 - DNA, 1069 bp, Homo sapiens
tattattgaaaaatggcaatccctttaaatattgatatgacatgcctcatagaacttgtgcttttgagtcttgtatatattcgcctaggtgaacactagtctatttattagatgacttgcatgagaactagtcaaatgagatcatattataggtttgttcttaaacctattctgtgctatgattgctttattttcccagttgtactgtctttgagctggaggaggagaatacatcctccctcagaatgaagaaaggcaacctcattagtggaaatataggtaggcatctgtggatggagttgataacgcaagtctagatgttagaggagttatgggaactgcagcttgagtctgaactcttgggtctgactcacctgcattgatcactagctcgatcacatcctaagaacttgggcaagtgactcaacacatagggccctctggtttctttatcctaaacatagaatagtatctaacttgcaagactttgtgatactaaataattttatgattatgggtaaaatgtctgactcttagtgagagctctataaataatagttctaactactaaaatagtaaacttgggttactttaaagttcaatttaatctcttcttctctgtgaaagaaaaataacatagtaggtactcagttaatatttttcaatgaataaagtccattatatttgttagaccattgttaatatgtttaagatgctagacatatcagaaaagattttagtataagccatgcatgaaacctattggaagaagaatgacttaggcagtgatggtatgaaagggcagtgatgacttttcacatcttgcaaaaagctgggcttggggcagacccaagcaatttgaggctgcctgactgtgctgttatttagcacttaaacttatatggaattgtgacttaaataccagtcacagtttaggagatgtagatatttgaaatataaatttggtcatgggggtcaggataagtgcatttgaggttttttcctttttttccgtgggacacaacattagcctcttcttattaagaggaatctcaagttaaataatagc

SEQ ID NO: 14007 - DNA, 1757 bp, Homo sapiens
cccatctctacaaaaatacaaaattagtggggcatcatggcgggtggctgtaatcccagctacttggtaggctgagggaggagaatcacttgaacctgggaggcagaggttgcagtgagccgagatcatgccagtgcactccagcctgggtgacagagcgagaccctgtctcaaaaaaaaaaaaaaaaaaggaagaaagaaagaaagaaagaaaatatttagtagccacactaagaatgttaaaagaaacaggtgagattaattttaatcatatattttatttccttaataccttaaaaatattattatcttaagatgtagtcaatataaacaaatattcaatgagatgttttactttcttttccataggaaatctttgaagttcaatgtgtcatttacactgatagcatgtgccacccagacatttcaagaagtcacatttcaggtgctcactagctacatgtgactagctgttgcgacattgttgagtgcaggcctagttccctggtgtgtccctagaactaccaacacctagagaagggtttgccattttctaagagaacaataagtattcaataactaatacatcaactggcaggatcacattgtatcttgacatcttggtgtgtggagctgtaatgatggcaaagagaaccagagtgttgtacttgtaacagcactctacacaacttacagtcctgggagctggcatatgggccatccacaactctatgacttggacagttccactgatctgtgccatggtttgtccaatctgtggagtgataaggttgaactatttgatcttcaatgtcatttccagttctaacattatatatttcctttctcctttatatgtcttatttttaataattttgttttactttattcattcataatttttgtagacgtatgcttccatttctctttttaaaaaacttttattctaaattcaggggtacaagcgtaggtttcctacacaggtaaacttgtgtcatgggggtttgttgtacaggttatttcatcacccagtcatcaagcctagtacccattagttgttcttcctgatcctctacctcctcccaccctccacccactaaaagacctgagtgtgttgtttccctctatgtgtccatgtgttctcatcatttagctcccacttataagtgagaacatgtggtatttggttttcttttcctttgtgagtttgctaaggacaatggcctccatctccatccaggctcctgcaaaggacgtgatctgttcttttttatggctgcatagtattctatggtgtgtgtatatatatatatgtgtatatatatatgtgtgtatatatatacacgtgtatatatatacacacatatgtgtgtgtatatatacacgtgtatatatatacacacatatgtgtgtatatatatacgtgtatatatatacacacatatatgtatataccacataccacattttctttatctagtatatcattgatggacatttaggttgattccatgtatttgctattgtgactagtgcagcactgaacacgcacatgcatgtgtctttataataggatgatttatatatattcccagtaatgggattgctgggtcaaatggtatatcttctcttttatttttcttcacatattacaatcttgcctttccccaagaagtagagtccaggcaaaaatgggataaagggtcacatgcccctgatctaacagcttctccttatatctgtcacatttagcaaga

SEQ ID NO: 14008 - DNA, 1039 bp, Homo sapiens
ggagccagatttttatggactgccttcttggcctaccttaccctgtagcttctggatgtgttcattctatgcaaagtgccagctggatatcaggaggagagaagtaggggagagtgaggtcaggacatttaattctcttccttccttcctgctgccttaatgagcagtggcttcatccctcttccaaaatacacagttcttgcagggagactttcctatagcttcagctccatgttccaattgcagcaactggttgatctcctctcccttttaggcctcccacacctggcagccccaggatgccaccttctcttttattggtttacttcaattctgctgatactttagcgaatactccctacatcatctaactctctccagttaataacatctgaggggcttgtgttctctatagagaccttgatggattcaggtcccttcctgggagtttcatgattagcaaagatgtatttaggaaactagaatgagaatctaaactgaaaatgtgctttgggaacttgctatatattgatagacacagaatagcatccaagtcaaaactaagcttctttattgtccacactccaaaggagaatccactttcaactaatgcctgtatttactttacctttttgtttgtttgctaactggaagataaaaatatgtttagaaatttagtggtgaatattagctacgatccatgcctaacctggaggatggactgggcagtgcaagagtagagacaagatgaccaaataggaagtggcttccttgaagaggcaagttatgatggtgatttggacaagggtcacagccccggagatgataattaacaacctacagtgacttctcacaacaaccaaagtaaatccaaagtctttattgggactttcagggcttgcatggcctgtcctttactgtcttctccaaattcacctaccatcaagctgcatccgtaataacctattctctggtgttgcattcactgagctcatttgtctgttttttcattatgcaaatctcctcttacctcttcaga

SEQ ID NO: 14009 - DNA, 1026 bp, Homo sapiens
aaagcagaagaaatgatgtggagaattgtagctttagccaaaagaaaaactctagttgcagacctaggaaaaattaaatatcatcccttccctctctcactcattcattcatttatttttcattcattctgaacatactcattgagtccctgccatgtgctgggtgattattactcatgcatattactctggcaagaatgtttctttttcttacttatcatgtttatgtgacattcagcaattaatggggcattttttcagagtattagggaaagttcctctccatctcttccttaatttcagtctgtcaacttgtttaaggacatatgttgccttattttatttttttcattttctgagtacttatttgatgttgaatataactgagtccctcctgactcatcttttaaataataataataccaataataatataaaatgttcatagttattacgtagatcaaatttagtgattaatgtgtagagtttaaatcttggctcattgtagacagcaagtgacaactctgttgaagagtctcaacgtaggtaacacatattctatattattttttaaattgaatataatataattgtattagttcttttattacatggcatgtggcaagaggtttgaagaattgtgaactattccatatagaaaaacattagtaagctatttctccttgatatccagtaaattaacagaatttacataacaaaatttggcaagtgtttgatataatttctgataaatacttagccttgtattttgagtgggggaagtgtatttcaataattatgcattatttttgcagatagtaaaacgtcaagacaaatagccttcttttgtttactgatttgaaatactttcatatgatcatttatcatttaacagtgcttatcttataacgaggttgtcattgaaataattttggtttgttttttttcaactttatgataacttggcttgaaatgccttttcaaacaatcaagaaacagataaattttatctacaattgctttctt

SEQ ID NO: 14010 - DNA, 1080 bp, Homo sapiens
attctaaagtcaaattaattgtgtttgaaaattaagtccaaagtcattctattctatttttcaaaaataatttcctaagatcaggattttatttatttgcatctagaaactaccatatgttttgtcttacatttaaacacacacacaaaaccaagcccgatgatgacttcaatacatatttatcttatgtgatttgtagatggagattatacttggtcaaagcatgtatataaaatagaaccacaaactattaaaacttccccagtctaaagaaattttatttaaaaggtacaatttaaactaaaatatttaagtttttgaagaggttaatgcttttaactttcttacgttagtacataaatgtgaactgaatgtcagattagacaactttactcagtattgaaaagaaaactactggtcttcagataacaggatttaagtgaatttttgtgggaggggagtgaggaggaagaaagtagaaagggggtttagtgagtacaagcatggcaacagtataagcataaggcaacagccgtagtgatgtctggataaggaacaccagaaatgaacctgaaagactgggggccttagagaccagagaagccaggatggaagtgaggaagagtgggttactcaaagatgggaaccagcaggctaaaaggaaagatcaaaccacagaggcaccatgtaatgaagacaaactcagggtttttcttaactttgccttgagcctaccctaaagtctgtgaaaaacaaagaacattttaaatagtctgtcttattaaaatgatttgctttagagatggcacattatgcttacgctaatgtttcatggttgaatacatgcttttgtgctacaaaccgtggtttatagtttagaaaatataaaagttgaaaaagatgtttaagaacattattttttattaccctactttatatttggatgtcgatggcacgggtgtaactggcttaattcaccaatgaagaaatgtaggtttcacagaggttaaagaactcacttaaggtcaggaacagtaagctgtggagagagaagcagacacagatcttatcactctgtcc

SEQ ID NO: 14011 - DNA, 1034 bp, Homo sapiens
tttacctctgggataattttaggagacaagacaaaattaccttacttggaggcaggccaagagaacaggattcttacccttgttgttttattttcattttaataagcattacagagtttctcatgaatgacagtgattgcaaaattgattgaaagctcattttaattcagacttctccatacaatattttttctttagtttacttcttccagtccttttgctctgtttcttgtatttgtatacatctcagtaaacaagcctttatttgccttggcaagctctaggtattttattcattaagtgaacaggccggtttcttttctaacagactggtggttaccatttcaaacagctccctttggtctattttggtcttattgtgactctctgagccaacatttccaaagttttcaccagcaaatatgtaggaagaacaatgaattttggtggggagttgaggagaaatgggaaaaattttggcaagcttgcttttctgtcttcttatctgtttggcaaattcctgggctgagcctcaacactaaatttctctccctgcacatggacaaacactgagagaaagacaaatgtgggaaaagggagaagtagaaaaagcagaggtaaaaatgcaatgcctgggattttcagaatgccgacaaatatgtgggtatctattcagcttccaaaaattatgcatcttctctgattcccaatgcaaaaatgtgcacatgatttctttgatctcaaatgggtattattcccaatatcgtattaaagtcccaatttttgaaatgggaaaacgaaaccaatttaagtagtgcatcagatgccacttaaatgttaaggtgggtccaccctttataaaatgagagaattggtcaaacataggctacagcggggtgcggcgaggcaacagagccgttaaaaagcgtgtggaattctatgctgaattcttcaagttctgacttcattcatgggactactttcttttatatagatagtgattccagaaataatgtcccataatagtatttcag

SEQ ID NO: 14012 - DNA, 1069 bp, Homo sapiens
tgaggtcctcagcaggctttctccctcattgattacactcattcatctcagatggaggggtggtcgcgaagagcaaggaagggactgaactgtcaggactccagcctttgttaagcagcgggtagtcactgcctctgaactcggctggctcctgcttcccatctgcaggatgatggattgctatgtttaatacatttgagcttttgtctgtcatagtgtggacagacagtactatcagtgatttcaacagtgattagaaaacagtttcaaaccattcctattggccagagagcttccagaaatgtctgatgaaacatactcattggtactctcgccatgtaaacgtgtagtttaactaggcggagattgtacactcactgtttaaactgatgcagaagcccactgagaatgactaaaccacatatcaacttttgaagaaaatacacaagacaattttaagaatctctggggtctcaaactaaaaattcatccgaagtagtcccaagtttcagatgaatttgtattctttatatagtaacaacatgtgcttgatggcaggactgtattccataaattatgatgtcagttgttgctatgctcatcagtattgagctatctagcaatattggggtgggggttagaatgtgaggactatgtgaaagcagtaagacaggacttggcatgtgctacgctgggatttgctgagctgtgggggctttgtggttcacaagtccaaagggtgaatgatttcaacaacaagaaggccactatataccagctcagtattctccctggagtgtcttattctatttacaaaactgctgctaataaatacaattagctaaaggaaaagaaactattcttttaagccattaataatataggcaaagttttatttcaagaagggggcataataaataaatcaaaatggccaataacatcattatttactagttataatgtaatatactaaatgtaatgtaaattataatgtaaattataaaatgtgtttaaacatggagttttaactgtagcagtaaataggtaattattaaaataataatccaac

SEQ ID NO: 14013 - DNA, 1048 bp, Homo sapiens
ttcttacatacccttgtcatccaaattatcataacccacctttattttttttttgaaactctagtgaaattgtgcatgaaatagaaacattttaccatgaaatttacctataaacatctagccaaaaacagaacaaactctggatttttgagctattgatatttagaacagatcccttaaattcaaaattgtgaaatataatacaattgtatttaattacagtattttattccaagcttaggaaataaaattaaaatggcatatttgatctggagtaaacttttttgctctcttttttttggagagtgggttaaataagggcccatgacaggaatgctgtttgtttttcacaaaagttgtttgtgatttcaggtacccttgggaaatctcttgatcagtttcacatctgttcctgtcaaagtgggtgctaagataccggtcacccagcaaccatgtccaagagggaattgggccgataataacttcaaaaaggaatgacagatgctagattaggatgaaagacaaaacgcatgaaaaatgagcttgttagaatcaaaaatttgttcaagcacctttatgcaaattaaatgaatattgaatatttgcatgcagtaatttctactttttcatttgattgaaaggaaaagaatagtgcatttaaactcacaaatgtgacttctttcttttgtactaattaacatacaaagcagaatctcttttttaaaaatcagattagccacctgggttcttagagctccactaagtatattataatgtttttcttatgaaaatggtacattttaagaggacttggtttatctaattttttaataataaacagtgtcatgtgaattaagattattttagatgaatataaatccatttcttgagaaagcctttcaaaagtaaccttatcctgttgtccttgaaattggttaatgtacattaataaaagatcactcaagatgagttcacaccaaaagcacagacttctcattgactggttaaataacaatgcattaaagtaaagcagagtggtgtgccctaa

SEQ ID NO: 14014 - DNA, 1016 bp, Homo sapiens
attactgcatgcagcagtgtagaaaaattttactttttaaaagaattataaaaccatagctttataaatcagtggaaagtggcttacagagagaactatcagatgtgtttacatcacatcttattcactttttttaacagctctaatgctttggcattgctatgttcatatttatgtattccttatttatagctctgatagctttaattttctaagcagtctgtctatcagatgtgcacatctgctgtgccaggttgaagtatagtggaacccatcagtagtaatgtgtagtagttatgacttgttgacatttccattataaactttaattttgaattgtttatgcattataactgtggatttatattgtattgggctgaaagttgacaggatttcagccaccacttgtgaatttttatttagattcattatgtatatcagaatcttgttttttgaaataagagcatggaaaacatttcttgtaatctactcttgaacaaagaatatttagtttttcaaacagtttgttgggcagctaatagtgtgaaccaggtcatttttgtattgagtaaaaaaatcaaactttgagaaacttggattttaaaagtaatgacaatgcttaggttagtattatttgtaatttgaatcatttacatctaatgagaatgttagttgagaatgttttcttaaagttttatatcctataaataacggaataaaaaaatttgtaaaatgaaacaacaaacatgcaaaattcctatttacttttattacataaaagtaattttagtgcttacctaataaatcttgaatggttatttaataaattattagatgggtgatgtgtttcaaaagatacttgctattttttgaagaaataaggatttccagtcattaaacaaaactaaacaatcttattagatgggtgatgtgtttcaaaggatacttgctattttttgaagaaataaggatttccagtcattaaacaaaactaaacaatcaaatgttctatatta

SEQ ID NO: 14015 - DNA, 1029 bp, Homo sapiens
ccagacgcttataaaaccttcagatctcatgagaccggctcactatcacaggaacagcatggaggaaaccgcccccatgatccagttacctccacctggtcccacccttgacacgtggggattgctacaattcaaggttagatttgggtgaggacacagagccataccatatcagcccagatcaagtagtgacagagtagggatttgaatacaggttatagtcactattgtgttatttcttgacttttgtactattaaaaaactgtagccagtgaggcttctacccttagtacccagaactccttttaggtatagcaattgtttttaggtaaatttatattgagtttaacacctgtgtgattaaagacaactttccaatgtagtatctgtagccatgtcccctaatggctattagtgttcatggttagtgtgttgaagatgagccaggtacataacgcggcacattttctgcaggtcagcagtaaggtttcaaggtacagttatggaggaaagaagaaaatgacacattgataacacaggtctttattcccttttgaatgagacagtttttaaaagttgatttataaatacaaaaatacattctccaaagatagtatttccaaactgttatatacccatctactcccaacatggatataagttttttaaaaaaatagttgtatataacatacatatctgccccagtgttacttcacaggcctatgccctacgggaactccactctcccagccccactttttctcttggttctcccacattcttattctcccacatccctacccacgtttgagctggaaaggatgtccctaccctaggcatgaggtatattttattctgggcaccacacatttgccccatagataacaatacacgtgatgatgtcactagtactacctttctagtatttacatacttaaaagtagtaactagaacagttatcactggaactaagaattttccccacagaggtgaacagaccaagaactaaaatttcaggaaacctgttta

SEQ ID NO: 14016 - DNA, 1035 bp, Homo sapiens
ttcagatttattgcataaaatcatagttctgtatatttaacgcatgtcatacacatggtttttttctcttctatgtagttttcttttattgtcttaatttgctcaaataaatgggtttaaatgcaaacagactgttagtatgagttaatacaagtatgaaactgaaaatctgtgacagtcaagtatattattagacttagtgagatttaagtaaatatgtgtttaacattttctgaaatgctttaagtaatgttttaggaaatgttttagaaaatgctttaggtaaaattcccttaacataatagacgtaattctgggccattatatttgggcaacttatctgataccatatttattatgaagagaatactttcagttatttcttatgatatgcgctaagtctacttgatatggcctatttctgtattttataattacaatattataaatagttggaatgcatgtaacagttttttattcttctttttccatcatttatattcattgctctggagtctcactataaaattatccatggagagtccaggcctttggatagtgttaagaggtgaaataccataggaacttttgtaatttctaatagcagaccctctttatttgggtttttattttttataaggaagaacctttagaattaataaataaaggtccaaagggaactagtcaccataccacatagctaatttgtacaaactagtactaaaaccctaatctaattcccagacctgtgtgtgtattttagtcagtaaatcctcatgttaatcctgaaaagtgttgagttctaacatacgtattcagttatatttatttatttgtttttgctttttgattgttttgtagtactttattatcaagagagaatgtctgtggtttggtttggcatgcatgttcttgtctagaatgttgaaacatcaacattctgtagtcttatgtcataatttactgcctgaatggattagtatccatgtatgcattttgattttgaaaggaaattgcctgataatacttagagga

SEQ ID NO: 14017 - DNA, 1050 bp, Homo sapiens
agaaataggttttaagtgataggacattatacataaatccagtctttacacttctgtcatcccttcttacctttatgatactttatgaaaccaaaaggaaatgagaagataaaagttgggtttgatttttgaaatacagatttagtattgccctaatatgtagccacttagttatatatgactatttaaatttaatatgtattaaaaattcagtttcttggtggtactatctgtctttcaagtgcccaagagaaacttgtgtctagtggctaccatattagagatcgcaaaatgaatacttccttcatcatagaaagctgtttttgttagcactggcctataagaaacactgctatcttctctcctattcagagttgtgtatatcataatgtagatttcaaaaattctctgatattaataatagttgtgtattgagtgaacagaagacttattagcggcatcttttggtttgcttctttcatagaatgaaatagaaagtggaaaaataatattttcagagcatcttcccttaagtaagctacagcaaggcataaaatctggtacataccttcaaggaacatttagagctagcagggaaaattacttggaagctacagtatggattcatggcgacaatgaagaaaataaagaggcaagtatataaataaattccttatacactaaaataaagatgatattttatatattatgaacacttaatggtaaatactatttgtgtaacatatgaggcttcacatactttaaagcaaatagtaacttttttctttttttttttgcagtgctcacaatttgtcaggtagttttttaaatctttgcgcatggcatttcatttaatattcaacccaacctataaaaactaggtagtgtactcttatttgaccaatcaggacttgagatttagagagcataaataatttttccaaagtctcttgttaccagtgtaagttatgatggagccatgaacacagcctgtgttttctgacttacattttttctacctggtattgagaaattaaagttgtggaatta

SEQ ID NO: 14018 - DNA, 1050 bp, Homo sapiens
cttcagctattagtgtttaccatggataatttatatgcattatttattaatgactgtagaattctgattataaatgatctaattatactatttgtagcttttaggaattgctattaacctacagtttgaatgaaatctgattatcatacctgtgaaattgtattataatttgtcaacaaactattatttagtgtctcaacctaaagtataaattctgatcttgaatttttctttttaggaaataaaattgtattagcctttttcttgtccccttaataacataattttcttcttttccaagcaaattgtttcttaaaaacttaattataagaatcttgatttcttctctgaggtgtacatctgaatacattcaagagaaaagatataccattgactttttctagtttagtggttaagcatttatgtgctaagagttttcacatatccttgtttctactgatttccttttatttcgttttttctttccatttagagaaacctatgtagaacaagaacagggagaaaatgctaatgacaggaatgatagagcgattcgagtagcagcaaaatggtacaatgaacatttgaaaaaaatgtcagcagacaaccagctgcaagttatcttcataacaaatgacaggagaaacaaagagaaagccatagaagaaggaataccagctttcacttgtaagtctaaatgtagaagtacttagtgcatgtttgcaaatgcgtgtaaaaataatcattaggcctatagtcagatgttcactttactatttagtattttcgtagtcctatataacttcatgtgatatttttgtatttttaaatttcacatagtttttaacctaaatatgttgtgcccagtggctgttaattttcccctcactatttgcaactggtttagcaatgaaatctcataaatatactggaacccctgcttctgcttaggtatgatcacatcaacagatttttgggttttgttttttaaataaattgaggccaggtgctgtaatcccagcactttgggaggtcagggcaagaggcttg

SEQ ID NO: 14019 - DNA, 1800 bp, Homo sapiens
gccaacgtattcctttattaatacccttaattctacgaagtcttgtgattggtctgtttaagtgtgctttttttaatagatctgaagggtttagtgactattgtctcgttttctatagccaaatagcttcttggcttaacttattcagtgtttttaaaacataaagtatttatgcccaacataaaacaggattttatgtttgacagagctatttacaaatgaatataggaaaaattaactttatctttctttaagattgatgttcttgaggaccctgccatcaggaatgtaattgtgctacaaacagttcttcaagaagtgagaaatcgcagtgcccccgtatataaacgcatccgagatgtgactaataaccaagagaagcatttctatactttcactaatgagcaccataggtaggaggaatattacgttaaatatcagaaaaccacaggattagcaaaattcgggagagggttcctgtgagtaatttatgacattgtcagaagataagtgatagatttcataccttatttaattcttacatggctgtgcagaagataatgctaagtggatctctctaaggtcacacaggcattgatgggctcaagcctaaaaccaaggtctgctgactcctagactacaataggtactttaatttccaaaatgttttcattttgaattggttttagcatgagttggaccatagaatcttggaagatgagatttgcttaagttcctggaataccatattatgtgaacaactaacagagggtaataaaatatatgagtttgtgaagtttctattttgtttaaaaatagaaagtagatttattcttaatggtctttttaaaagtttaatactttgcagctgattacattgagcaagattaggttaaggaatagaattctttttttttttttttttttttttttgagatggagtctcactctgtcacccaggctggagtgcagtggtgtgatctctgctcactgcaacctccacctcccaagttcaagcgattcttctgcctcagcctcctgagtagctgggattacagtcacgcaccactatgccaggctaatttttgtatttttagtagagacagggtttcaccatgttggtcaggctggtctcgaattcctgacctcgtgatccacctgcctcagcctctcaaagtggtgggattacaggcatgagctaccgtgcctggccaggaatataattctttgttgtgcttttagattcaagacctttgaactcagtgtgtggtctcaaaaatatgatattgcctattacgttatattacataaataatctatgatgagtatggtacttttattggattagatcagggcttctcaatcttggcattatagatattttgaactgaataatttttttgtggtggaaaggctgttttatacattgtagtatgtttaacagtgttcctagcctatttggcaggatcaccaccccttaccccccccaccaccaccaccaccaccaccactcagttgtaatgatacaaaatgccctgaggggtgaattcactcaattgagaaccattggattagagtgtagacttctggtaatgaaattccatcagattatgcacatttttaaaaaccttaatatctcaactttcttgattcttatatctcaaacttcaatgttcttgtaaagaataccagtaaagcccttgtaggcttcttattgttagtacctccttgaaatccagaaatagcaacatcacttgtttttcagtgcagaaagacccaagtttaaaaccaattcaaaaa

SEQ ID NO: 14020 - DNA, 1068 bp, Homo sapiens
tgaatatttgaaatcaggcctttcccggaaaatcatgcatgaaggatcattataaacaaacaatagcaaccagttgtctccccgaacttgtcacttttctcataaatgtctggcctggagctccaaaatcatccaaatacttagtagcattttagcctgagtacactttctcagttcctcaactctttgtatacctttccaccaatatagacattctagaatctgcttcagatgcatttgaaattttcacccccatggaactagtgattaatatcagagcccactcttgcagttggtaatggggtggcaatcaaacgttcagatgatgataaaggagagataatggataattctttttcagagttctcacttaacagctctgttgtggaatgttttaaatagtcttataaataatttgtttatagtattgttgttagtttaattgaattttatgtaagaagctgtccaacatcagagaaatgaaattcctcccactttctgtgtagaacaaggtctctgacagtattgattcatggaagtactaatggacttagaaaacattaagagaatgtcatttctcatagtgtttctgtttctgaaaatgaatctcctgaattattatctttctccctgttacttggctggggaaagagatagaagctgtataaacaaattctcttccatgctcaaagcaagtgttccatgtgcacaacctgctgcagactggggcccttctcagttaattgggtttcacaagcaataatttctccacaacaaaaaccacaacttgaagtgagttgaaaagagatcaatagtggaaacagtcgcctcagtactttttctttctggatttcatctctagaaatttgaagtgtttgagacagagtccaccctttgtgcaaggcgagaaccaatgaatggactccttgtgtgaattattgcatcttcttccaaagcaggttcatcaagactttcacagagattcatttttgttgagaagtaagggttaataggaggatagaatttggatccaaatctagtgataaaagtgtccaagcaatcaaaaag

SEQ ID NO: 14021 - DNA, 1044 bp, Homo sapiens
gtgacctaaatgtcaaatgatttaatacactggaggaggaaaaccagagcctacttctgagctactgacacaactccattcatagtgagctctttcacaacgtcatgattttagttgcaattggataagagtagcgtcccctctttcctacctaaaacatatgctttaaatgtatgtgcatttgtaatatgtgttctcttatgtccccaggtggtcaaagagcacatgtgcaaaacagaaccccatcctgcagttatgtgtggtaatgaaccacggcttaaacaatgaatacggatgcattaaccacaaattcttataaacaataaatgaataaataagttattttaatgggtacctagcagctataattttaggtactcataaaagtgactgattacattagcaggccttggtctaaagagtgcagctggctaacactagaaggctctgtagaactagaaagtgcaaccatggcctcagaatttaacaccaggatgcatgaatgttgagttcttttctgacacactagccttcatcaaaggtaaactcaactagccaccatcagaaattaatgaaccctaataatgtagagacatgcgtatgctcacctatgcgtagacatgcatacgtcaccttgcagttttattttttcatgtcctgatgcaggtttggcaagtgctgagcatcgttttgtcatgctcatcctaggcagcaggctttccttccctgcgttgctcctcagtgtctacctacctgctcctgaagccctggggctctatagcagttcctcctgtgttgctttttctggcttcatttgctgttgctgccaccccccacaaccccccattactagaccaccccctgggtagctgacccaggctccaggatgtccatcacacaggccccagtcacctgctttttgctcctaccaccagcgtgcctaaagggtttataaaggcctatcttgaaaagacccctcctgcaggagacctacactcaccctttcaaaacgccctttcatccatgccctcatgagaaattcac

SEQ ID NO: 14022 - DNA, 1033 bp, Homo sapiens
tgcaaatgggattgctcctgtctttacaactctgtggtagtgtgccatgatttagaagtccaaagcccttaacactacgtatgaggccctttgcatcacataactctttccatctcacttctcacaaattgtttccatcttcccgtggaccctaaatttcagccacactgaacttgttacatttcccaaaacagcttgatcaccaaggaaactaattctcaaaaactcagtttaaaaatgttcttctgcatcaggaaaaaaatagctaatgcattctgggcgtaatacctaggtgatgggttgataggtgcagctaatcaccatggtacacatttacctatgtaacaaacctgcatgtcctgcacatgtaccccagaacttaaaattaaattgaaaaatgcttttctgtgaagacttccctgcagtccccccacccatcagcctcttcttcctctctgatccaatgccaccatatggagcatagcatcacttttatcatgatttactgtatttgttggcccgtgtgtaatgttctttccaccttctcctcaagcctgaggccctccagtatgaaggctgtccttgcctggctccaagcacagcacatgtggcagcaggttcaaggcatattgatcagtgaaatgaagacatctcttccactatcctcatctattggtaggaaaactgaagcccggagtttgaatgattttgtccaaatttgcacaggagctaggattagaacttagaacttctgccgcctgactttggtggttccctttccacattttgatggctgtttcccattccttagtcaatattttcagaaaagtagaaatactcaaattcagaggatagcaagacatattttcacattacagacatctttaaacattggttacatcatttctgccctttctctgtttatcgttgttatgcctgacaaaatgtttgaagaataatggtgactactgacctgaatttcagaagctaagattttagacctgttctgtcactctctaattatgtgatctgg

SEQ ID NO: 14023 - DNA, 1050 bp, Homo sapiens
tttagtaattgtggagttattttaggttaatcttttcttcagcaaatgtagtaaactgagttgttaaagtatgtattatgtttaatgctttgcacaatgtatagataatcatttaatcattaacctaattaaaatataggttaatgattatataacctaaatggttttagaaaaagaacgtatttgtacataataatttcttataatcttggtataaaatatctagtcttgctagatgagtaatgtcctacaagaaagatttcattggtctgtggaataatcatttattctcattcttctcagtatgaaacagcctctctaatttatggggtgtgagcacaagtggactcacatgttattctaagggtttttggcctgagcaactgagtgaataattccaacatttttgaaattgagaagataccagaaggaacatctttttttttgtttgtttctttcagagaaaggttgatattaagaaacctgggtctggttttcagagaagatctaaggctggaggtagacatttgggagtcgtgatgatgtggatgggaaggtcatgatggtagctcagttggagcctcttttagctacagagtgagtttaaatagtggagaggaaaggttataggacagtgacaactagcccatgccaacatttagagtttgaaagaatgagaggaggaggttcaagcaaaggagaaagaaaggaggaaagccagaagaatgtcttggctgctgagtaaagaagctgttcaagaatggagtgataatttatgtcagttgctgctgagaagttgaggactaagaattcaccattagatttgaaaacatggagactattgatggctgtgatgagggcagtttcatcagagcggtgtggataccaactacattggattctagagaaaatggaatgtgaggaagcatggctatagctagaattaatttctgccctctaaaatttacatgtgttgtacattatgtatttaaatagcaatgctaatataacaaggaacattcataaacaattaaagagataaagtatatt

SEQ ID NO: 14024 - DNA, 1051 bp, Homo sapiens
cagggaaagagtcttaataaacagaggtgatagaagtcaggcatttcttatcagaaataaacacaatttgtgtttataaaatgctcttgggagtcttaagtacattgagcagcgttctgtggacttgtgacattggaggtgttttgacaggagcatatgtgtacctgtggaaatataacatgatagcccattctaaggaagcgtttgtgttagaactgtgtccggtttgccagtcattacagtcatgttaaagttcacaaagatggtacgatttataaaaggtactaggaagaacaggaaggcataatttgaatttaatattgtgcaaagatatttccaaattgcatactcttggggtcattcatggtcaaggtagaaaggggttatacaggccatcatgagactacactggcatttcacagcaattcacattagtaaaatagaaaattgctttaaaaattttttaattcatgcataatacttgtacatatttatagggtacgtgggatattttgatacattcatacagggcataatgatccaatcagggtatttaggatatccatcatctcaaacgtttatcatttcttggtgtcaggaacattctaaatcttttgtttcagttattctgaaatatacaattattctttattctagtcaccctactgtgctctatcaaacgctggaacttattctatttagtttatgtttgtttgtacccattaatgaacatctcttcatcctcccctctacccactcccttcccagcctctggtaaccatcattctactgtggacctccatgagatcaacctttttaactcccacatatgagtgagaacatgtgatgtttgtctttctttgcttagcttatttcactgaacataatgacctcagttccatgcatgttgctgcaaatgacaggattttatactttttttaagcctgtatttatgtaagcccttcaacccttatattggtcattacctgaaaaagccataatgtaatccatccatgatttgttttgtgtggtgtggaatgattccagcagg

SEQ ID NO: 14025 - DNA, 1034 bp, Homo sapiens
ttttggaagatttaaatttggaaaataatatgttcatcctttgaaaagtagtactcatatgttatttttaaatgaatcttttctctgtccttttacctggaccgcagggttagatttcagccctcgtttattgaaaatagctgcttttctatcagtcaaccttgtacctagaattgaacctaaatgattgaaaaaaaaaatccatgtttttttttgtagaataattttttcagctttattgaggtctaattgacacattaaactttatatacttaaagtatatgtgctgatttaacatacatgtacatagtgaaatgtttaccacaattaagttaattaatacattcctcaccttacatagtttttttttttgtgagaatgcataagttctacactcctagaaaatttcaggtatacagtacagtattattaactgtagtcaccatgctgtatattaggtcctaagaatttcttcttcttctatctgcaaatttgtaccctttgaccagtatctcctcttttctctgacaccccagcctctggcagccaccattcctctctgttcctatgaattcaactttttaaaaaatcttccacatataagtagtgtcatacaatatgtgtcttctagagtaatttttagtaacataatcttgaagatgaggagggtttaaatagccactgttattgctgacatacttgttaatgaacagttcactcaaaattatcttagttacctttacctctgttatatccatttattttccccaaatgttgattaaatacctactttgttttattcattaggctttgaaattaaaaaacaaagaaaagagagccttggtattgcatttcagaattcacagcataagtgtatgtctgtgcgtatataaaatgaataatatatctatgttatagagataatttgtattatatgttgatattgtatatgaatatacatataatacatcagagaaaacaagatataattgatctaaaatgaagtgtggagtcagatctggatacaaatttcc

SEQ ID NO: 14026 - DNA, 1053 bp, Homo sapiens
gggtgcacacgaggttcactagatgtaaattctttcctaaccaagtgtagttagaaacgtgatgaaatatgttgaaaccgtctaggtatagtttttctagccagactgtaaatattagacacaatcatccgaagttgccatttcgtgggtaaaaatggtacattctcagcaattccatgtggttcggtgtaatgtatgatacacagtaaccaaaaaaagtgatttgagaccaaaaaaatgaaattatgaaatgtacccaaatgtcattatgaccatgatttcacctgcattttgccttcccccgcaagcagtggtggttttagaaatcttaggcagccatacaatttaacagtgtgggtgtgtagctcatgtggtacttttcattgaaaagatatgcctagtttgtgcgtgaagcgagggctgatagaaattctgggcagtggttgctaaatctcttcacagggagaaggagatggaaatgaaatgtaatttttaaaaatatgtgttaacatatgttgacagtaagtaaccctctcatttgaaagatctgatagtcttggtcaacaggggtcagaacattgtgccgtttcctgctttggcaaattcacgattggagaagaatcatatctggaaaagtaaaacaggatagagttcaagagcactgttagcacatataaacaagatttctaaaatgctaccacttctgccatttttatgccttcaaatcccaccttatagtagtaatgaacttggaaacagtgattcactgaagtaagaaaaatacgtatactttcttttagtcacgcaagccctgttcttttaacttattatgagagctataagcaactaatatctcctttccgcatgctctctaccttccagggagagtgctaatgagcagtgaaatggccagagctctggcagcagaagcaaggaggaggagaaaccagagggttgaacagtagctcaggagctacgttatcagcttttgaccactcaggagttggtaatattgtggatttcgtagtttctattctataaccataccctgaa

SEQ ID NO: 14027 - DNA, 1036 bp, Homo sapiens
aagttagaagagtgtttggtctttagacagcaggcaggctggggtgaggggaggtgagaatgaattagtgtcccctgcatctgtgtcagtctactattacatgaggggaggaaacaagcaaagtttaaatgtctcatgtgagctgaagagaaaaaacatgaaatatacctttgggtgaccatacaccagtgagaacccacccatatgagcatcctatcaagtctcagctgaggagaagagctgaaaaagtgttcggccggcgcagtggctgtcgcctgtaatcccagctacttgggaggccaaggcaggagaattacttaaatctgggaggcggaggttgcagtgagccgagatcgcgccattgcgctccagcctaggtgacagagtaagactccatctgaaaataaataaataaaaataaataagtgttgttcatcataactaaatggccccttagggcccaagaagaaccttagctgcacaatactgaaggatcaaagaagatactgcaaaagccaaaacacctgtaaatacatttgaatattttgaattgaaaagtaaatgatgcagaatgcagtaggtagcttttatgtcactaaaacaaggttggttcttgggaggagaataaagaagaatgttgttaaaagtaaacaaatctaattttgcacatcttaattggctttaatttgattccagaatcagacaacagtctagaccaaaaatgttcagaatgcttcaccctacggcatatgcagattatatttatagccaaagaaaaggaggtgacatgcagaaaatggaagtgaggtacagagacagctccgttggttaaaatgcagcatatgccttaattgaatctggtttcaacagttggccatctttgattgaccgaaactcagctacttgttgcaagaggaggttacggtctgtttccacgtcaagttaggttacagttcactatgtacagaagaaactttaggccaaacttaaaacatgtatagaggcagctttaggccaaacttaattcaatttaata

SEQ ID NO: 14028 - DNA, 1026 bp, Homo sapiens
tgttccacattttaatagagcttgagatgggagttgggtgggcgagcctggaactcagaggaaagaggagacagatttggagaaataaaatttgggtaccactagggatcatctcaggagagccaaatggagaaggagaagcatggacgactggacacctgagcattgtgaggttagaaagtgaagagggatgcaagagtcagcatggaaactcatctgttcatgaggaaagtggagtaatgttaaagagaatgcaggtggagcgtgttttcaagagcagcttgtcaatggtatcaaatgctgctcagggaccaaataaaatgaggaccgagaattgtgcatttggcgagggagtgttcatcgttgacactgacctgcagtgtgtcagtggaatggtggggacaaaagactgcctgaagtaagttggtgttcagatgagaggtgaggaagaggagactgaaagtctcgatagttctttggagtagttttgctttaaagagttgtagagaaatggaatgagagctggagaggcattaggttctcaagggaggggttttaaaagaaggagatagtatagcaagtttatatgccatcaggaataatcctacatcattatcttctgttttttgtagttcctttcattttccattatgtatctttttcctaacaattttgtcaacataataaatagactttagaattcagattaattactgcaagatgcaggtgtgttcacagtacaatataagcaataacgtgcaattaaggactttgcttctataattcttcctgtttaggattgtccattttcaactctttactggattattagcaaacaagtaaaaataaaagtaaaatttgagttccattgataattataaaaatgataccagaaattataagatcaacattttttcttcattgtttagtggaatgtgcaggataactgaaaataaaccatgagtcccaaattattactttgtcctttaaaggcatttttttacatttaaacattaataggtatta

SEQ ID NO: 14029 - DNA, 1050 bp, Homo sapiens
attctagaattaggtgtttgactatagtagtatcatgtagcttgtgttactaacttcttataaggctaagttattattttaagggacaggatgactcaatatactggaaatatttcaagatgcaatattaatattcccttttagggtagaaggcaggaagataactttgctacatgactatgtgtaatcatcactagttatttcattaaatttgatagttatgcagctggtcatgaagttattttcttcttctaagttcttttttttccctgaattttactagaagaaattgcggtggcatcatgctgtcttttctctttcttcactacccatgaatctaaaaaccaagccacccctcaatagaaatgcagaatgcccataatcattgacttattcccttttaaagtaaataatatgtatgtactttgccttcagagcctagaaataatgatggattaagatttatgttgtattactttttgctttgacactatattactactgaggcctgtaattaaaatatgatcgatgagtacataaaacactgccttctcataaaatgctagtaaatatggttgttttggttcttgtatgaggtgggaataaatacatttgattgattgtgaacttacagaaatttttgcaggtatgaattacaaaattgtgcattcaccattagcaaggtattgttttatctgcagtgagtttctttatcacacgtgaaataagtttcaccttcctagtttaatcaaactaaaatctgatgattcagagcatacaggctttttagactgcaaacttgagatgcagacactcgttgcttacttgataatctctttcctttgttctctaatggtccaggagctagtcccactattctctagtgaaaacgtagaggaagaagaggaattagggaaacttttcatggattttacctgagccaaaccctctttgatattgctgacacttctgattgaactgaacaaatcagatttgaataataacaacataactgcaggccaaatcagatatttattttcttttacaatt

SEQ ID NO: 14030 - DNA, 1045 bp, Homo sapiens
atcgtaatgaaaataaatttgcaggaagctgtcaaactggtctttgtaaccttaaaagagaataaatgtacatattagaaaagacaaaaagctcaccatgggagttcatgttattatgcttcctaacttatattaattgtattcttttgtatatttcaaatattacaaagtaaatctgttcaagttcttttttttttagtattgattggcgagtgatcttcctaatttggcaataactactacgttcttttcacttaagtattcttttgcacatgatatatgaaaatctaagatgaccagtgttgaaacataattgtaaaccatactcaaattattcctgattatatttttatatctcataattaaaatacctatttaaaatatggtctttagtaatgactgtagatctttgaaactttgtaagggcaaagagctataattcttaaaatttctctttggttaatatctaatccaaaaaacatattagtgagatttacttaaaacctgtaagtgaaaatttcagtatcaaggaaagtgtcagttctgaagaaaatattattttcaaggtgatgatcagttggcccatgtttcttagtttcagtcacttgaattgggagtagttaatggtttcactcaaggtaagccatctgccaaggtggagggtggtataataggatgtacttgtgtgatcttcaggcctatatgactatgtaccacacgttagtgttaagtgccctttgctgaagaaaacagaagtcaattattggattgattccaatttagaatagacagacatcactgcagtgacattttcctgaataactgagtttatcaagactgaacttattgtaaaaagggcatcatgtgatttactttacatgggtctatggctgctagtaagagtcactaattgatttataatcttttctaatttatggtagtgcgtaattgcttaaacgtattgaacaggcatgaaatgtttcacaggggaagtgtcaccaccaccttccctacctcagcccagctttctcttctgataatgcaa

SEQ ID NO: 14031 - DNA, 1160 bp, Homo sapiens
caggggtttatatgagcacaggatagagtcgtggcaggccagagtagtcttggaaaaggcaacatttgggcgtgaaaacagggaatacctgttctctttagagctgccagtttccaggcttgaggctgaggcctttgctggggaaccaccctgttctacccaatatttccttgcctcctgtccatatcaataataataagatcttcatagaaatgaagaaaacaacttttacaaagccaatagttaatgacaatcatttgatcacttatttttcatagaaatgctacttccagcagtatggaggagtaggtactagcaagaaggtgacatcagtttacaaagaaaacaccagtagactgacagccaacctgtcaatatcaacagtggcagctagaagacaatgggataatattttcaaaatgctgatagacaatgtccacataaagctgtgtggtcactcactataattctgtgaaataccttcaaaatattgacaaaaataaggacagttttgaacaaaaactgagagactaaaaggaaattctaaagcattcagctaaaagattccaacttattattgctgagttaaaaatagaacccaaaatgatgatctgagctgtaatatggaataatgactaaaaaaaggcattttataaaagcgtgcacattttcttcttaaaatactattaatacggtctgattgataggatttttatacaatgatagagctgaagtattagactgtaataacatttaaatttggagaggacattgggagttagtttctaatgtccttatatagtttgttaattatacttgtttaaaaaaaattgagaataactgctgaaagaacagaggttcaatgtataatttcccaaagaaattgaatgggaatagaatgtgtaagacagcaagcaaacaaaaaagtatttcttttcttttcttttttttttttttgagacggagtctcactctcacccaggctagagtgcagtggcacggtctctgctcactgcaacgtttgcctcccggattcaagtgattctcctgcctcagcctcccgagtagctgggattacaggcgtgtgccaccatgcctggctaatttttgtatttttagtggagacagggtttccccatgttggccaggctggtctcaaa

SEQ ID NO: 14032 - DNA, 1238 bp, Homo sapiens
ctattcttcatttatagcttgtggtccttgcttttctctgttcctagaattctcttttcctagatatcagcaaagcttgatccttcctctcttatttcaaatcttgattcagatgaccacttgtcactaaacttttgtgtgaccacctgttttaaagtacatctgcatcattgatcagcagttgcagagactgggtggtgatgagggcaagtgtgaatgcagaagatgggtctggaggccactgcaaaaatcaagactagagatcatggtgactgggactaggtttgtgatattagggatgaagtaatgtaaaccaatatggggtgtatttggaagtttaattaaaagttctcacttatgaattggatttggagtgaggaaagagaaatgaatcaaagattagccccttagttttgtcttgaattactaggtaggtgttgatgcaaaaatgacagggggaagattgtaagaggagatggctttttgcagaggtgagaaattaagactgctgctctggatttgttacatttaaatgctaagtgaagatttcaaatacactgttggctatgggaatctgtctttggacatagagatttcatagtgaatgacgtattgacatgtgagattacctaggaaagtaattagagtagagagtacaggactgagtcctaaagcatctcagtactgagagtttgagcacaatgggtagagccaacaaagaagattatgaagactgccggagagatacaggcagaaaaacagggaagtatggtgccccagaggtcagaagaagcaagtacttcatgaagaagtggttgcccagctgtgatgaacatcagggaagatgaaaacaaagaagtgaataatggattggcaatcaagatggcctcgaccatataattctctgtggccagtattgtgaacactaatctcctgtggctctttaagtttaaatttacattaattcagattaaataaaattaaaaactcttcagtcatattaggcatatttcaaatgctcagtagccacatgggcgtagtggctgccatatgggacagcacagaaagagggcatttccatcatgcagaaagttctgttggggagtactgtggatgggaagtacaggccctgaatgggcacatcctcctctgtcctgacagactcctcattctgtggtgaggggtatggccagaggcagaccagagcagggccctcgatggcattgggtccagtgttc

SEQ ID NO: 14033 - DNA, 1051 bp, Homo sapiens
ctgatctttattgctttgctgcattagggaagttttcagttgagccaagggagcaagaacctattagtcaggggctgctgtcaccaggaagatttgtgtgctccattttggggatttttttttttagaatgaaggaccacaatcatttataaccatcaggacagagtgagcaatcctataatttgggctaatatatacctccaatctagcccaacacacatacacacacacccttaataggaggctaatgtaaagataatgtttagtgctgaggacaaggtggactgaagatatttctatggcaacaaaaaggcccctccagacatctgtgttctaaagttgatgctgtttattagagactgcctgttctacagactgtaattatcattaggtagaaaaaggttgaatgtgggtggactacttggctgaagctttctgactgatttgtttagcccagctttgaagtaaatttcaaaggaatattaggaacctgacattgtgctacttgtctctgtaggtgaagtcgtagctaattgtaggatgtttgctgaatgtggatgaagtttttgaacaaacaacataaacagcaacacaaaaacacaattaagagtgacccatgtatgttaaatgagtttagtgtatatgcactgactgtttacagaggtctatttctcttaaagaaaaagacactcctatcaaatcgtcttgaaattaagttaccctggaagtggtttccaaaggctaacagtctatgattcagaatttatcttctggttttaaaactagaactcagaactttcaagatttttcttggtgtaaaatttaaagcagacgggcccacaaaaatgtaaccctgatgagaatgtgtgtggaggagtatattgttttcctccatttatagtcatgaggaatacatctagtgagccaatacagtgttattgttaaaggaaaaacatgtagacatttgactaattttggcagcagaatgaattcactttctttcaagaatgcaatttcaattgtggtgttggagaaacaatttttttactat

SEQ ID NO: 14034 - DNA, 1061 bp, Homo sapiens
tgagtgctgttctgtcatgttctcagttgtcttctaaaatggggtgaatgtgattatgcagactctccattttactgaaatgatacaattctacagatatgcactgaatgtaccctgatctgcagagacacaattacttgagtaattcacgcagagaaactacgtgtgcttaaaaccgaaccatttattctgtgtctaaaaaccatgtgttagagtgatatagtttgattagttctgaaaagtaagttctacctttggttctcctttatttatgttaaaaaaaaaaaaaagagagagagagaaaaggagcattgaagaaatatcctgaagatacagacacacctcagagatattgcagagttggttccagagcaccacaataaagcaaatattgcaattaagcaagtcacacaatttttttttgtttcctagtacatattaaacttatgtttatgctctactgtattctattaagtgtgcaagaccattacatctaaaaacaatgtatataccttaattttacaggactttattgctaaaaaatgctaacgatcatctggactttcagcaaatcttcatctttttgcttctggagggtctgccttgtgtgttgatggccactgactgatcaaggtggtggttgctgaggttggggtggctgtggcaatttcctaaaatgaaacaatgaagtttactgcatcagttgactcttctttcataaaagatttctctgtagcatgcaatgctattcgatagtgttttacccacggtggaactgctttcatgattggagtcagtcctctcaaaccctgcctctgcatgctcaactacgttcataaagtattctaaatcttttgttgttgtttcaacaatgtcgacagcatctttacctggagtagattccatctaaagaaaccatttgcttatctggaaaaagcgactcctcatctgtgaaaattttatctgagattgaagcaattccatcatgtcttcaagctttacttctagttctagttctcttgctatttccaccacatctgcagttccttcctccgctgaag

SEQ ID NO: 14035 - DNA, 1158 bp, Homo sapiens
agagtgtaaactcctagaggacaaggactatttcttatatttctggtttgtatctcttatagtttctggcacatggtgaatacattatttattcagcttgtctgggcattataattagcatggtgaaaaatataaaaccagtcaatagataattgtcaacctgctctatgtcatagggttattgtgaacataaaaatcaaaattgtaaatattggaaatacgcattctcattggtgacaggagtcctcatctcgtagccatgtgaaccggataggtgtggtagcatatgggcaccacctctgtgtgccttctgtttggagttctctgactcttgcatttttagttaagtgaaagctaggtagataattattgcagtcacctgaaatgtgacttcggttttcttgcttgtcggtaacacagcacatgctgctggcagcctctaggaagggcatgtgctcttgtgatacgcttcaggggcacagcaaggagtgcttgaatgactttgtctgtgactttggtgcgtgcgtcctgctgttacaagagcttcccaaatgctgttagcctttggatgttctaacatgttactaagcaaaggactgaaacaagaagagtattagaactatcacacccagagataaggtagtatatagaggatactgccccagagatatactatgtgattttattcctggccctgcagttcaccagctggaatgacattgggaagttattttctatctccaggcctctatgccctcatccatacagtgggggtgctggagatgagggcttctctcccaggtgaagtctgccattctatgatcctggtgaggagcaaggggtgagacagagcctttctgtttatgcatttatgagtcttactgcagtgaagcttcctgtgtatggaagtgtaaattcacagacttcaaagtgagaaagacctgagttcagatggtattcagcctggtaccagctgtgtgggtcatgcttagtctctctcctttaatcctactcacctggaagatggaattaaccacccatcttcacaggagcctgcctgcctttggtgggtactgagtcagtgttcttttgaagaaaaacaggagaaaaaggccctattactttcgtttatgttgctgcaattctcatgaagtatct

SEQ ID NO: 14036 - DNA, 1033 bp, Homo sapiens
gtcttagttctttagagttctgttttcttaattcatttcttaatctagttgcattatcatgagtttagtaaaataaacttctgctcagctcatatagagcctggcgtctcattcagaaaggatagccttttcccactgctcatgggaaaaaaaagtgaaaaagcagtctgcatttcacaataatttcttcaacttgaaataacaatctgttcaaactgtgcatgttggaggaaggcaaaaactatagcaaaccagtcagaaacttagccccagaccaatggtcaaagccaggatcgtgggttgctgtcaccagtcttggtaatctttaacaatatccatatagttctttcccctttattttttggtttcaaggtaaggtctacctgaaatatttaggtgcacaaaaaacaaaagccactattcccagcagttttgcagtgtgaataagaactccatgtcacattatttatagaaagcattttttttgtccttagagagggacatgaaaagttgtgggttcataggtattgcctaatgcctgttcatgaaaatcgattttcctccttgtgagtggagctgatgttggtattttaactcttatttagattctgcatgttggagggaaatagaacttttttttttcctttgggtttatgtgtacctcttaaatatatgacagatacaatttcattctcttttgtagcaaagcttcaagagaatcagcctgtagtgtttaatgaaatgtataatgatttaactctattagaatacaataattttaacaattttgtaatgctttaaatcaactcttgtttgaaacaaagtctagaattttggtgactttcatttttggccactttgctgggtttttcattgagaagatgcgttgggtgttatataccatataatgttcagaatcttagaactatttttagataaggagagccagaatttggaatatttcatgacttcctcatttatgacttaaaggctggttgaagtttaattctttgtaagaaaaacacattagtga

SEQ ID NO: 14037 - DNA, 1065 bp, Homo sapiens
ttataaatatacaaagaatactacattactaaaattgataactgtaattttattcatctcttaggaatcagttgagctattgattccacagcaaatgtgttttgattaagatcatggcaagatatgtttgacagcagttccagattattagaatctagtacatatttaaagtctacattcatctgagattatatgtatctgatcttagttcagtgagatacatctatcaatattttgcttcaaggactgtattgtcaatgctgtgtaattaccatgtgttgtataaaaatcacacaccttcctagatagtttggagcatgctgtgatactgaacgcttttgtttatgaggattgaggttagatccgtgaatgcagagttgaatatgcttcacatgtgtttgcaacaggcatatatacagattgaatctgcactagttgaaagagtttaacagttgaagcttagttccccagctgtgaacattgttatttatggtgtttattatagttgtggctgtgaatgattctagaaaatcatagaaagatttccaggaaatcttgatttcttaaaaaaatcgagaatgttttatttttttcacttgtacgtgaaactaaaccgtacatcttgactttattgcatgtagaattattcaagaacaatataaatttaaagaaaaaccatcatgaatatatagtgatacttaaatgtgttaagtggaacacagacccagtcaggtttttatgatttatcagtttttaacttcaaagactctggttagcttccattttttaaactaatgagtttatcacagccagtggggaaaatggttaaagtatatcagctgtaaattggtacaaagcactaaaagggacattagcctctaatcagattctaacagttcattaaatctgcttttccagaatcgctctttgtcttttctcctcttttgcttgggccttccttataaggcatcttcttgccttctcatctgggcaagaactcctccagggtaggaagcaatatcagctcatccttcattgtctaccagccaaacagcctacagggtg

SEQ ID NO: 14038 - DNA, 1033 bp, Homo sapiens
ctcacaacccccaagtgtgtgcagtttttcagagtatgaatgacagaaatacttttctagtacaatttgtgtaaatgctggggtgaaaagtgttattcggaagctcagatgtcattttaaccatcctctgcccaatgaacaaaggaaagtaggcatgcatctgttgtaatccttaaaaatgtattgaggcctttggaaatgccaatagtaaattttggctcccagtttggattggattggttgcccttttgaaaagcatccatttgcaacttgaataagaacatctgcttttcatggctagttcagcaactatcactaataggaaatattttttaaaatattagtataaactgcacattgttgtgatagcttggcactttaccaacataggaaacagactgataattgctatcaggaaattaaaaattgctgcattacatagacagttttaccagtctttaggagagatactgttccatatgcttcaatgtgaggattttaatggaaggattctgtttttgaaaccgaagacaaatatttcagaagaatgtaatttggatcattgaaacatatgggggattttagttgagagtcccaataggcctatggttttggctcttatttctgttaataaaatacagttattgacattgatatccattctcctaagatgcaaaagaatgtaagatgaaaggctgggctagaatggcaaagtctgtgtttgaagggatgtttattttgtcccacttctggtactttgattagttatatgccctctatgaaactgagttatcagcatgaggatatgtgagtagagaaaaggatgtttttacacttagccattataaattaaatgtaatgctgagaggcatctgtcctgagtataaaatgtagaaggtgaagttagcgtttcattgaaggccatgaaaccattttgaaaatactgagtgagccaccaaaggcaagaatattttttaaaagctgggtagcaaatgaagttactggctaaattaattatgagatcttcctagga

SEQ ID NO: 14039 - DNA, 1841 bp, Homo sapiens
gtaaatgcagaccggcagaaaggcacttctccatacagtgtgggaaagctttgattggaagtatgtggttctgtgactgcacatagcgggatcgcccaacctaaatttggttggggttggggttctattgtgaagatttttcagtgcaaaggaaacttaagctaaaagagacagacctacagatgattagaggtaagccaaaggagggttaggagtggtggagaaagaacataggccaggaggaggtacggcacagttgaagaactgaggaaagactgattggatttgagagtaaagtgctcagagaaatatacctgttgaagggaagaggagcccaaagtataatgagacttataacctaagaaggtgtgtttgtgaggagctttcggaaagaaatggagatgatgagatttgcattttaaggaactctgagtgcatataaaaagcactggatcgagaaataaagtaggacaagagaattaaggggctgatggtgatggtgtctttagctgtgcctaagcttggctgtagacatggaaaaaaatgagtagatttggagcatgtttaggaggcagataaaatgaagatttcattattgagtgtatgcggggttgaacataagaaggaagtaagaaattataccaagaaaatcaggtgtggaaaatgagatctttttaagcctgtaacaaaacaaaattacaacacatatagtttaaagatctaactggattttatttgtaattatagaattggacaatacctcattctatacagtagaacgagtgttctcgagctgagcagagattggccttataggcagaaaagagctgaaaaaagcagaagcacaacaaaaaaagttacttttgaattacatactcaatatttagttagatttttagatgaacatacatcttttactaatggaataatagtttttaaaaataggaacgtacagtgataaagctacaataaaagttgctcttgagttttaagattcccttttactgatttattgaggattaataaatttacgagctaactgctaatgtagaactttctacctgatcctctggaaaattaagaaacctgtactgtgctcttaaaaagagtttatctactaaacaaacagcaaataatagtgttgcatttaaatctgtttgatgttaatccctggttctttatcatcacttttcatttgcagttatttgtcaactaggtttcattgtcaaataattttaagaaaatatcacaaattcttctttccctgagaaattttatatttgagtatattaaacagctacttttctactctaagttccaattgacttaataaagtaatcggatcacactttttctcagaattttagtgtcaaagtaatccttttgccatagcgtctctgttaatgactcatttgactggattttattattaaagagtttattttatgaaggtcttgtggatgctgcatttcctgacttcttgcatctttaaatatattttcttttatagtcaaaaggtatttggccttgtgaaattcttgagttgcacttagaaatctgtagacgatgctcctttgtcttctggcattgagtgttcctaatggaagggtgagaccagtttgacttctttgttcccccacataagtgaattgctcttttctgcctgaacacctgcagaattcttttttttttgtcttgaagttcagtgacttaaggatataactttttttggatcattctgtaacaatttttcctggaacactgtctgttatttcaatctgttcttcgtgttagggaaagtttatactatttttacttgaaatatttttctatccaatttt

SEQ ID NO: 14040 - DNA, 1028 bp, Homo sapiens
ggcctctcagagtgctggaattacaggtgtgagccactgtgcccagcctgcaacagttcctaaatagtactgtttaatagtcccattttaccacgtccgtactaactgtgggtgtctgctgacatttgaagatttttcaatctggtgtgcgttaaatagtgtctcactgtagttttaattgcattttgttattaatggttcatatgtttattgattatttggacttcagcttctttggaatcatttttgtcttttgaccatttttctattgaatggtcatcttttttggtagggatgatggggtagatattcaggattgattaaatgtatagaaattattttctctgagatggtagatttttactttttattttgatttaatatttagttttgttgaatttataaatatgtttaatgctttttctattcaacttcatcatgataattttatatcccactgggatatgtttagtaatattttatataggatatttgcatctattttcataagtgagattggctgtaacttttaaaaaaatattctgactgggttttggtagctatgttagaatctttttctatcttttggaagaatgtgcataaacaattatctactctttaaggatttggtagaacccatttatctgggatgagtggctttttgtgggtaaaatttgaacttaaaattcaatttttaatggtaataagaccaggttttcagtttcttcttgagtcagatttgataaattgtatttggtttattgtaagctttcaaatgcattagggtaagattgtactagtttgctagggctgcataacacagtaccacagatttcatgacttaaacaaccgaaatttattttctcacatttctgagggctagaagtccaagataaggtctcagcagggtggatttttttctgaggccccctctctggcttggaaatggctgtcttcaccctgtgccttcacgtggtcttttttttctgtgtgtctttgtgtcctaatctcctcttcttataagaaca

SEQ ID NO: 14041 - DNA, 1050 bp, Homo sapiens
cacttaatatgaaagtgaatttatttttattaaaggcttttaatttgttttctatggccactgtaacaaattaccacaaacttagtggttttgaaaaaaaaacacaaatttatcttacagttctggtggtcagaagtccaatggtctcactgggctaaactcaaagtattgggaggattatattcccttctggaggtcctaggactgattccatttccttaccggcctctagagcctactcaggttccttggtccattcaactccagcagctttgggccaagtccttctggtactgccatctctctggttctccccttctacctccctccttcacatttaaggactattgtgattactttggcctatcctagataatccaggatgatctccttattttaaggtcaggtgattagcaactttaattccatctgtgactttcattcccctttgccatgtaacctaacagatttcagggattaggacatggacatctttagggggccattactctgccagccacaggttttcaaaaacgtaagtgactgtgattgcaggtacatgttacctttgtcataaacatgtggttgggaattttgaaagaattctcattttgctaattccattaatagtcaagcaaattatgatttatgtcaatcaaaatataattttcttccttcttgtgattggaagaaaaaagtccattcaaatcacttttgcagctaaatgaagcaagtgataatattaaaatttcccattataaaaaatctaataaatatctaattttttgcaaacagtagattgtttaccacagtttcacatggtgatactatggttttatgtgccttcaaagctagatgaactacttttagaattcatcagaccttttggcctaacaaattttcctttgtttttgaatgttgttatttgtagcgtatctgataaaactgaaatctagtttcaggaaacatgtttggttatctcgttaaaagctcttgaggtgatagcatgcacttacttacaacccatacacttactaagacatcctgtat

SEQ ID NO: 14042 - DNA, 1060 bp, Homo sapiens
tttatttttttatttgctttgccctttttcagtgggttttaaaagaaggctgtaaaaatgcctttacattgccattttgaataagtaaccttttaaatggatttaaggggcacatggagaatattgaacttgctgtggtgtttaaaaaaatgactttgtactcagattgtctggtttccatcctggttctgccagtgttcaactttgcttgtatatttcagttgccatgtctgtgatatggcaataacagtaatagttcctactccataaaattattgtgaaggttaaatgagaaaaaaattctaaagcatttgcatattgcctggtagttactagtgctcattaaaatagctgtttttatcattttaagctgtgttagtcatgtttacagtatagtcagtttagctttaggaaaattggctacttagaccagcatttgtatattttatttcctttgactgaagagcatgctgggatgggtaccaggtgttcttcttatatggcagcttctggtgttggggtctgactggggacttccaaattgttctactctgtgttgataaagaatagaatcatcgccaattctcttggaggaaataacattggatatgctgtggtagttggggcatatgttattggttcacttacagaatgttggcaacttctgtcctgtggtgttgcaaacactacaattcaaacatatatttagcatttattatttgttagacactgggctagaaagacaaattgtatttagactctgccttgaagacttcattatctcagagatgggcagataagtttctacagttgtatgtgattggtgccataatatatttattagagccagggaattgggatgtgggttctggaaggcttcacatttaaagtgacatttgagctagaccttgagttgccagtatgacactgactgtaagaaatgggagcagccaagaaaagttagtttagaaaaaattcttagcaaatgcaaaagggtgtattttttctttgggcacaaaagtgccctgaaaaatttcttcttaaagataaatgtgtgata

SEQ ID NO: 14043 - DNA, 1035 bp, Homo sapiens
attttatctgtattcattgcccagtccacagatcatccctcatccatgatcagtttacacattttctgtttaaaaaaattatcttaaagttggctttcctagagtaatgaattgtcaacattatcataatgggagtccactcctattaatcagaacttagagaccacatgttgtgttcattatccagaaaatgtatcaagttgcaaaacttaagtagaatgctaaaaattgggatccacagtattaatgagctaaaaattgacaagtgcatcttagaaaatgcttctgtgagcaaaaaaaatttgcaggctcatacgcaatgaattggagtgttcaacacggtttaattggcggctgtggatgtcttgtgcataattgaggttgtaaagatggatgcatgtggtaggcatggggggtctaaatgggtgagtgtgtattgtaagggaatccgtcccttccgacatactgcaggctgggttgcagatacagtgatccatgtttatgtaagcaaggtggaaacttctgatctagaagggaaaaaacaggtgcttttgtatgtttttctttcaggaaatagttcacattttccagaaagaaaagtttttttttttttttttttggagacggagtcttgctctgttgccttggctggagtgcaatggcgtgatctcggctcactgcaacctccgcctcccaggttcaagcagttctctgcctcagcctcccgaatagctgagattacaggcgcccaccaccatgcctggctaatttttttattttcagtagagacggggtttcaccatcttggccaggctggtcttgaactcctgacctcgtgatccacctgcctcggcctcccaaagtgctgggattacaggcgtgagccacggctcctggcccaaaagaaaatcttttacgcttatgtgaccaagataaaaacagacaacatggtcaagtttacacttggtttataaatttatcaaaatgagagctgtcttgttggcataaaacagaaggcactttttctacatcctc

SEQ ID NO: 14044 - DNA, 1045 bp, Homo sapiens
aaatttacagaattaatgaaaacatagtatctcatgaagggaatctgtttaacctcatggagagatttttcagtctgtccgatcttatttatcatgtgtggaatctttttgccctttcttttttgtattaatattggaataatcttgtgaaagatccccactaaactttgctactttcttgaatccttattcctatttccctaggtttcttcctactttgctgtgtctcctgggatattgaggtactagaaaggcttcttgcccatagagattcactgtgctgtctgttttaatttgtgcctcagttaatgcttttttcgtattcatttaaaagctttatgagttcctgttctctgaagcatagatcttatctgtctgattgaatgacacattgcaaatatttaatatttcatatttatgaagacctgctgaattattttattacccttttggacatacttatcggatctgtcttaattgatgttaagactcggcaatccattaagtcgttgagtcaattcacattcagactgtacctaggattcttatggtcctaactccagtgattttcaacacagctcaatcaaggcagatactcttctggttttgcttctaaaaagaagctaaaaagcaatctttgggacactctgaccttttaatgtctttgttacggtaaaaacatggagtgttacctggcagggtgaaatgctaccaggtcagatacattttcaagattgggtccttaacgctgaatgcacgtgtgaccttatctattcagaattggccagtagccagtggccagtagataacctcatttttttttttttttttttgagatggagtctcgctttgtcacccaggctggagtgcagtggtgctatctcagctcactgcaacatccacctcctgggtccaagtgattctcctgcctcatcctcctgagtagctgggattacaggtgcctgccactatgcccagctaacttttgtatttttagtggagatggggttttaccatgttgggcaggctggtcttgaactcctca

SEQ ID NO: 14045 - DNA, 1028 bp, Homo sapiens
cacagtaaattacttcagaacaaccccaaagtggaagaaaatacttgtaaattgcatttttaagcccttaagaacaagttctatcacttgtttaaaaaaattgttttgtaacatgaagtgcattttaattgtctgactatgaactcttgccttatgggctcagtcactaaagatgcttaagagaaaagcataaatgaatacttgattgatcataaaatcatctacaggatgctgttttaaccacttccgaaacgatctaaaagtgtacacagcttcatccctttagagacttagaaaaagtccagatacatcaaccaaatagagacaaatatagagaaaatgagagactaagttttgagtgtaagaaattaactcattttgagcttcactgatgaaaagcaagattttaaaacaagaggtgctccatgatgagtcgttttttacaataaggaatgaagcaaagcagacactctttaacatgggtgcactcaggggtcagggctatgaaagctgccagaattcaaccctgatttagcaatgagaagccagagacaggaagctgccttgtttattagaaatagggtaaccacagtctcaagacaactgaggaagactctgctggcacttttcttctgaaagcaagcactagtgcaaaaaaaccccaccaaagtatgtagtataggtgtttatatgtgactaaggcttatgtattcatatattcttttgtttacttcttaaaatttatggttagaaaggcacaacttttatattttttccagttaaaagtttcagaaagctatcatataacgtcaaggtataaaaatcatgtgtgaccttgatttctacaatactttacgtattcaaagtagttgaacctttatttaggaggatgcttccttcaaattaaagacttttgctcagagagtgccaccatgtttcagtgggaaaaggatcagattagcctcgggatacttggaagttatggcagaggttgcagagtaatttttcattatttgctagaacttggg

SEQ ID NO: 14046 - DNA, 1061 bp, Homo sapiens
ggtctaaaatttgatggttagtacagtcagcatcacaaactactcagcctatttcattcctctgtgaattattgtgtctgtaatgacatttataattgacctttcagcattcagaatctccattgtgtctttgtttattagcctctacagcagagagacatgataactcttaatttcagggtcatgtctctggactatgtccaaaatgtccctggttattataattctggactccaatgcttctttggatgtatcatcaacaccaaattttgtaagtcactggattaacataaacaaaacgattgcagccacccatgtctcattttgctaaagttatgtgactttataatacttaatattgagtgagtgaaatccacgaagacactgttcatgcctgtagaaaatcatatgtaatacctgctacatgcaaggtactaggcaaatgtttatggaatgaacaaatcattgtatggtaaaatgcattttaaaaatatacagttatatatgagcctatgtgttctctgagaatccctgtgatgtttttcttggtgatggagaggggtggttttccatcatcaccattgcaagatggcagtggtatttagatgctgtttgtaatggacagatagtgagaggaactgaggggtgctgggaatagaatgtttgtgatttttttcctcttttggggacagggatattgcaccccttttagaggaaccatcttaaaccagtgaaccaaattattttattagctcatgtctatagaatcatatggaagcttcttctttgggcataaattttgtgtccacagggcactgaagcagttaatctaaatgctgtcttttggaatcaaagggcagcttgggcacagcactgaattaggaaactggaacatcagaaagttctagttttcttgcagtatttttttgctagtatgtggtaattacaaaaggaagtgaaaaactataagggaaaattataaatactaaaataaaatttggtagtctaatacagaacaccttttttagtgcatgagtaccttatactgtaaaaaaaatttc

SEQ ID NO: 14047 - DNA, 1028 bp, Homo sapiens
actcgtatcttaatttctttaagctactacttgtttctttgaatccatttcggtttgccattcagtcatttcttttttttcttttttgagacggagtctcgctctgtcgcccaggctggagtgcagtggtgcgatcttggctcactgcaagctccgcctcccgagttcacgccattctcctgcctcagcctcccgagtagctgggactacaggcgcctgccaccacgcccggctaatttttttgtatttttttttttagtagagacggggtttcactgtgttagccaggatggtctcgatctcctgaccttgtgatccgcccacctcaccctcccaaagtgctgggatgacaggtggaagccactgcgcccggccccagtcatttcttaaaacttgatgaagttttaaaaaattttagtcttgcggattataggtttaacacctgccatatgaaatagcaattgattcattttctttatattatttgtatttgtctcaggttttaataaaatactcctgtgtgtactgttgccaggatgagatggacaaatggtgttataaaattcttggcaactaggattccatagattatttagtttatgtttctagactgaaactccatattatttttatatagtactctccattctcatgatgaataaagtgtaagtagttgtcatctttaacatgcattacttattagggtgtggtggttaacattatgaagagcatcacagttctgtaaaggtaatttttgttttgagttctatttggtaatgcttatattttgttgatatttgtgttgtgttaacagtattagagagctgtcttctataagttgttcatagtgactgttggacccacttcctgtttattcacaactgccatccatgttcccacaaacttcaatcaattatttttttttcctcatgaaatatcttttacttatctataagggaaatgttacagacccaaccccagagtctcagaaggtctgctgcattgcccacccagggagctttaaaact

SEQ ID NO: 14048 - DNA, 1450 bp, Homo sapiens
ttagtctttggggttcttccctcacactgcattcccccctcaatccttatactttgtatttgggccatttgactccttattccattttgcaaatagtgtattttgtggacatgtgtgttggtgtgtgcctgtttaaaaaatattttgtttggtaaccctttgggtataccaatggagcttctgtgtggccaccactagaacaaaacttcctaatttcagtgtcattaagtcagcagctggtgcagctgaactcaaagaaacaagcatagttattgactgttttctctaaaaacagcctgaacaaagcatttccttaagcagcattgagcaggatttagaacttcctatgcctcaaaaaagtcttagagagatttacggaagtacaaaggtcaacattactgcatgtgattccactgtcctaccctcaatctatggcaaataactgattttttaaaaaatcttgtattttaaaatcatgtgatcagaattcctgagcaaaaaagaaaaaaaaatcagtcaaatagatggctgtattagtccattttaatactgctatgaagaagtacccaagacttggtaatctgtaaagaaaaagaggtttagtggactcacagttctacatggctcgggcggcctcacgatcatggcagaaggcaaaggaggagcaaagacacgtcttaacgtggcagcaggcaggagagcatctgcaggggaactgcccttataaaaccattaaatctcatgagacactcacaatcatgagaacagcgtgggaagaacccaccgccatgattcaattacatcccaccgggtccctcccatgacatgtggggatcatgggaactatagtgcaagatgagatttgggtggggacacagcaaaaccatatcaatggtcatattagctacttcttgacaaccttcagcagtgtctgaggagtgtgacaacacagatgctgggttatttaagaaaggagagtttcaaaaattgtagcttacattgtagtcattgtgtgctattttttgtatgtatgtatgtatttatacacacagaaatggggtcttgctctgtcacccgggtggcgtgcagtggagccatcacagcttgcagctcaggatccttctgcctcagcctcccaggtagctgggaccataggcatgtgccaccacacctggctaactttttaaatcttttgtagaggaccttgctatgttgctttggctggtcttgaactcctggcctcaagcaatcctcctgccttggtctcccaaagtactgggattataggcgtgagccactgtacctggcagattgtatgctatttttaacgttgtttagtttcttgtagataatcttttatatatatatatatatatatatatatatatatatatatatatttgtatttcttaattcttaaaaagatcttggaaatagtagacatttagga

SEQ ID NO: 14049 - DNA, 1055 bp, Homo sapiens
tgggattacaggtgtgagccagcttgcctggccgaaaatatttttctttatgtgaatttcttttgttcttgaatcaataattttgcagcaaattacttttaattaggtaacaattctttggttttacattggctcttttacaagctaatgggcatgtacagacatttttcatttttagaccaacccattgtttgagggggctggaacatgagacactatagttgtctacgtagttgaaattgatagttttaataattaaataaggtgacttattttctgacattctctggcacgagtaatataggagaataggttattgtaaatctatggaaggaggcgttccatgcctgtatgcaaagatatatatgtgtttctgctgttgcaataaataattcaataaaacagaatagattttattgagcatggatcataaactcaggggtagggatcagtgtattctagtgcctaggatgatgcgttgctcatggcagatccattgtctgttgagtgaatggttaagttgataaataacatgtctactgattgcttagtaccatgtgatgagcttcaaaggacatagaaaaaaatgtaatactattaagcatggtccttgaggtaaattaggagtagaaacaaaaatcagtacatatttagggaatgattagtcctgaaatctatagtacttaaggtaatttttataaaagacgagatgaaagaagcatcagcagtgaaaatgtcatcttttgattactgaatacctattttacaccatttattgtgctaaatgttttacatgtgtattatctcagtggaagtttcatgacaaatctgcgagtaccatccctgttatttttctgtaatgtaatcaaagtcagtatcttgcttaagatcacctggcagttatgtggcagggctagattatgagacctattttatttgcctcttttactacactgctgtttaattggttgactagttttctagaactctctggaccagggttggtactggttggtcatttcgtaccagaggctttctgaatgtttgcacaccca

SEQ ID NO: 14050 - DNA, 1092 bp, Homo sapiens
attagtcatcagggaaatgcaaattaaaaccacagcgacccaccagtatacatttattagactctacatgcattttagaatcagcttgtcgattttgatagagaagtcagttatgattctggtagggattacattgaatctgtagattaatttgggagtagattcctcaattgtaacatatgtaccactctgatatgggatgttgataatgaaagaggttatgcatgtgtggaggcagaggatatgtgtgacattttaacaatcttgagtcttccaatctgggaatacaggatgttttttctttcattcagatctttaatttctttgaataatttttttgtagtttccagagtataggttttatacttcttttgttaaatttattattaagtatctcattactttttatactattataaatataattgttttaattttgtttttggatcgttcaatacaagtatataaaaggtgtattgatttttgtatattgagttagtattctgcaactttgctgaactcatttattagttgtaatgtattttcagtgtattccttagaattttctatatacaagatcaagacatctacaaatagagttttattcttcctttccaatctggatgccttttatttctttttcttgccttactatcctggctagaacttctagcacaatgttaaattggagtggtgagagcagacatgagtattttattcctcatcttaggggtaaagcatctatctttcacctttaagtatgatactagccatggttgtttttttttttttttttttccccctgcatgttacgtcgtgtcaaggaaattcctttctattcctagtttgatttatgtttttttttttcaataaatggtgttttgtcaattgcttttattgcatctttccatatgatcctgtggttttgctatggtgcattacattaattgattttcagatgttaaaccaaccttgcgtacctgggatgaatcccagttggccatggtatataatttaattttttcatgttgctaggtttggtttgctattttgaggatttctgcatccatataataagaaatatctgtttgt

SEQ ID NO: 14051 - DNA, 1049 bp, Homo sapiens
tgattctcctgcctcagcctcccagatagctgggactacaggcacccgccaccacacccagctaattttttcttttttggtatttttagtagagacggggtttcaccgtgttagccaggatggtctcgatctcttgacctcgtgatctgcccgcctcagcctcccaaagtgctgggattacaggtgtgagccaccacgtctgggtttttttttttttaaaggttgctttgttttagagcagttttatgcccacagcaaaattaagaggaaggcaaaaaagtgtcacacgtaccctctgcctccacacatgcataacctccttcattatcaacatcccctatcagagtggtacatatgttacaattaagtaatctacattgatgtattatcacccaaaataaatagtgtacattaggattcactcttggtgttggcttttcatagcttttagacaaattcacaatgatacataaccactaatacactatcatacagaggtttttttttactgccttaaaatcccctgtgctcttcctgttgatctctccctctccctaatcctggcaaccactactccttttacatttatagtcataattgctaaaagtttagaaacaaccaagatgttcttcagtaggtaaatggatgaagaaactgtggtgccttgagacaatggaatgttattaccactaaaaagaaatgaaatattaagccatgacaagacatagaggaaacttacatgcatatcactgagtgaaagaagcccatctgaaatgtcttcatactctatgattccaactgtataacattctaggagagtcaaaactacggaggtattataaaaagatcagtttaactttttgttacttgtggttttggtgtcatatctaaaaatcattgccaagtcataggtctttaaaatttacccttgtattttcttctaagaaatttattgttttagttcgaatgtttgttctttgatccatttttaatttttgaatatgttatgaggcaagggtccaaagtcattcttttgcatgtggatttcc

SEQ ID NO: 14052 - DNA, 1087 bp, Homo sapiens
aaacgtagttcttggagattctttagagacaaaattaatcctgaacttggtattttgtatttctttttaaattgtattcatatactgcaacgtgagctaggtcttttctccttattaagacttggaaactgtagttcagagaggtgaagtaattttaatttacccaaggggaaaaaaatttggaatttgaacttggaagtgtctgacctgatgtttctaacaaatccaggcttttaactcctttgtttcaaaatgtcatgctctgtgttgagcacataataaactagattataaactgttttccacctttttggagctctctgtgcaggcatttattctgttaattctctgtcacacctgagaaggagatgcagtctgagaaattggcattctatgtatctcccttctcatttcattgtgatattcaatgatactagaaggtaatttttttcttctagtaagcagtaaccacgttgtgaaccaaggataaaaggaaaatgacactggtagagttttctcgtcataggtattacctagtttcctaggaaacagaaacatgatttatgaatattgattttcaaaagcttaaaagaaaccctaggttattgtttctgccattaaaatagtttctctgaagagatcaacttacgtaattgaatctcgaccacattttatttagtgtacatcttgcatagtagatgattctgtgaggtttgaattgaagttcattgtgattgtaatctttggtccctgtctttgttttctgtgctggagagagaggggatttcttcctgtagttatatgtggtctagttcacttttagattttctgggcaccatgctgaatatcagtgaaaggggcagtgggtacaaaagaaggtaaagataatttacgatgaagcttagagtttagttagaatgatgaactcttgtagtccattttgtggaaagcttttggaattgcttgaacttggtacttttcagtatcagcaattcaaatggaagttttctgagctttctaactaaaagggaaagaggagaatcttcagaaagagcctatgtgcactcaccagcaaataatgtgatgg

SEQ ID NO: 14053 - DNA, 1045 bp, Homo sapiens
tcatagcagcccaaaaaatgtaagacagcatctttaattttttttttttcctttgagctcttttgaattggacctgactttcttaccaagattttaccatcataatatagaggaagcataagaaagtctttaatgaattgtttggcttggctgtgggcagatagatttgagttactacacaccttactgtctttgcaaatagagtaaaatacctaacaatagttgtgttggagcaggtgtctaatgatcatctgtttagcccagtgcagtcatctgttttctaggcagttacgttttgttgaatattattaattcatggtcttgataatccagtgaaaatgcagaattcctgtgaacacagttgttttaagtatgcactgatttttatctccagaaaatagcattattgcttagcaataagatgaatattttgaaaacattccaagaaaatttataccttgaagtatagtgttgagtaaaagaagtgggaattcagttacaaagttccccagattggtctgaattttattatggtagaaactattaatttcctcttgtagtgaagtatattaatcacaatttcaccagtatttaaagtaataaatgatgtttttagataattaaattttaaatatttgacaccacttttagtgtctaagatatccagttaaaaaattggtacagacagctgttgaattacctgtgttatcaaaatgatctcaaataccaatttggatgggtacctgtttaaggctctccaagcatttcctgtttacaggtaaaatatacatggagcctttaatagacagtaggcatcaaatgtgattatgaaatataattgactgagagtgtcttgaggacagtcacagtgctttataaatagccttgaattcccacttaatgtggtataagctatataggggaagggctcaattaagttggtgaagttcaattacaccatttctttttaaagctgacaagaaattgccatgtcattgctaccttaatttcattacaataagaggtgacactaagaatatcagtg

SEQ ID NO: 14054 - DNA, 2033 bp, Homo sapiens
tacaactgtgagagaataatttctgttgttagtcatcaggtttgtggaaaattgttagggcagccacaggaaattaatcagctcactatgggcaatgtattatgtgaaatgttagtggttataaggtctttgctaccaggaattcaaaaatctttgaaaagtaaacaaaaatataatacagtattacaagttctataaaaaataattgtacagaaagttctgaaagctttgaaggggataactaactttgttaatttggaggatttagaacagtggtccccaaacccttttggcaccagggctggtttcatggaaggcaattttcccacagactgggaaagagtgggaatggtttctaccttagatcgtcaggcattagattctcataaggaacatgcaacctagatccttctcatgcacagttcacaggtactggtccatggccccgggggttggggccccatgatttagagtattcattgagaaagaagcatttcttctgtgtttgaatgacgtgtaagactatttctggcaaaaagggagtggaggattagagggagggggacatgtgtatgaaatagcacgttatgctcctttaaaccccatctgtgagatgaacacccatctaaaacttcagtattttcaagtattgagggtagatcaatttctggaacccacgttgacaacttgatgctgccatatctcagattttaatagtgtgtctctgctgtaaatattattaaagatattttaaaaattgcctttcattcatacttcatccattaatcttctgactcaatctctttggcagcttagagtgtagtatgatgtcagtgacccacatataagaccttaattataggcatacctcagagatactgtaggtttggttctagaccactacaataaagcaaatatctcaataaagcaagtcactagaattttgtttatttccccaaagcataatagttatgtttacattataatgacctattaagcacaaaatagcattgtgatgaaaaaaaacctacatgccttaaattaataatacttcattgctaaaaaatgctaacattcttttgaactttaaatgagtcataatctttttgctggtggagggtcttgcttggatgttgatggctgctgactgatcggggtggtggttctgaaggttggggtggccatggcagttcatcagtgttcacagcatcttcaccaggagtagattccaactcaagaaaccacttactttgtttgtaagaagcaactcctcatccatgaaagttttattgtgagattgcagcaattaagtcacattttcaggctctacttctaattctatttctcttgctgtttctaccacatcttcagttacttattccactgaactcttgaacttctccaagtcatccgtgagggttggaatcagcttcttctaaactccttctaatgttgatattttgacctccttgcataaatcacaaatattcttaggacatctagaatgatgaatcagttccagaaggttttcaatttactttgcccagatccatcagaggagccactatctatggcaagtatatctttacataacgtgtttcttaaataataaggaaagttgaggtaactccttgatccttgggctgcagaaaggatgttgtgttaggcatgaaaacagctttaatctagttctacatacgtctgtgtcagagctcttgggtgactaggtgcattgtcaacgagcagtaatattttgaaaggaatcttttctgagcagtacatctcaatagtaagtttgaagtatttaataaaccatgctgtaagtagatgtgccattatccaggctttgttgttccatttataaagcacaggcagggtagatttagcataatttttcagaatagtgagtgagcattggcttcaatttaaagtcaccagatacattattccctaacagtcagcctgtgctttgagattgtaaagccagtcattgacttctcctctctaactatatgaaagtcctccatggcgtc

SEQ ID NO: 14055 - DNA, 1022 bp, Homo sapiens
tttttcatttgctcgtgttttattttttatatttcaaaaatatgcattgcttacataagctttgatcttatgcatagctggatttgatttttaagagtgtttttgtttgcttgtttgttttgttttgtttaatgggataatggtcattagcttttttcttttcttttaatgtattcatctgatactggtttcagggtattcataacgtcgtataatgagttgggaagtttttcattctcttctattttttggaatactttgtgtagaattggtactatttcttccataaaagtatgggagaatttactggagaattctatattgttctatattgttactgattttttgactccttattctgtcagttattgggaaagtattgaagtacagttgtgaatttctgtaattctcttttcagtgctgtcagtttttgctttatgtattttgaaactctgttattaggtgtgtgcacatcaggattgttgtgttttcttagtgaattgacctctgttcttaccatctctaacttttatttggagtgttttggcaatttaatgtaaaatactttttgtataattgggtttctggaacttgctatttgttttctatttttctcttttgttccctcatagtcacctgtatcttgctctatttgggcttgattattttttagtattttatataatcttctttattggcttattagttaatctgtttgttttgtatttttagtagtgactctaatatacatcattaacttctcacagcctaccttcaggtaatactttaccttactgtatgatagcagaatcttagtatattgccatttttttctctttcattgtttgtgctattttcttcatatattttacttatacatgttatagcctatccatcctggctactgtgtttgctttaaataataagttacctttaatacagattcaatatcagacaaaaatatgttttaaaattcttgctcatatttttgctagttccagggttttttttatttctttatg

SEQ ID NO: 14056 - DNA, 2063 bp, Homo sapiens
gtgggatgggatcctggagtcaaccctccaagggtactgaagaatgactacatactgtatatacatatatattcatcatcttatatatctatatgtgtatgtgtatatttagtatttatctttatatgtttttacatgtgtttttgtagtctatatctatattagtacataacccacccacacacaccatacacaagagcaagaattacagtaaaatttcatgaccgagaaatacagtaaaaagccacacgtgtgtataaaaaagggggaaaaacagtctttaaaaaaaattctatctttagtaatactgtgctcactttgaaattatcgagctaacttgtaacaaaagaaaaacaaccctgccttaaagaaaacaaacctaaatggcaaccaagttaaattattcgaaaacaatgtaaagaaaaccttccttcatttcacaatgaatggtaacctctaagatgatacatccttgaatcacaactaatttcagtggcagaaatatctcagttcgattcttactctcttgcttgctaactatggatgaccttggtcaaatttcttaacctctctgagtttatacaatggaaaaaataatatgtagtttacagggctgtggtgagggttaaatggggtaatgtggccaaaagtcactttgtaaaactacaaagttcttgtgtggcaactgatttgataggaaaagcactccagccatacctccaccgcccccacactgccctcccctgaaagggataaactttcctgtttctcaaagtgagcatataaattacacttatggggaaggaatttccgagtgtgggtagaaaactctggcagtcaaaggtcatgaattccattcctgtctcaccagagatttgctctgtgaccttgagaaagtcactcttaaaaagtttcaacgtagctggtataaaagttactgattattaacatttatataatacaggtgaagtatccaagcttgtcaaaagaaaaacacatgaaattacagttcacatgatcatttacagaaaattgaaaataaagatgaacaatgattagagattgaaaatctgcaggctacttctttaatgagtcacctgaagcttctatcaactggtcattaaaaagaatgcccttaattttaaaaatagaattattaaatttgtgatatactataatttcaagcagtacattgaactgcaaatccccagttaaatcaagattgtgttgattaagctatgtctgatttatggcttaaaagtcacttggttagactcaaacattgttgcaacatgctatatgttattcttaactaacattatacaaaatgcacaataaaggtagataatgaggatcttacacgttatttgtacatttattgaatacctatttataatcacgcatgatttctccgcaactgcattttctccagttaaaaaagaaacaaaaacaatttttttaaacccttgcaagagcaaagaaacaaactcaaactatctcttcaatataactgatttagactctttccatgttacaggtatcttgcctgactccaattcatgttacaattatcactgcaaacatcagcatcactttttgtgggactctcttatttatcatcccctgctttaagaatacactgtgttccggttggtattctcgggccccacaactcatagtattccttctggtgttaattgcttgttgatttgccttgttctaaatgcccctatcatggtcttttccaccctaagtagctaaatatattcaacgctgtcaaccattcctcgattcactttatttccctgaaaaaattttttatgtcttcttgcaaaaagaaatcttgtagtatagtagaattaaaccatgctgcatttataaatatttgctctagtgtattgatggctctcttaaaagctgccattcaggccgggtttggtggcgtgtgcctgtattcccagttacttgggaggctgaggcaggaggatcccttgatcccagagttcagggctacaacgagctatgatcaattgagccaatgcactccagccttgaaaaccctg

SEQ ID NO: 14057 - DNA, 1034 bp, Homo sapiens
caatgcagtcagctgaactttattgtggaatgctttttattactgtttattgaaaaaaattgttgtgctaatgagtccttaatattctccacctcccactccccagaagttctttttacagcaatgactatcatttgggagtaaatggtcctggtatagcatttgagaccttgaccttagcaactcttggctggtggttgtttactacagctgcagcctatgtgtgtgctgaaagggaaggtctgcaaacactagtgtactcactctccccaggccaaagggagaacaaatcgggatgcttgacgttcattctgaagaacatgcatctggcctgtaatatccatcgtgttctggtcatgtgaaaatatacatgttgctcagggatattttccctgactcctgttcagggaaagtatgcactttaacaggctccagtgagttttagatgttacagtatatcatgaaacaggctgttatcaacttactgaaataatttggccttaaatataggtgtgttttatctctgcagagacaacgtaagtgcttaggcctctaggcctatgctgagagcattttgaattcaagccagtgttggttaatctagagtttggggtaaccttacccagtgaaggcatattgttaagtagatgaacatatagaggtcctggacattttttccattgtacaacatggaaagcatgggactttatgtttttgcaaattaataatattacaatgatcacattaaattggagtgtcaaatggtttgttttctttatattgtgagagaagcagtcaagttcataaatctagctgtagattgtgtattaaactataaaactagtaatggcacaaactcatttgaaaagtttttgtttataagtttttctgcttgccacttgcatgctgattaatgaacatgagctaaaatcccaagacagttttattcaaaatcaacaccattattaccttttctgcttagaaaacagctttttttttttttttgagttgaggtctcactctgtcacccaggc

SEQ ID NO: 14058 - DNA, 1025 bp, Homo sapiens
ttaatgctaaatttctaaaactaaatcctagacattagacaggagtattgatcaaagctcaggcagccaacctttgcaggcaccaatcttttctccaacattcttctaattcctgtcaatcttggctgatgatcacagcagcagccattcaaagtgagaagaactgttccctcttgagctctatggtccatttatggccacctcaccttttctttacttattcatagcacagctgaggtaaagcctgcatatttcagcgaggtttattaataactaagggacaaacaacaaaagagaaataaacacacacacacgcacacaaacacacacacacatacacgcaaaccatggcatgtgatggtgtgatttagaccatatatgtatttattctgtttaaggagtcacttccctgtctagctccgagcctcacatcacacggaagaggctacctataaactttaccaccttagaagcacagttgagaatttctagattcagcaggcaatggacagaatggttgtgatcatgggctttgaggtcagttagaaatgagttcaaaacccagctttgctatatttctgtgtagatttcagctgtaagtatctataatcctctgaaaattgcattaataatgcctgccttattgggttgttctcagaattaaaagaaataacaagtacttgccacatcacagaccataactgcacaataagtagtattaatgttatcatccttataacaatgatcatgtaaaagcataagagatatcaaaacccaaggtgaatggagttatctcttgcttacctagagcctaccatccatactttcattttctgtctcatggcctgttttatcctagttaattggtaccaagaaagtccactccaatcagtaaagactatgtggacatttagcaacagcactactaaaaggcaaaaacaaaataatccactcagtaaataaaaacacacaatcctgcatgacatatacatatatggaatgcatataattatgcatgaagggtt

SEQ ID NO: 14059 - DNA, 1291 bp, Homo sapiens
aaaatttaatttaggacctaaaatgtctagattagctttctgctttttttatttgaataactcattcagttgtgaatgaattcctctttatttggtgccacagtcaccaaatgacaaggatttgccactttcccaccaaattgtgagtgcttgtaatttaggtctctctaccttaaattcagtataaggaaacgtaattatgattgattttttccaaagatgacaagctgtgttgaaatacattttttcttttgaccaattgacagaatctaataagctttaataatcttccccttttatgtgaaaagttttgagaactgtgaaatgtttaggaacaaactgttgaaatccattggaagggaaaaaagaaagtggtaccagtgttaccagctcaactaaaacctgcaattctgcatttcaactcttcacttcctcagcctacaaatagctcattagatgacattcacgcatgctgggtataggcaaggaaagtaattttcaaagtacatttgcagttctctttttcagagatgattctatgatagtgcctctgaaagttgatgcagcatttttgcctttccaaaaagtatttatcctcactgctttttgcagtacttgtattttcacagatggattatctggggtaattttcttcaaagggagtttgttatacacagtgaaaatgtattatagagtagaatagtaaagctctaggggtttcagaaagctttgatgaacagatgacaaacatctgaaaccccctccgcactgttacccagtgtgtatataatgacttgttatagctcagtgtgcccttgaatccatacagtttcttaaaagacaataaaatcttattaataaagttaatgtaacttctaagttctagaaaatgctgattctgtctgccccattcaattgggggctactaattgatttgttgcttggatttcctgagaatttctctatttgtaggaggggttttttctttttacggtctgttgatgacaattactttatgggtgtgatgcaccgatggtagccaaggaatctgttggggaagttcggaaagaaaccttttctttcttttattcagtttaaagtaaactttatcctggatgtttagaatcaacattaagagttatattatggtgttcagagattaagctgacttggatacaatattttcttttgaaaatgaattttctttttcatttgtgatttttaaaaaatgttgcaccagttatgcttcatgcatcgttacatcttcatcaggttaatgtaatgtctagtt

SEQ ID NO: 14060 - DNA, 1131 bp, Homo sapiens
ctcttttagcactgcaatagtgtcaggaatctcctgtttctccttcagccaggccagatcccactcactcaggggaacaccagtgggtgtagaataaggattcctactgttggtgaggggggtgatttagtattgaattattcgtgtgttcagtgagaagagatgaagcatggtagttccatagttacatctttgtgaaacctaataaatcatcgtttcctgtaggttttcagagtatttgcttcacataatattttattaagtaatttgaagtaattggttaatatgtgtaaggactgtctcctactataatgaatcatttgatttggaggattttttcccccccaaacaggtagctcatactaaaatccaggccttggaatcaaacctggaaaatcttttgacgagagagaccaaaatgaagtctttaatccggaccctggaacaagaaaaaatggcttatcaaaagacagtggagcaactccggaagctgctgcccgcggatgctctagtcaattgtgacctgttgctgagagacctaaactgcaaccctaacaacaaagccaagataggaaataagccataattgaagaggcacggcctcagcagaaagtgctccttagaatactacagagaggaagagcctgcatgtcgctggcccaaggctggaccctgaagctgatggaaccacctaatactggtgctgagcgcctagtcacagcaggtggacctcgtgctcatcagagcatgccaatcctaagccattggacatatgtagactggtttttgttgttgctatgtacatataaatatatatataaaatgaacatagttcatgctttcagataaaatgagtagatgtatatttagattaatttttttagtcagaacttcatgaaatccacaccaaaggaaaggtaaactgaaatttcccttggacatatgtgaaatctttttgtctttatagtgaaacaaagccagagcatctttgtatattgcaatatacttgaaaaaaatgaatgtatttttttctccaaagaacagcatgtttcactcaatggtgaaaaggtggaaacatttatgtaactttatgtgtatctgtcttgatatctactgacattgtctatatga

SEQ ID NO: 14061 - DNA, 1028 bp, Homo sapiens
gactagtgtgcctggtgatgcattgctccatgttgcctgtggcttgtgcttgcccgtgacagaacttgtgaatggcttgtgctaccagttggttgtgaagtgccatgatgtgcagctctccttataagtgatatgtttatttgctttcaacagtgatggagaagggagaaaaaggacctcatctacctgcagcaatgagtccctaagtgtgggaggaacctctgtcactcctcgccggatctcctggcggcagcgcattttcctcagggttgcttctcccatgaacaaatctccctcagcaatgcaacagcaaggtctgtgttgcactccctaaggaatttatccctctgagtgtcagaaattagctaatggaatgcacgtgctgtgtataaagagatttaagtgattacagtgtagaaatatctttctgtatgtgatacagtggtttctctttcaggtatcattagaaaacattaggcattcaatacctgcttgttgaatgaatgaatgagtgagacagtttccaaaaacctgtacttgggcctactccacaaggtagacggaactgtgatagtgctaggaaagaagctgtatgtcctttttctttctttctttctttctttctttttttttttcccagagattgggccttgctctgttgcccaggctggggttgcagtggtgtaatcatagctcactgtagccttgaactcctgggctcaagcaatcatcttacctcagcttccaaagatctttttattattagaaaagcaacatagccttttataagagccacacataaaacaaactgacatagaaatattgagcaataaaggaatatatacaatatactaggcaaatactgagcaaaagagagcacaggcagctctctttgagtaattgacctattaaactaaagcaaaagcatccaaagaggcaagcacatgtaacagtaaacaaacagatagaacaatcatgagaacatacataatgatgtagctttgagagctagaaaataacacctaaaa

SEQ ID NO: 14062 - DNA, 1132 bp, Homo sapiens
agggatgcgatctcggctcactgcaacctttgcctcctgggttcaagcgattctcccacctcagcctcctgagtagctgggattacaggtgtgcaccaccacacctggctaatttttgtattttcagtagagacaggattttgcccatgttggccaggctggtctcaaactcttgacctcaagtgatctgcctgcctcggcctcccaaactgctggaattacagatgtaagccattgtgcccagcctcagggagtttttctaaaaaaaaaatttaattataattttattttgacatggagcctcgctctgttgcccaggctgaaatgcagtggtgcattctcggctcactgcaacctctgcctcccgggttcaagagaaccttgtgcctcagcctcccaagcaactgggattacaggcacctgtcactaatgcccagctaatttttttttttttttttgtatttttagttgagacagggtttcaccatgttggccatgctactcttgaactcctgacctcaggtgatccgcctgcctcggcctcccaaagtgctgggtttacaggtggtgagccaccgtgcctggccactgcctcaggagttttgaacaatggacacatattagggttatagtgttatccaggatgcataataaccagagtttgactatattgagatatatgtatcaagtactgtactttctaaagtatcacgtcataatacttactctctgcatagcagctcagaagtcttttttttaactttaatttagccaatccagaagtaatgtttccataaaatagatccagactagaatgaactgaattgcctgagtaaataaagatacgataggcagatgctgaattgctcttctcactattaattgcctcaacactattgagttcctttgagtatctgagagtggctgttctgtctgagctttatttctgacctcagcactgaccttttgattccatcaaaagtcttataccttcatttgttggtatcatcacctgtaaatattggtatccttattgttctctcaggcaaactcagactgtgaaacttaaaaatgtaagatattcctgccactaacagcaacaattattgtgaggtcttccagcagcaaatat

SEQ ID NO: 14063 - DNA, 1090 bp, Homo sapiens
gagaaacaccataaaaacaaattaagttacctcatttactaggcgaaacaggcaaggttaaggcatacacaaaaagaagagttaattcgtttgggtggaaactcttttgtttttcctttcagaaaaatagaaaaaacaagataaccatgcagttgttttgtctgaaaacctgctgataacacgttacgcagtgtcttgatgatgattctagagaaacaaagtcagcagatttgaaaataacatagcattagaacttcctgttagcttatgataaaataccagggttttaaaagtcacctaagttactttcatacatgagataatatttggctatattttgttacataataaattaaagctgaatatgaaaattgttataaattgtatctagaataaggtgatatgtataaagaagagtatatataccataattgacaggcagtgtccacttagaaaagatcttacacagtatttaaaacataatttaacaaaaagttgcttgatatttggtgagaaacagtaaagaggataaacttggaatgattttcttctttctgtgtaacacagatcaaatttatatcttagaactcattttgtttctcttctttacctatgaatttgttacggaaaatagggttaagtaaagatgctcgttggagagaaaaaaaaaaacacaactcgatgtaaaaggagaaggctaatttttatatcgtgtgttacaaaatttgcctgcatttcttctaaggatacagttttattttcattgttgttttctgaatgactcgaaatttaaaaatgagatattttatgatacaaaaaataaagttaacagagttcattattctcagatttttttgctgtgtgtgtaaaggatattaagtagtcatatgtatatcaagatatttaaatgatcacttcatatatatttactcaaggcaatagaactctttttttttccaggaaaaattattttcaataattaaagacatcaatcattttagactataaatatctcaatccttccctctgttttccacattttataatgtataagttcaaacaatttctatcactataaaaagatgctctc

SEQ ID NO: 14064 - DNA, 1041 bp, Homo sapiens
acctataggggagctatcacttatacaaaggactccgtgtagacatatagctggatcttgattttctggagactgaagtttttatagttttaaatatcttttttttttttttgtattttcttagagacggggtttcaccatgttgcccaggctggtctcaaactcctgagctcaggcaatccgcccgccttggcctcccaaagtgctaggattacagttgtgagccactgtgcccggccagttttagatacctttttaaagaaaaagaaaagtaataaacaattatgaattcagaattgttagggcccttcccaaaatctcgaagggactctgaaacttaagctttatgcacttcaaggcatgcatgtatctgaagggagtaaaaagaaggacttgtgagtcactcagggttgttttcctaagtccctggatcacactctctgataggattttttccttcctcctttttatgttgagtaaagatagcagtaagacagcacagtactctgatattaatagtaagaacaaaggtagtaacagtaaggcagatcctctgtaggcctctccatgtgcgaggcactattgtgtttcacatgtattagcccattccatccatatgaaaaaaactgaatctcttttacacatgaagcagctgagacactgagacccgtagtggggtaataactgctgtattcactttgcttagaaggggcagagccaggatttggacttgcctaattggcttccaaagcacctggataccttttctctaagagagtatccaaaggcagggaccctcagggcctggaagcctcctggtatctgtgtgttttccaaacagttactttcatttaagtaagataactgttaattctaagtttgttttatgcttaggtacaaagtacaaagctggaagaaggatcacatttagataaacacaaattaataaaagtattgttagtgaggaagatattttaaaaaaccagatagtagtattttatttcactcattcagaattgtagtattcttgtcaatacattt

SEQ ID NO: 14065 - DNA, 1085 bp, Homo sapiens
aaacatttttgaatgttgtacagggtatagaaggtgtcaggttccgcttaaaataacttaattcctaacaatactctgtagagagtctttaattctcagcttgtgagatttgagtttccttggggggaaagaaaagagtgactgtcttttttaaacctattttaaagatttcctaagaaggagattccggagtattttggtaaatagtaccggtgtgtaatatcagaagtttgctttatcggaagttcatgaggctttttttcacaaatgataatattttattatagaaaaagcatcccaaatgcaggatttcataaacactcgtaggtgaacaagtacagcttcaaaagtaaattcagagtaaagaggcaacacttacaaacattttgccttaaggagaaaatgtgatgttctcctgcagaagtaatcccacacagaacacaaatgtggctccatatcatgaaggcatcagatttgctttctgagctcagtatgcccatttcaacaattgaaaatgatggcaagaagtagcattgaatatattactacttgattaaaaaaaaacacacccctgattaaaaaaaaaaaattaagagacagggtctcgctctgtcatccaggctggagtgcagcagtgtgatcacagctcactacagccttgacccctggaagttcatattttttcttttttgttggtggtggttttgtttttaatgaactcaaggtatgtcattaaagcctctctagtctttggtgatgtattaactgaatttccccttttcttggggttatcagatttgttctttttttagttagtcacagtccttgttgttaatttttctgaatgggttattttcaaagattttaattcattagcccaattacagatacatccttttgctgaccatttagaagaaagtatgattataacttattttttaaaattactatttttagaaatcatgaagtgaggaaagtttgcatattttttaaaaagacagttgtttctaatctgaaaaatatttgtatcttataataattgaagactaacttaattttcatacgttttttgacagaggaaagaa

SEQ ID NO: 14066 - DNA, 1071 bp, Homo sapiens
tagttagtagagtaaccgaatgtcttgtttttgctcatttgtgtttgaggtatagttgtagtgtccatgggatggtgcagtggtatttgcatcacataattgttgcatgtgggcccttttgttcccattgactttcagggccattttgaaacctgcattaaagaaaatttctgagacattttcttctagaaacaagcatggtgttagcagattcaaagcatggtgttagcagagaatcagaaaataatttgtatatcagacctcttcgttctatggttttggagaacaaagtctcacaagtagcagatggccctagctgtcattcacatagagctccagctttcataaaaaggtatgtttcccggatacaatctggggcctatttgccatttaacggcctcactctgtttgaagtttaaagttctccactgtgctgcgccaacagtttttgatatttatttagcagctggctaggaactagagaatcttgtgttgcactgaagacttgatgttcacactttgaatcagacagaaaaatttatattatggctaatatgtactgtttatgaagacagagatgtatatacatgctccaaatgattaaaatgaaaagttgtaaacaacacagttaaccctcagtggctcgtaaatttttgtgacaggataaatgctggttacacacgtggtgctattctctgtgtttggcctattggaatgcattgatctatatttgtaagctgaaatgaaattaagaaatttaatttatattatagttattgattaattacattgctctgtgactgtaccagaataatacatacagaaacatattactggttgaagtaagttttagatggttacttgtgggttattgccctattactgtttctatagaaatgtaaaagtttacttaaaagtcaccagaaggtcaggtgcagtggcatatgcctgtaatcccagaactttgggaggctgaggccggcagatcacctgaggtcaggagttcgagaccagcctggccaacaaggcaaaaccccatctcgtctctactaaaaatacaaaaattagcca

SEQ ID NO: 14067 - DNA, 1046 bp, Homo sapiens
accgttgggtttagcaatgtggcagtcataccggctgctttgctggggtggcgggagtaattgcctgatgttatatgggttcaagaaggaaagggaggagagaaatcacagatagcaaatgcaggcaactcttttggagtttaactgcatctaggaggagagaattggcgtagtagttagaaaaggaagtggggtcaaaagaattcttttaggatgagagataaaaatagtgtgtgtgtgtgtgtgtgtgtgtgtgtgtaaactgatggggaggatagagtagagaaggaaaaactgatgttgtagaagagagaggggagaactgctacagcagtgtcttaagtgtgcaggaggccatgacatctgatatacaagttgtttgtgtgtgtgtgtgtgtgtgtgtgtgtgtgtgtgtgtgtgtggtgggggaataagtggccttagctagtgtgtttgtgcatagtatcaggaaagaaggcatagtgtaagcacagttagatgtgaaggtcagaacttgtggaagctctctttggatatgtatccaaagataatatagatcctcaccttccctcccctcccctcccctcccctcccctcccctcccctcccttccttccttatctatctatccatcctcacacaaatacctatacatacaacatgattttcacgcactaaatagaagagaaagatgaggtttttctcttttgacaattgctgccttatattccttgaagtttgctgttattttctggtctttttgtaaatctctttgaaggtcacatgcagcatccttaagcttccatcattccaagtcttgaggaattactgttagcaaggcagagcgttagattccagttccctttcatctttgtgttttaactctggggctgccattactaaatgagaatgggaatctgtaagtgagtgaattgctgaaggtgtcagtgaaacagtctgttagtgtcagaaattagtattagcacctttgagaatactcttcagcagccatggtgtaagccctatttttaggtgattccacatcc

SEQ ID NO: 14068 - DNA, 1023 bp, Homo sapiens
tatggtaataaatcagtgacctatcctcacacctcatactttacttttttttttttttttgtgagatggagtcttgctctgtcacccaggctggagcgcagtggcatgatctcggctcaccgaaacctccacctcctgggttcaagcgattctcttgcctcagcctcccaagtagctgggattacaggcatgtgccaccaggcctggctaatttttgtgtttttagtagagatggggttttaccatgttggccaagcttgtctcaaactcctgacctcaggtgatccgcccgcctcagcctcctaaagtgctgggattacaggcatgagccactaggcctggcccatactttcgatttgctttctttccatcccatttcagtcttcacattgttgactttgaatggcctttctatgaattttttcctattcacttctaaatccctattttaaggatcacctcatatctggattattgacatagcattctgactggttctaccctgctctattttctcttcccccaaaatacacacacatgcatatacacacagaccacacccacacagaccacacctacacaccatcctgcataccctttcttctcccaacataaacacacacaaacaccaacatccccccatattcttcctccatataatacacacatgcacatacacacttcattaattgatctagttgatggtcacattaattgtcctaaaatacttcccctcatttcagcttactaaaaacttttcgtgggtagctcctcatgcttatgggatgtggtctggacttctcagtctgactttgtaggcagttcacctttcagttcactttgttgagaattcttcctctgctatgcccttggctttctgtatgcaggaggagatttatgtgcttgttatcaagactttctacagagtgacctggcctttgtttaaccaagtcagctgttttagtggtgtcatctagaactcattggagattgttcagtggcctaggcctaccaccctccctc

SEQ ID NO: 14069 - DNA, 1012 bp, Homo sapiens
cttaataggtaacaagctgttttaaaattttatgtgcacaagtccatgtcttctttcatatcctatttctagaatataaattatctgaatctttagtaccagtacagatcctgaaacattatagatactcagtaaatgttaattcagtgaaaaggcaatgatttgccttttgaattccatgcaaatagttacttagtaaagatctttggtaagaagaatgcaatatgaaattctttttattacttttcatcattacagttgttacctaactctgatccttagaccaacagaccaaaggttgggatccttagtcccaacagaccaaaccaaaatggagttactcatgctgaagttcccaggcaccaagtagaaattaagttgtttatccaaggaagatgttcttatctgaattttatagatgtgaaaataagcttttgtgtgacagttaggtatcatactgaaggtcacctgacagctttagcgacataattgggattagaacaggggattaagatcatttaggaagttaaagaaaatagtacaaaagagttttctataaccctagcacccatatacttgacaggttatggaaactgttttctcaaagttcttcagaatgaaaattgcatggaaacaaagccaaaactcaggttgttcataatgataatttgcatgtataattactagcttctttatatcaactagctaattacaccagttataatttctagataatcttctataattgattgtttaaaggaatttagtacagctgttgtaaagcccattgatgcctcatttcccttttattctccctgggacacctccagaaatagcttagcttaagcttgccaggagtgttcatttgctgggcacccctcaggagttgagtttgagtccagcttattttaaccacaaagctttggttcaccttgtctttcactgaatggttatcagcaaggacattctgagttacactggcaagattgtgggtggagtggcatgggaaggt

SEQ ID NO: 14070 - DNA, 1554 bp, Homo sapiens
aggaaatgtgctgttctagatattttgagacattaattattcaataaccacttgagtatttttgagaatagttccatgcactgttctatgtgttgtatggaatagagtgatgtacagtatatacacatagattatttaaatttctgttaatatgtaaaactaagaaatagcagttacctgtgtgattatcttctctggtgtctgcgtgatattattagaaaattccagtttcggtgtagtatgaggaaaaagcatgggctttagggttcatcttgtcctggggctaacacttgactcttccaatggttaagtgtctgtgaccttgggcgagtgacttttttgggggtgttatttggaaaattgagattaatatagctattcttatagattttatgagggtaaatgatgtaatgtacataaaatgcctagaaaactggctggcccatagtaagcaattaataaatgaaagccattaatatcattttttccaatattgaaataaaaagtagagaaatgtagacccatgggtcatgattaatttatattataaaataaaatattaacacaccaccaacacagaatttgaaatacaggtttatgaacaaacatccagactgcagtgataaatgatcaaccccagagccaggggtattgtcttttatttactcgttgtcctttgagttgttttgtaagtgttaaggtggcttacagaaaagctggagaatgtaccattgttgttttaaatccaggattccagatttcatcagggtgtgcagtaacaccaaaagacatgaaacatgaacaacaatgtcttatttataatgtgaaattattaaacttttgatcaccttgttttttccattcccttggactttattattatcttatctaaattatgatcacagcatttaattttctactaaagagttagaggccaggaaaggtggctcaagcctgtagtcccagccctttgggaggccaaagaggggcgatcgctcaaagctgggagtttgagaccagtctgggcaacaaaacaagactctacaaaaatacctcaatgagccgagcatggtggtgaatggtggtgagtgcctgtagtcccagctatacaggaggctgaggtggaaggatctcttgagctcaggagttcaaagttgtagtgagctatgatgacacctgactgcgctccgctttcgcaacagaacaagactttatcttaaaaaagaaaaaagaattgtatcatttgcttcttacagctacatttttccacctttccctccacaactaaatgtatgttctttagcttttgggtatatccaatatcagcagttactttgcctttgtcctctgttaccctagcatctacagcttttttttttttcagatggatatttttttctactatctgcttataaaatgctttaagaagactatgaaagttatcctgttgtcacgtctgtatcttcttctgattcccagtacttggatttcaaagtagctggtagtcgttaagtgcttggcaaggtaggtggaagaccatgttaaacattcacc

SEQ ID NO: 14071 - DNA, 1034 bp, Homo sapiens
ggtaacaggatccacatatgatttttctttttcgatattattaaataagaatttttttttttttttgagacagagtcttgctctgtcctccaggctggatggcagtggcactatcacggctcactgcaacctctgcctcccgggttcaagagattctgccatctcagcctcctgagtagctgggataacaggcacatgccaccacccctggctaatttttgtatttttagtagagacggggttttgccatgttggccaggctagtcttgaacacctgacctcaagtgattcacccaccttggcatcccaaagtgctgggattacgggtgtgagccaccgcgcccagccaagaatctttttaaaatagaaaatgttttttctacctagtggaagtatacatacatatatatataactacacttataattaatatttttaaggagattgaataacttggtttaaatatgtctgagtggaactcaactatttggcagtatttatgaagaagaaaacatgactcggtgaagaattcagatttaagttttaattgcataatgttattattgtattaaaaataaaggctatgatatatgaaatatattgcttgttcgatatcctttggaaatttgaatggtcagaaacaccttgttaaactaaacatattggttaaactctaatgtgctgctcagtgcttgaggatacttgaaagcaagaaaaatgctacctaaaaatcttatttatactatttataaagtaatataatataaaatttaattaattcaggaattatgtattatgactgctttgtgccaggaatgttagaaatatgaagaataaacctcacagaagctgataggaattttaatgcatttgaaaataattttcttgaaattttgcttatttttggcagaaaagactaaaacctaccattgccaacatttttataaatgtaattttatgggtttattaaacctgtatttattgagccctaggccctcgagacgctatcccctgacggccgcctcaggcttcct

SEQ ID NO: 14072 - DNA, 1100 bp, Homo sapiens
aggcagtttgggataaatattgcctgtgtcaagtgaaagacttttaagtccttcttgtaggtcaaggattatagtgcttaatttctaagtcatggtcttgattgtactccggttcctactttgagaggttacaaaggaaggtttactgtattctcccatttctaccagtagtttaacacaggggttctcaactccaggtgattttattccccagtggacatttagcaatatctggagacatggagacacttttggttgtcaggctgttcatgtgggcactataggtgtctaatgagtggagaggtcagggataatgctaaatattctacagtgcacaggacagcctcctacaaacaaagaatgatctgggcaaaagtatcaatagaggaccctggccctaaggtctgtcagtattaattaatacataaaccatttaattagttaataaaatcttaaattgatgtataatatatatcccatgtcaccgacatccatattaaaatgtagaatatttccagcactcagtgctttcttgtaccctcttccagttgatacccattcccccttagaaatcattatcctgatttctgtcatcatagatgacttttgcttgtgcctgaactttatataaatagaatcatacagtatgcactcttttatgtctgacctcttttactcaacattgtgtctgaaaggtatattcctggtgttgcatacagcagaaacttgcccttttttattcttgtagtatgtatactgcaatttagttctccatttactgctgatgggctttgtattgttacaaacttgtgattaatatgaataaaggtgttatggacatttttgtgtatgtcttttggtggacgtaggctatcatttctattgcatatatgcctaggagaggaattgctaggtctttggatagcattggtttgggcttactagatactgccaggtttccagagtgttggaccagtttctactcccaccagcaatgtgtgacagttctaatagctctacattcttcttagtatgtaatattgtaagttctttcattttagccattcttgtagggaatgtatttgtatctcatggaggtt

SEQ ID NO: 14073 - DNA, 1021 bp, Homo sapiens
tatgtctgaatgggtacagcctaatcttgtatactgctagtatccagtctgtaagattattgtcattgaaggaataaacttggctcaaccatttacttcattccttatctctctccttttttgttgtttttttgaagcaggatcttgctctgttacccaggctggagtgcaatggcgtgaagttggctcactgcagccttgacctcccaggctcaagtgatcctcccaccttagtcaccctagtagctgggactatggacatgtgccaccatgtctggccattttttttttatttttagtgaagatgaggtctcgctgtgttgcccaggccagtgttgaactcttgggatcaagcgatccttccgccttggcctttcaaagtgctgggattacagacgtgaaccactgcctctggcctctctctcttctttcttataaccagtccagttactcagagaatgctcaagctccataccgtgggttggtagttctcatccttctctttgtctgaactccatctctgctttccagctctctgaacttctcatcattcctcgtgcccacctggccttccacatctctctctacacacattggtctttttgttgggaatgccctcttgttcacctggtttcctgatctttacaaaccctattcacaagtcacttcctttgctgtagtcttcttgatatcaatccccatcctccagatgaaagttgttccttcctttgtgcttccctgtttatggctttattgaggcagttacagagtatttttattgttgatttgtaagcctctcttcactagtttgtaaactcactgaaagtatagatagggccatttttgtatccttagcatctaacacaatgactaatatgtattattattattttttttttttatttttatttttgagacggagtctcgctctgtcgcccaggctgcagtgcagtggcgcgatctcggctcactgcaagctccgcctcccaggttcatgccattctcctgcctcagcctccca

SEQ ID NO: 14074 - DNA, 1026 bp, Homo sapiens
tttctacatttcttcaatgtttggtcccttacatggtgtaggagagtctcatacagtaataagttctaaacagcttttctttttacaccattgatgaagcagtatgtggtttatgtatgcgtttctctgttttgtcattagtttttataataattgaaatgatttttggaaacccgctttccattataatcttgacccaaaaacatagatattgctgatgatgtgttgttcaaagcagcaaacacagctgcttgttaaggcaaaaggcaaatatgaaaatagacagtttcacaacatgtttgcttatttacaaaggctgttttcttttgttcttggagtagaggataaacacatcatttctgtaaagggacaagctgtaatgtacatattgagtatgagagttacttgttagcattgatttgagtcataatatattaccccgtttacttaggaaccagtcaggttaatagattttttttgtgcctgtgattgtaccagttagtagtttctctggaaatcttgttcgctatgatttttcttctgaaagcagaattgattctagatattggcagtggaaactgacatatatatgtcctgtaattgttttttggctgcttacatttttcagatgttttttttttaatttttaaattattattatttttttttgagacagagtctcactttgtcacgaggctggagtgcagtggcatgattttgactcactgcaacctccgactccctggcttaagcgattctcctgcctcagcctcccgagttgcttgggttacaggcatgcaccaccatgcccagctaatttttgtatttttagtagagatggggtttcatcatgttggccaggctggtctcgaactgctgacctcgtgatctgcccgtctcggcctcccaaagtgctgggattacaggtgtgagccaccatgctggccatcagatgatatatttttaaaagccacgctactaccgtgaaagagaattacaacaaatgctttgcatatatttagatct

SEQ ID NO: 14075 - DNA, 2005 bp, Homo sapiens
atttttggtagagacggggtttcaccgtgttagccaggatggtctcgatttcctgacctcgtgatccgcccgcataggcctcccaaagtgctgggattacaggcgtgagccactgtgcccggccagttttcttacctgctacactagaatgcagttattgaaaattagtttttagttgttggtcttatcagcttttatactatcactttttcctactcatattaaaaatctccacaggtaaatatgcttattaagtttgtaaaataataattagtgctgaatgcacacttgggtatagttatgccagtatgtactttccattttaaggggaaataaaaaaagtttgtttgatttgttgggctggtaaggctgaactctggtgtacctttgatttagtgtctttaagtatggcgggggaataaactatgagtctatagtatttataaccattataattttaggttagaataaaagatcattaggatctacatttaaaaacaagtaaaccatgaatttgaatttattttattgaattataaagtatatgaatatcttttaatatgtctttgatatctgtgattatatgacagggacaaaatataggattaaaactttggttggtttcatttcagataatcttgccataggtttgtgcagtctcagcagaaggaaatcagggttgttattactgttttactgatctcttccaagtttcacttcttgcaagatgttggggttggaaagaggatctctaagtaatggaatctttctggctaaaaataggagcctacattggctgctgctttagcgtttttattttgtggatacccttaaccagttgaatagtcttcacttttaacttttgtgaattttcacacaaattttaaaaattctctaagttaggaccatggaaactttgtgctatcaatattacataatttgtgaatagtttactatcagtctcagattctaagtcaaacacagtgcttctggtcgaacaaatctagaaatcttctgtatctcacaattgtatcttcttttgtatcttacaattgtatcttcatatatatttttaataatgggttatgtaacttggacaaatacatttatggctgggaccttttaaaattcagtaaaaattgggaggccgaagcaagcaaatcatttgagaccaggagtttgagaccagcctggccaacacagtgaaaccccatctcttctaaaaaaatagcaaaaattagccaggtgtggtggtgcatgcctgtaatcccagctacccaggaggaggctgaggcatgagaattgcttgaacctgggaagtggaggttgcagtgagccgtgattgtgccactgcactccaacctgggcgacagcttactctgtctccaaataaataaataaatatcaatgagtaaattgtttttggtccttacatggctcccagctttttcaactcatctcttgccttggtttcagtcatttaattcccattggctgggcagtctgagagcttttcctgagtttacctgaattaaactgatagcctttctccttgattctccaggtaattattgctcccagatttccagtagcaagttctttaggagactagtttggatccctcattattctgtgttggaactccctgattctgctgctccctttgaagaccacccaatgcttgttgcctaactctttacagattgtgcactacttgcctgattggatttctttctagtcatggaagctggccttctttttcctgagagagtatctagttatggtcctcgccccttcctgttagctccttctaaggctgttaacagattttatttgcagacagattttattttgtacagattttattttggctgtcgtatggaattttgtaaaagcctgttggcatgaacatagtggtggtggtgggcatgacccttttaaatccatccacaattcttttttttatttttattttttttctctgagacggagtcttgctttgtca

SEQ ID NO: 14076 - DNA, 1182 bp, Homo sapiens
ccagttgcatttttccaggactttaaggaacttttcatgactctcgggggtttctgttaaagttatttccccccagcgacatctgatgcatgacacattgttgctaatctcattgatggtcctggcacctttagttctcaacagctgctgttgagttcctcttggtctcattggtaggaagtcaattataaacattcctttattttcctccattatatatttaagcgttagaggctgaactatataaatattaatatgtttaggctcacttcccccttttagtccagtgggagcagtggtagtcatatgactttctcataaaagttcaagaaaacctctaactttcctgtttattgccttttcccagatgagtgtttgatctaaagatatgaattactatttgctcttaaccaagagatttcctggcagagggttattaatttgaagggccagatgtagcgtctctagagagcatctccagccattaatcggtggttacaaactcaaataacaaagaagagggttgagtgaggaccatggaggactggatagtgggtggcctttctcaaggtgctacttagctccacttggaaattgcatgaataggatgcaagtctagcgttgctagagctgctgatttcccaagagagagtggaaatctgaatttttatatatgaccccgcattttaaagtactggcaaatattgtaaacatttaagaatcctatctgggccaaacaatacacatctgagagatggctttagagatccatgagcggccacttttgatctttggcataaatatttgttgagtggacaagcgcagtcattgacactatgtgctgtttgctgtatttcctttagagcatccaggttcatttgatatggctgtcatagtaggggaagctgggaccatcctttttgaagaatttagcagaaaaattcccagaagtgttgattctgcagctagacatgttaaaggggtcagttcaacatattatcatccagcagtatgcttcatgcagagttggctgtggatagttctagggacccttgaaatcagaaggaagacctgctgtttgctttgttctgagttctatatttgaagtggagaattatttatttggacttaagatcattgttaagagagtctcctaagtgtttccctcagtcctcgacagag

SEQ ID NO: 14077 - DNA, 1044 bp, Homo sapiens
ttcctagaggtcctcactagttctcaatcgcagtcaaatccttaaccggtttggctggtcgcgtcatcttcgcagcagcacctgcaggtctccggtctgggaggcaatttccgagcggggcttagggaaaagttactagacatcgtcagattgtctgcaaagaaggattctacatttggatattgaatggaaagaagccctttttttgcggtttttaaacacacttattggaggcagtgtagtagaacaggtttctaatatcattttttaaatgtttttttcacttttgtttttaatattttttttccagagtcttctaaatctaattaccaaacagtaaactttacttccttaaaaacagatatggtccttatggaacagggagaggagaacttgactatgcagtgattgtgtctttgaaaacagagttttccccctttaatttgtaatgagttttctccccgccatatcaaaagcttccaaaatgctgttttaaaaatggttatttactgtttgcacagtactttaggttctttggaaaaatagtgttgtctaaatataaataaagtctcaggttgcaccatgtggctttcttttggtaactgggaaattaatcgtagtcagatgagaaaaacatcctataaatatggctttaattttttttatttcacaattcttctgtctgtaattgaaagacttagttcaacagttttcacaaaaggcttgtagttgaattgaagaaaataatagttcattgtcttagatttcatcagttactttgaaaaataggttttttttttttgagacggagtcttgctctgtcgcccaggctggagcgcagtggtgcgatctcggctcactgcaacctccaccttccgggttcaagtgattctcgtgcctcagcctccccagtagctggcattacaggcacccaacaatcagaactcctaatgtgaagttatgtttatggcataactgttatgtttatggcaaaatatcgtactaaaattatttcaagatcctaaccacgatttaatgaatttc

SEQ ID NO: 14078 - DNA, 1050 bp, Homo sapiens
acaaggaaaaactgaacaaactgaaaaatcaacaactcctcttggatctgtcagagaagcgaggtcacagggcaaattgctgtcccccaaattggtgagacagactgcgaatacagagaaccacagcttagagcagaagctccacagaaaccagtgcctaaactgaaatcgacaaattactggaggctcccaactctccctcacacctgacatacaatcagatcagcatattgttttctctcactctaaattcacctcctcttgctgccacctgggtccaagccgccattctctttcctggaataccgcagtagccttgtaacagggtcttccaacttccttaaactttgtgcctcacctggcggtctggatgagccttttgcaatgtaagttagaccaggtatctccgctactcagagctttttaagagattcttgtcacactggaaaaaagtcgtaggtatttactgtggcctacagggcccttcgaagatggattcctcatctcttaccactcttcctagctcatgcccctccagccacctgggcctcattgttccctgaacacgccaagcatgcttctccctcagtccagaatgctcttttctccaggtcctgtggctttttcttcattttattcgagtctctttctgttcaaaagccgcatgaaagaggtcgtcccaggttatatctaaatagcctttcttgtcactctgtcaccttaccctgcatttcgtcacgctataatactaccattacattatatttttgtttattgtctgccttccccactagaattctgaaggtcaggaactattttttacatccctaattcctagaatatagtattgcttagtatatactgaatagtgaggcctccctctcttactcaaaacacataggaattaccagttttatctatatagacagtttttatagtcatgtttttatattactagtaacttcagcctccacatcaatttttagtgtgactacagctaatttgtgtgtttacctttttatatatttactttctgattattctttatat

SEQ ID NO: 14079 - DNA, 1037 bp, Homo sapiens
tagaaagggtgtcctgggcagccttgatttatcattttgaaataagcatttattgggaaacaatgaagaacaagatactaattcttcaagaatgattaaaacatagttcacaccctcaaggagatcacagtcatttggactaaagacacaacatcaaaatctccatctgatctgcttgatggagagtttatgaggtgcggctaggaacaggtagagcagagcacctaactgtgatattggggatgggaggcagggttagaggaaggctatgaagtaaagatggaccaagatggactttacctcaggaatgagatatgcacaaggaagcagaaagtcatttccagcagagaaaatagcatgcattaagacatgtgagcatgaaaaagctaggttttctggaaatgacaagaaggtcaacatggcaaaacactgagtggtagggggagaaaacagtggaaagtgaggtaggaaaggtgtggtggaaccaaatcgtgactcgtgataatatttagaattttctgaacacataattatattgatatctaagtgctgtacatgtatcagctcatttaaccttttcaatatccatatgactttggtattattgattatcccttttttacagatgaggaaagtgaggcacaggctcacttttggcaaggggcaggtcctggatttaagtgaagactagctggctccagagcccccctgtgtcttcacgtgccatgctgaatccccacagaatccctgcaatcaaacatttagtttcaaagaagccacagtgtggagaaatgactttggacatgaagctagaatcccgggtgtattagtctgttctcatgctgctaataaagacatacctgagactgggtaatttagaaaggaaagaggtttaattgactcacagttccacatgctggggaggcctcacaatcatggtggaagatgaaggaagagcaaagggacttcttacatggcactgggcaagagagaatgagaactaagcgaaaggggtttccccttataaaatcatcaga

SEQ ID NO: 14080 - DNA, 1030 bp, Homo sapiens
gccgagatcacgccactgcactccagcctgggcaacattgagcactgagtgagccagactccgtctgcaatcccggcacctcgggaggccgaggctggcagatcactcgcggtcaggagctggagaccagcctggccaacacggcgaaaccccgtctccaccaaaaaatacgaaaaccagtcaggcgtggcagcgcgcgcctgcaatcccaggcactgggcaggctgaggcaggagaatcaggcagggaggttgcagtgggttgagatggcggcagtacagtccagccttggcttggcatcagagggagaccgtgcagagggggagacggagagggagaaggagagggggagggggagggggagggagagggagcttgaaacttaattcttatctaatcttaaattctgccaatgtgtaagatatctttaaaacaatcatgtaagtaatcgatctgttctgctttcaatcaacacagcataattcatttatctggtcaccaatggacaatgttctcttcctaaatttgcatatgtgaaattccgttcaaaaacaaaactgtagaattgtctgccactgtggtcagctacctgatgaccatattataagatgaatatggtaccagaagctgggtggggaatatttcaacttcaaaccctaattactgcttttagttttaaagagcataaaaatatttctcatgtctccctctgacaagaaaataactcctttcttgatttgaagaaaagcttgacccaatgatatcttagacaaatggtttgatttcctcatgctttgaatctgataaaagtaattatttgacctaatcacttgtttgtaaatagcaaagaaaaaaaaaaagaattcaagctaaatgatgccatcagattgagtaagagtcaaggcccttgtaggtccccatccagcttgcatgtgagaccttaacaatagtgtgcattcaaaaggagttgattacaattttccccaaactgtaagtactaataaaagtttattatcttactaagtcatag

SEQ ID NO: 14081 - DNA, 1049 bp, Homo sapiens
tgtacacttcagtggcattaaatatattcacattgttgtataactatcaccagaactttttcttcttcccaacctttctttccttcgcaaactgaaactctttatccattaaaccttgactccctattcccctctccttccatcccctggcaaccaccactctggtttctgtttcaatggattttactactctaggaacctcagtgatattgtttggacgtttgtaccctccaaatttcttactgaaatgtgctgttggaggtgggcctagggggaggcatttgggtcataggggccgatccttcatgaatggctttgtgctgttcttgcgataatgagtgagttctcgctttattagctcatatgagatctggttgtttgaaagagacctggcacctctccccaggttcttgctttctctctcactgtgtgacatgctggctctcctctgccttctgctgtgattggaagctttctgaggccctcaccagaatggatataggggctatgcttcctgtacagcctgtagaatcatgagccaaataaacttcttttttttgtataaattacccaatctcaggtattcctttatagcaatgtaaatggactaacacactcatataagcagacttatacagcatttgtccttttgtgactggtttaattctcttagcacaatgctgtagcatgtgttacaatttccttcttttaaagcagaatgatattcttttgcatgtatataccacattttgtgcatccattcatctgttgatggacatttgggttttttcccaccttttggctattgtgaatagtccttctatgggcatgggtgtatgtttatgtgttgagtccatgctttcacttcttttgggtgctggatcctattgtaattctaaatttaattttttgtggaaccaccatagtgtttctacacatgattttaaataaacctttttattatggaaattttaaaagactacacatagtaaaaataataaaatgaattctcctgtgcacaacatcaggtttcaatagttgcttaggat

SEQ ID NO: 14082 - DNA, 1050 bp, Homo sapiens
gtggggaatggtgccactcccctttccctttttgtgccagtggtgatctgccttcctttccacctgaagtcctctgagagattgggatctttcatgttgacaagttcagcaattcttctctacctaaagcaaggggatggagccctgagacactttgaggaaagagtccctctggggcttcagggagtgtataaagcactgaaattgcatgcaaatctttttgcttatttacaaagaggattgatagctttcctcagattctcaaaagtctctgcaacaccctccacacctgccctctaccccctaccaacatcacagatgctccatgatggcatttcaggtagcaggcagcaggtggaagaaattacttgaagtctctggggccttcctggtgcacagctcacatgggtcaacggtcaggtcctgctagtgcttgtcaatgtacagtcatccattaatgtcttcctacggtggttttctgttgaatgtagactcagcatgaacactgtgaacctcttaattgagcctcaccgtagctctgggaatcccaagattgatatctgaattgttcagcactctttcagttgcaagttaatttaaatagaagggcatatttactggctctcataagtgagatattttggaggaagacatggagttcaggggtgagtcagccagtgtcatcaagaatcactttctctctcaaacacaaagatggctaccaagactgcaggcttttattcagctggtttagtagccacaaagtaaagactttccttcctttggtttttttctttctttggtcctccctcccctccccctcccctctcccctccttcctttctcctccccttctcccttccctgcctcccccctcccctcccttcccctccactctcctcccttcccctccactctcctcccttcccctcccctccttccctcccttctcctcccctcccctccttccctcccttcccctctcctccccttctttcttccttccttccccctttccccctccccttccctcccttcccctccccttct

SEQ ID NO: 14083 - DNA, 1088 bp, Homo sapiens
acataataatggtacatgtttgtggggtacactgtgatgttttgatatatgcatacattgtataataatctataatcaaattggagtattagcatgtctgtcacatcacatttatcatttctttgtggcgagaacattcaaaatcctttcttctagctattttgaaatctaaaatataatattgttaatcacagtcactctactgtgcaataggacaccagaagttattcctcctactggtaactttgtacccattgatgaacctccgaattaatattaaaatgtccacattatcccaagcaatctacagtttcaatgcaatccctatcaagataccaaagatatctcaaagaaatagaaaaacaatcctaaaattcatatggaactacgaaagactccaaatagccaaagcaatcttgagcaaaaagaacaaagttggaggcatcacactacctgacttcaaaataatacaaagctatagtgaccaacacagcatgagactggtatgaaaacagacacatagacaagtggaacagaatagagaagccagaaataaatccatacacttttactgaactgatttttggcaaaagtgtcaagaacacaccatggagaaaggacagtctcttcaataaatggtcctgggaaaacaagatatctacatccagaaaaatgaagccagacttctgtctctcaccatatacaaaatcaactcaaaatggtttaaagacctgaaactgtaaaacttctagaagaaaacatagagaaaatacttcatgatatggttgtggacaaagattttttttggataagacctcaaaagcacaggcaacctaagtaaaaatagacaaatgagatgacatcaaattaaattgatgtcacggcaaaggaaacaaacaacggagtgaggagacagcctacaaaatgggggaaagtatttgcaaaccatatatctgataaggggttaatataaaaaatgtgggaggaactcaactcagtagcaaaaactcaaataatctgattaaaaatggcaaaagacctaaatagatatttctcaaaagaaaacataaaatggacagtgggtatat

SEQ ID NO: 14084 - DNA, 1062 bp, Homo sapiens
aatgagatatttgttaaaataaattttccaattttgcagatacaaaaacatcccagtctagtcaacaaccttatattctctccatgtactctttgagacaaccagattcctctttcaacataagttcctttgtctgttgaaaaagaaatagaggaagaatggagttactgaggcattgagtagtgggaatgtatgaagcataactatgaaatgacaaaaacgtttttattttttgtgtttcatttcattgtaaattgacatacaaagttgtatatatttatcttctacgagatgatattttacaatatgtatgttgtgaaatggctaaattgagctatttaatgtgcattaccttgtagttaccatttttatgctgagaatacttaaaatctacgctcttaccattattttttaaaatttcttgtccacagcatgaatattcccttagagtattcatgtattttaaagaatacaacacattattattaactgtagtcaccatgttgtacaatagatctcttgaacttaactgaaattttgtctcctttgacaaacgtcttctacccaccgacccctccccatcccccactgctccaggccctgggaaccaccattctgctctctacttccactagttcagccttttcagattccacaaataaatgacatcatgtggcatttgcctttctgtgcctggattatctcactaaacataatgtcctctagattcatccatgttgttgcaaataacaggatttacttctctttttatggctaaatagtactgcatagtgtatatacaccacattttctttatccactcatctgttgatgaacacttagggtgattccctgtcttgactgttgtgaatacagctgcagtaaacacgggagtgtagatatctctttgagatactgacttcatttcctgtggatatataccccggagccagattcctgggtcatatggtacttctatttttaattttctgagaaacctccatactgttttccataatggctatactcatttacattcccaccaacagtgtacaagggttt

SEQ ID NO: 14085 - DNA, 1034 bp, Homo sapiens
agatcaggattggttccactgtctggggttagtgttttacaaggtcattacacagtctttttgacctcttttgaaggtagagttttagaaggctggatggaagattctgagcctggaattaggaccccatggaggcagttcagtaactaaactaataaagttttgaaaagttacacgtaaagtagaagaatctagtgcgtgggacagtaaaggatcctttctcgtacagaataaaaggtctcagcctgtagcttaaacttatagaaagtgatccgcctgcctgcagaggcgcccttttcagctgctgctcgccagaagcccttgattccactggttgacatggcagcagttactggcaagagggagaaaggacgctgccgcctaagagtgcaaggctgctcaggtctccaagcgccgtaggaggtcacctggcagtgactgtagggagctgggtcatagtgcacgtcgtgggtattaggaaagcctgtattctttcaatgaatgtcagtaggaccttcctttagctgtaagacttggtgggcggggtggggtggggagggaggaaagggtaggaagggtgggaagggagaagcagacatagtcatttatgatttgaaagttggaagtttgtaccatctgtttgagtatatgcacatttaaaaaatatcatatagtaaatgcaaacatgccaagtattttataaagattaataacagacctactcttacctggcagtttacttaacttactgttttgagtcctaaacttagagttgttaatgcttatatataatctaaccaaagagttacccagtagggttttagtttttgaacttttattttcttgttgattataaatcctgattttggaatctattgcgcaaaagaagtttcattttggttacttagacctaagatcacttattaaaaatccttattttctccaagcccagcaaacgttgacttctgggcaaacctgaaaacctgaaaatgccactttcatgcagtttgtttgaagttaagtggaatcctttc

SEQ ID NO: 14086 - DNA, 1029 bp, Homo sapiens
ccctgggtttagaacagagaaaaagtcattgtctttggattttaaggatacctggagtttttaaggccctctttagaacacttctgctcacccctacccagcctttacctcctagaggttgccaatagctgaacttttagttacggagataaaactatgccaactgtactttgagttgcaaagtctaggatgagaaataagccctggaattgagggttcccagctgtctagattttgactaaattttccaaccagagagtaaatttgtgttagatgtgactgactcctaggaagaaatggggaactgctgaggaagtgccatttaccctgtccattttagttactgttaaagagacatcatctaagagagagtgataaacagattgaagaatgaggtaagcaaactcaccaaggaactctgaattatagaagtgcaatggcaatgggggaatgaaagggtgggagcagaaacctacatgcatgatgtcatgatgtatccgttatgtgccagacattgtggaagaaaatgctttgtatcatctcatttaatctcacaagagtcccatgaggttggtatttttgctccattttaagataaatatctgaagtttagaatatttaaataactatgaccaatatctgattttaaataaaaccaggagaaggatacaggttcatcaaactctaaagtgtatgattttcccatctatattttactgtaggaaaagaaatgtattttttaaaagtaaattataccaagtaatgtaaatttaaagtttagcatgttttgaggcaattttcttactgtgaaatattatgcatatttctttagtaactggaaagcaaattggggaaatatatttttcccccttaattatatcaaataaatgatcttacaattacataagaaatcaaccattacagtctagccagtggcttggcttcttgtgcaaacctcacaataaaatatgcagactttctggaaccacatattaaaatctctgcagttgaatcagcccttctttctaa

SEQ ID NO: 14087 - DNA, 1047 bp, Homo sapiens
acttcagaagctatgcccttaatcttagcactatccttcctctttcctgtaatatctttcctttgtaccgaatcacatcgtgtcctcctggttctccttcatcctctctaactgtgcttctcagtgtcctccatgactccttttcctctgccaggccgttttacctggtgttctccagagctctgcctaggctttcttcccacgttgagccctctccaggggttctctgaaggtctcatggtccctgattaccagtcaggggcagacaacttgcagatctgtctccttagctcattctgcatccccaactttcaggctcagacgttcagttgcctcttagatatctttacccaaatgtccatacgcatccagtgctctatgtgaagtatactgaatgcatcaactttcttcctaaattcacttctcctatgtagtccatatcttacatgggaccctatccatgctgaaaaactaggagccatatttgacttttgtcttatcctgcacagtcaatctatatgggaccccatccatactggaaaactaggagccatattctttgaatttctgaagatagggcccaaatcccttctagcttgtagaggttctgctgagaaatctgctgttaatctgataggttttcctttgtaggttacctggtgcttctgtctcacagcttttaagattctttcttttgtcgtaactttggataacctgatgacaatgtgcctaggggaagatctttttgcgataaatttcctgggtgttctttgtgcttcttgtatttggatgcctaggtctctagcagaccccatgcaccattcatctttctatttctagggttgggcaccatgtctgatccagcagatgctcaataaataagcttttgaaataaatgtatttattgaaatagctaaatgaatagaaacggttagtgtggcatgacacggggaattgattaagtaccaaggagccagtgaaccagggattacagattctgcttgggagacccaagtaggcttcacaggagagatgacatttcattaa

SEQ ID NO: 14088 - DNA, 1043 bp, Homo sapiens
acactgggtctcaacagtggtcttaaaacattcagtaaaccatgctgtacacaggtgctgtcatccaggctctgttccatttatagagcacaggtagagtagatttagcgccattcttaaaggctctagattttcagaatggtcaatgtgcgttgacttcaacttcaagtcaagctgcattagcccctaacaggaggctctgcctgttctttgaagctttggagccaggcatttacttctcttctctagctgtgaaagtcctaggtggtaccttcttccaataaaataagggatgcctgtagttgtcttcagtttcttgaaggattgttatcttctcaggggtatagaagtaggctgggtagctctataagattgaattaggatcagttggtaaaaattgcagggaggccgccttgtgttcaagatctaagaataaaataaaaccttctaacagagaaatgggctgggagtgggttggctgtcattggaagttgagttttatggatgtcatataaagtttcttgcattaataaggacattggactggataacttttaaagtctcttcaactctaggattttttaagcacattaaatgtctttggaaacaaccaaaatagacttttctgactttggagaaaaacaaacttttttctcagaacgttgactccgtgggtcaaatctctgactaactattatgacaaaagatgctctggccacgtagagggtcctagtagagtgattttattcaacaactatttcctttgtgcctattatgagttatatgctgtggtaggtgaatgagatacaaagaagatttttaaaaagtggtctctgtggctgggtgtggtggctcatgcctataatcccaacaacttaggatgttgaggtgggagaattgcttgagccctagtttgagagcagcctgggcaacatagtgagaccctgtctctacaaaaaataatttaaaaaatttagttgggcatggtggtatacacttgtagtcccagctactagaaaggccaagatgggaagatcacttga

SEQ ID NO: 14089 - DNA, 1042 bp, Homo sapiens
catgtagggttaggattatttcagttagctggtgatttgaattttttatcgttacatagtgacactatttatagtaatgcttggtccaatactaacatttatttgtccagttttcttttgttaatattccatccgtatatcccccatcttttataccgtcaacccttctgcattttttatttgtcttgcataaagtatataattggattttagaaagtcttctgatgacatccaaagccagaatgataaattttttttaaaaaatgaaaagacaaaccacagagtgggagaaaatttttacaaaacatgtatctgataaaggatttatacccagaatatataaagagctcttatatattccaggtatacgtccataccataagaagaccacacaataaaaagaactggaaaaatggaggagaatgagtcattagggaaatgcaaattaaaaccacaatgagataacattacacactcactagaatggctgaaataaaaatgactgacaattctaaggtttggtaagtatgaggagaaactggaaccctcatatattgttggagaaaacgtaacatgatagagctactttggaaaatcgttttttataaagttaaaaatatatttacccagtgacccagagtcactcctaggtatctatcaaaaagaaatggaaacatatgttcacacaaagacctgtacgtaaatgctcatagaaacactattcataatagcccaaactggaggcaacccaactgtctattaattagtgaatgggtaaacaaacattggcatatccctacaatggaaagctgtccagcaatgaaaagcaaaaaagtgctgacacatatgtggaagaatctcaaaaccattatgccagtgaaagaaggcaaacacatatgactgcttattatattatttgatttgtccgaaatgtctagaaacaacagaattatagagatacatcactggttactatgggctggaggtgggaatggggattgatcccagataatatgagaaaatttcttggagtaaaaggaag

SEQ ID NO: 14090 - DNA, 1519 bp, Homo sapiens
ttctcaaatgttacaaagctgtttaaagaaaaaggtatatataagtaatcagaacacttagaagactgatagatgtcacacagtggtattatagaaggataatacagagccaagatcaaattaaaagacaataaatggaacagaagggaggcagtgtttagctttgtataaacttttaggtttgctctgtaatctgctaaaccatatacattcttttgtgatatgttattatgtatgtggcacttgaggcactgtatgtaaagtaaggaatgctttactagttctccttggttttatctttgtttaaactagctttaaagtattaaacaataattgaaatgaaaagcttacctattttaaaaagccaaatttaaataaatatagaactttaaaatgtttatcagttgtttccatgaaagaatattagtttccagtaaattttagtgatggctcactcacttttctattttggaattacatagttatgtaagtaaaatttttaaaaatcataaagggagcaccattgtacagtctagcataaacagcaaattttaaagaggacatatttaagttcataatcatatttttcagtaaatattgctcagtgaactggaaaactttaatagaaaaatgtctgcagttttgtgattgttaatttggttaaaccgatattttatattatttaagttaggtaacattttatattactttcatatgaataaaagtaatccatgcattgtagagtctataaaatgttgagttttaaaagatgatataaactttgatgctgggcactagtgctagtagatattactaccctcctgagggaaatcagaaatgatttaaccccggtggaatacattaattcttaaagcggctcttttcagtggtgtgacttttagattgtgtctcagtggttgaggaagctaacagtcttagatctacttttaaaacggatggccttcttaagaataaagcaaaaggtgattttctacataatttttgctttccaaaagtgatgatatgctctcctacagcaacatatgagaagaaaaaaggcttatctagattcgaaaattaacagcaattatagtaatatatcccctccttctaaatagtaaaaagctctgattgtacaagaattacctgtgctagtcaagttgttgtttttccttgaacaactttggaaaaatggatttgacagtacataatcagttctactaaccaaagcttgtatttggaaatttactttttgtacaaattgaattatataatgcttaaaatactttgtcactttataagcaaaatgcatagtacttaatttgtttatactgtaaagtatatgttaaatgcttttatcactttgagaataaaaagttactaatgctgttgtattttactttttaaaaactacacaaacatttgactttaaacttaaaaatgtttcaaatccatatttgatggatataatatttaatattaaacaatgtttatgatagactcgcctttttgaagatac

SEQ ID NO: 14091 - DNA, 1028 bp, Homo sapiens
cgagaccctgtctctatttaaaaaaataaaaaatcacagtggtttgtgtgaggcttgtcatgttttgtttgggtgatgaataatgaaatatggacatgtttactggatctttaaacaccagattttgtggtagcaaataacttattgaaaaaaaaaaacaatgcatgaatacttgatttatctggacacaagcagttgctgaatagtccaggctaaacctaggcagaacagtagttcttaacccagagcttctggccataactaaaatcttgtcttccctcgaagaatgtaatttcctcttaggtggagattacctgcttattctcccatgtctgtccaaggaggaggagagaattggtggtgggaatggttggatatgtttttgccttttttttcccagaaaactgcacaaaggcgcttaggccactgattgccaggttttacaaataaaaatgtaagatgagtatttaaatttgaatttcggataatcaatgaataatttttagtatagttacatcccttttaatgtttaggacatctttaatgctaaaaaatatctgttgtttacctgaaacttaattggtgtctagtatattatcttgcgatcctaactgggggcaaaggtagggggatcaaacaaaaattcaggactcatccccatacccccagggaagaaggctaaagaggtttctgtttggttttagttatctttgaattgtgtaagagtgttctaatggtaaattgtatacaaagatgagtataatacaaatacattcctctgataggtcttaaagtccagttccacctagtagatttgctgggtcatttttatagccctgtgatacaattcaggtgtatctagtataaccctcataaaatcatttgtgcaaaagttgaacatttttagtagggttttttttttaattttcctgaggaaataatttctgatttacaaaaaagagtcacatcacaggattcttctgggctctcctgatagtcttcactgattatagaccaaggaggcttat

SEQ ID NO: 14092 - DNA, 1027 bp, Homo sapiens
ggcttttctcctcagtattttctgatatttgttcagtgttgtataatttttcacattatttcatatatattatttcctttgggcgatatttttattttataattttgtcttccatgaaatgatcaccatagttaaacaatgtaataaattttcttattttcttagtttcttaaacgtgcagtgaaacttttaggttttcccctcttcagtgaaatgttcacagtacatctgtgagattataagagaggttaatttcattaattttcagtttgaccagccataaaacattcataaagaaattaagtaccttgcttattaaatcagatagattatgatggaaatggaattagaacttggatctttgtccagaccttttggacaggccacatatttatttgttagttttcaaacatgtgtatcatcagtttttcaatcaatttttagagttatgtaggccctcaaaatatgaattaaggagctgtctatgtatatgcctatcttaagtgtgattgaaatagtctcactatgatcttgtgtctgtctcttctcttttgctatagatgtgtcccaaacatggcacagactttttggaatataaatgtcgctactgctgttcagtggctgtttttttctgttttggaacaacacatttttgtaatgcttgtcatgatgattttcaaagaatgactagcattcctaaggaagaactaccacactgtcctgcaggtatgcttttaatattttaaaatcacgattatgatctatataccatagttttatgtaaacattatatgaaagctctgtttcaagtgacagaaactcaattcaaactagcctaaagaagcaggaggaattccttgatccttgtaagcttatgactttctgggtgaattaggaagcaggctcatcatcatgagtgagaagttagctgtgacggagcagatctcatggggagtgagaatgaagtctactaaggattggtgaaaagatggctgttcagcactaaaaagtcatatgaagttcaata

SEQ ID NO: 14093 - DNA, 1035 bp, Homo sapiens
gaagccaagggtacactggttagaaaaggctaattacattgtacattgtttgcgtgttgtctttctaatgatctgtttgctgtagtttaccacagtaagtttagtgccagcattatgctgtgatagaccgaaggtcctttggagacaagacccctgcctatgcctggttgttcctaatgtagagccctgtaacttacttacaggatttataggtcttacttctaaaaagcaagaagtgcttgtccagggcagggtcagggtggaaatctttgaggaaatgagattgcattcttcagatgacacatttatagtaagttttaacctgctagatttcatgtcccatatacttccagaagagatttgagatttccttgaaggagggcagtctgacaacgttaggaagaagtgaatgctggtaaaaattgcttaggttaatcctcagaaatctgaagaagataaactatatatccctagggcggaaaaagtcaatttatgctatcttgctattattgactgtgacacctgaaataggtatttttgacagtaatcctttcctaccactcatgtgttgctttctttcagtctgcattccccttcctccttgcatgcattatttctttttctatttttctgtccctattttaacatctcttgctttctgtatccaataacactcacatgcacttcttagagttgagctagttaagtcattttctattcttcattaatgaggggatatatcattctatataaaactgaagcttaccctttaagcctcagaaatttttaactatttctgaaaacagttgtctttttttttttttttttttttttgagacagagtttcactcttgatgcccaggctggagtgcaatggtacgatcttggctcactgcagcctccgcctgcaggtacaagcgattctcctgtctcagcctcccaagtagctcggattacaggcatataccaccacacctggctaattttttttgtatttagtaaagactgggtttcaccatgttagtcaggctggtc

SEQ ID NO: 14094 - DNA, 1030 bp, Homo sapiens
gaaagtgtaaatatgagggcatatcttaaaaaacattgactatgtaaaaagtaatgatatgtcatggtgatgtacaaaatgataaaagatcaatcctggatatgtatctacctaatactgtaaccttaaaaaaagtaacaattgacagactgcaaggaaaaataggacagtctacagttacaatgtgagattgtcatatacctgtaacagctatctgttcctgcataactaccccagaactcactggactaaaacagttgtttatttgctgacagtctgtgggttggcaattgcagcaaggctccactgagaggaatgactctttcctgttttggttacatagtgtgcttcaagtggtaccccctgagctcttttatcctccagaatgctggcctaggtttgttcagatgccagaagcattcaagaaagagagcacagaagctgcaaagccaaaatggcgaacactaaactcatatgccatgcttctgccaccttccattagctagtataattcacaaggccggtcaaattcaaagactgagaaataaactccacctgttgatggaaagagcgacagagaatttgtggctgttttgtgtatagtaccataacactctttttagtactggataggtcaggcagagaaaaagaatcagaaagtacacagatttgaatgattgacagtcttgatagaatatacaaaacattgcatatagttgtttacattcttttcagatacacacaaatgtctatggaaattgactgtttactggacacataaagcaagttttaacaaacttgaaataattggttttcttcccaccatgtcctcagtctttattgctagtatataagaattagataacaaaacaataacaagaaaaatatttatagggaaattaagtaacgcttccaaatgagttgcatcaaagaagaattataacagaaaatattttaaatggaatggcaataatagtacatctcaaaacttgttgtttggcagagttctagttatagttacgatgaaaca

SEQ ID NO: 14095 - DNA, 1055 bp, Homo sapiens
caagcaatttttttttttttttggtaaaaagtcactttttaaatttgtgtaattttttttaagttagtagaaaacttcctctgaaaacagaacaaatgtctgtgctttatagtaacaccatatataaagtgaattaagttaatgtttccctgtattctagtcattctggaaccaagcaacctatactaacacccagggacatttactgccaatcagttatgtacagtatttatagtctattcaaacaagaatgtacataagcttagagaagtggtgagtaaagaaaacacctaggcagttagccgtctattagaaaatagataattttaccaagggacacaggatttcaaacctggcttgaatgatggaaaaaactccagaaccaacggtgagcaaaaatattccaatttgaattcaggtgacagaaaaaggagctcacgaaaagaatagtttctaaatttgttttagagaaataagaaagagaagggatttctctttttttataaaatgtgtcaataaaggaaattgtatagctctcttaataactttgtaagtatttttaaatgttgctttaataaatagaaaagctgttagtttacttaagcctgaataaaaccattaagttcttttatagagtgtaaatacaacactggtgccaaaaatcagtttgttacctctcatgacaccttgatgcagccatcctccaagggctttgggcaacatttcccaagagtgagaaacctcacagaacactgaagacaccaaaagaaaactttggaaccaaattttgcttcctgttttattaggttttcatgtgtacatatccattttctttctatttggtgcacttacgattatatctgactgtttttcctgaatattatgatacatgaattccaccccagtgcttttgattctaaaaggagcttggaaacctttcttctttttcatttaaaatacaaagtagatttaagaaaaccataagttttaaggtacaatgctgaaatcagtcaaaatgttactgcatttgaaaagatcaaattatgatttaaaga

SEQ ID NO: 14096 - DNA, 1029 bp, Homo sapiens
acaatagatctttagtgtgaatcacaccactcagtggacttaggttagcaactatttgttcattttgaaaaggaaagaatcaaattgtaaaacgtgaaaaatgctaacacagcataattatagatttttttctttttagctgtctggggaatgggcaccccttccaccctgaaccacagaaaatttcatatatctaatatttttcaaatatgatcttatgtatgttcctacccaaaaaagtaactgcttgtatttcagtggtctgtgcaagaaataataagcatgaaccaaggcagtgatgatagggaatgagaagagagaatggctctgagaggaaacctaatatcatgggcttgaaagatgatgatgatagagggctaagcctactacaacactggaaatattttagcttaagcaactggatggttggtgggcttattcaccaaaacactggaagatggaaaagttctcaaaaggaaagaaactgagttcaattttggatttgaaatgttcgtggtacctggaatgttgatgaataaaattatcagacttttattttcacctacctacatctacgattattttaatgctttgcctttaactatgatttacatgtgctgcttttcctgttatgaaagagattaaaaatggagaggatctgtattgccatcatgctttaagttattgggtttgatttaatgcaggcatcatcatgaaaattttgtgggctatcaagatgacaatctattccaggatgaaatgagatatctacgttcaacatctgtacctgccccgtatatatcagtaactcctgatgcaagtcctaatgtatttgaagagccagagagcaatatgaagtctatgccaccaaggtattttagttctctcctgtctgttgaatagctagtgtttggtggaagaaagactttgaactagaaaagagtcctgtagaagttctttaatacatctgtgagccagttttgctaactgctggagcagtaagaaaaagcatacatgtatgactaaggt

SEQ ID NO: 14097 - DNA, 1034 bp, Homo sapiens
catgtcttagaaaataagactatagctatcttttactctttggtaggctgacttcactctgttagtgcgaaatgctgaagtgtaaagaaagtgtgtttccttagcagtcttttatttcgtaaattattcattctgttagcatttaaatgaataccaactgggcacctaccagccttgtgctaggccctgaatgtatgaatataacaaaatcctggcttctatgtactcatactcggatgtcaagtcagacatgttagtgaaacatttgaaatgccatgtgaggagtgctacaatagaagtatgtatgtaagatgctgttagagcataaaagatggagagtatctgaatcttccccaggaaatcagaaaaggcttcccagagggtctgagcctttagtagagtctcaaaggataaatagaaatctgtcaggcaagcgacaggaagaaagcgactcttggaagaataacccaggtgagtaaagacacaaatgaaatctcattacacatttcaggaatcacgggttgttaaaggactggctactggaggaaatatgtgaaagcccgttcaaagtgattggttcacccaagtaatgtcgggctctgtagcccaggttaagattgcattttatcccatgagcagaggaaacagtggaagaattttaaacagagaaatacatgaactggtttgcaattaaaaaatcactgtggaatgtggaagctaatgtggagactagataaaagtgcattactggagatagaaacctgttagtattctgttttcatatattggacctcagtggtgcagcctgtactttcacacatcatgcactgacactccaaaagagcctttcatataccaaaaccaaatttttttcatcagctgacaaatgaaggtaatctagatattgcccactgacatggcttgccgaccaacagttccattttggaaattgtcctctttgtgtagcagagttgtatggtttttaaaattttgtgcttactattacaataaaatgaataagcaacaaaaatgaa

SEQ ID NO: 14098 - DNA, 1032 bp, Homo sapiens
agctctagaatttaaactaacgtgtctatggttgtacagctggtgacatagcagatgtaagacttcagccagaatcttcattcgtgttttaaatgctgtactcattacaccatgctgtacacattgagcacaacttgagaacctacctcctctccttgtttttcccagatagactttttttagtctaagatgatatggtcataaaataatgtcctgaaacagtagaactgttcatttgaaaaagataagggttccgcttgatgtaaatcagacatttactaaatgactttttcacttactatgtgcttattatatattgctgtatatttacttcatattcataaatttttaaacatttttctttatataggaatattcagatataaatgaaaatacctaaggggagatcagctttatttaagataagttaaatatgagaacagcttaggtgacttctaaaggacttttctagcttaatccttaataattttttaactggcagtacaaaaaatatgtaagagtggattctgaagcaggactgccagggtactgatcccagctgtgcaactttttactcatgtgaccttgaccaagttaacctaatatctctgtgcctcagttttcccatttataaaatgaccttataggtcataaccacataaatttgatatgaagactaaatgagcaaataacagataaagctaatggatggtaagttaggtcttattgttaaaatgcaaaatgccttccatgctaaggatcaagttttaacctgggaaattttattcttataaacttagaagatagaagcttctttcaagataaaatgcctcttaaattagagtatcatttaagaaaagtttaaatttttctctgtaattagttaatcatcttttactcttgatgtatagatacagacataaatatggatatttggtgatcatgtgaatcttactattttaatataaaacctggagtgataaggaaagaaatgatatgaagttagtgcctttaaatcactaagattagttg

SEQ ID NO: 14099 - DNA, 1966 bp, Homo sapiens
atttttccaactttaaatattgcattaaagataaaagtaaaatcaaggatgattatatttctcaaattatggtgggcagaagccagaggttgactggtttcctgctatattttcttgccttcaactttattttaaatagcattgttgaaaaactgagattctttaattagtgctaatgactaattcttcagttatctttagttatgtgttttttttatattgacagtactgtagacttgctataaaagctattaataggaaggctttgaaagtgataatagattgtattttgtttatttttctttcctattcaaattttcaggaatctaaaactaatactgatgactttttcaaagacataaactcctgctgcccacaggaagcaacaatgcaagaacaagatatgccattcttgcgaggagggccaggcatgtacaaggtagtgaagacgggaccttcaggtcacaacatcagaagctgccctaaccttagaggtatcccaattggaatgttagttctgggaaacaaagtcaaagcagtgggagaggtatggattcttgtagcttcatgacttctaagatactcatttttaatgtaatacaaccaaagcatctcttctaaaggttgccatttctaccacaggtttttcaatgttaatgtattttatctttacttgtattgcaaatacataatttttctgtgcttctgtctaatgatttgcataattatccttgtgtaaacaatatattaacaaatgatttgtattgtatatataaatgtttggtatttgcacatattttttcattattacaaatgtactataccatcatggattatcatcacttaaaatattctatgtgatcggtatggagatgtggtcatatgcaaaaggtttcatttctttgttcccattcataggtctcactgaagtcctgagcaaataaaattactctttaggctactgtggcatttgcctcagctgataagcttgaagatgtagtgtgtcatgctatttctcagtaagggtcattttcaagttacactatggatactctcaacctaaataatagcaagtcggctgtgttaggacattttagatgcagaaaaaagaaaatgagccatgtgttcttgggtaattcttaaaattatttaggtgttatctttgtgctttgaaagttattattttaaccaaattcataaataagcagtattttacagaactttttattgacttctgtcttacctcaggctgtggccttaatttcagaaactaatttcttagtagaaatgtattggaatgattacactattcagacacgtaagatttttactggttttcagactgagttccctgaaagaatcaagccaatcaatcatgctttttgttatgtaccaggtaaccaattctgaagggacatgggtgcaactggatcagaacagcatggtagagttctgtgagagtgatgaaggagaggcatggtccttagctagagacagaggcggaaaccagtacctccgacatgaagatggcaagttggcttaaatttgtgatttattccaattaagctttcaaatacagaagtttaatgcctattgtattgcttttgttttaaagagttttttgtgtgtttgctttttaacaagcaaaactaaaagttaaaaaatcttgcaactgttaaaattggtttgtaaaatacgtgagtacttaatgcacattaaagaagaaaattaaaagaaaattcgaaacatatagactcatctttataaaacaggcttttaatttcattaatataaatttatatacctctttcttctgtaccagtccaggactgaacgttctatcccttctataataaaatgaaacttcggtattccaactaccaatctcagtacttctcccaggcaacttcatttgattgcattttgtcttagggaaagagcattgaataaatgcatagtgtcttta

SEQ ID NO: 14100 - DNA, 1028 bp, Homo sapiens
tttctgtattgaataaagcatgtattttactattgcttgagcatgataggcacagttctatgactttatgtctgtcagtgttttatactgtttagcacaagaattggataaactttgttttatacttattaatatagttttattaccttttcaataaaatattattttaaatttttaacaagttttcataattgcctttcagtgactagtttgcaattataattagttgtgccaaggcttaactcccagtgttaccctgaatgatcaaaagttagaattattgttataattaattaaatgcactaggaatattattaaataccagtgaagttgggtttttttgctaaatctatggatatttgcttttttatgttgccatgtaatttttaagaatcagttgtgagtgggattaaaacttgccccttccaactatgaaatggcatgatgtatttatttattaaccatttacaaacagacattttaaaatgtttacagaaaatcttgtgagtgtaatagcaagtactatgtaaagtttagacctgtgttactctcaatttttatcttgagtgctctctgtgtattcatgtaggtttgcatatatataaattcttacaaatatatatgatgagtatataaaatgcgtattttacatttattttcggttgtaaatctaagttttttgagtgtttaaaattctcatttccgttaaatttccaatatgtaaccaaagaatattggtaaataaaatataattacagtaaatgtaaattaatttttcttagtacatatttgtataagtaaaaattggttattcatcactatagtgagattcacaaaatattatgtgaaagttaatggtgactttaacattttccctgaccagtcatgtatggaattaacaaagtagcaggtatacagaattcttgaatctacatatttttaaacctgaggattctatttttaatattctactgtgttactgtgtgtatgaacatgtatacatatctcttcattatgaggctactggt

SEQ ID NO: 14101 - DNA, 1033 bp, Homo sapiens
ttgttccttaacaaaacatttttagacttaaacttagagatcctaaatgctctgcatttcctaaactttgagatagagaaaagtaggcctgtcttttgataaaattgattacatttttatcttttgataaaaaattgattgtatgtattatgtttttcttatcaaatttgttagtagcattcagaaacatttccaaatgaattttttcctacttataaagggaaggaaaattgaaaaaaatgactcagactttttattttttacttttttagtttttatttttatttttgtacttcaaaaagtgataagttcacgtaaactacatgccattattattcataatgataattgcattttctatacaatcgatatcatttccatttttattataaaacagcagactggtttctgtcataaaacaaatctggcttgtattagaacaaatacatcctcatttaaagaattttaaggtttctttcttgcattgagtatcttaagctttataacaacgtctggctcttaattttagtaaatggcatgacacactatatccatggagagcttctgacaaaaacttacttatcagacagaatttcttcggtgtgttgtttactcagatggcttcagtttctctttagtaaaataatatttccatgttggtgctagagtacagaaaaatgttgttactgtgcacgcatcttctgcagatgatatcctgttccctttctttgttgatatttttctttcttaaactttgttgctcagaatatctttaatgctagccaaggagtcagggatttggacgtattttcatggacttccaaagcttttttcccccaggtgagttaactgtaaggaacaataatattttattcaggtatttcagcatgtataacaaattttgtgtctttaaaacctttgcttaagattaataaaaccttttaaccaaaaaaagatctatatgaagtgctgcaattgagttttctcactcctgccaaaaagaatgtattattagtttaagtgatacttccac

SEQ ID NO: 14102 - DNA, 1034 bp, Homo sapiens
attctttaatccagtcaagtggacacctagaagtaatcatcacaaccattaactttgaaaaacatatttcttttgttttaggcattaatcttttctttacttttaaactgtctgtataataggataacaaggagaaaactctagtacttatcagtgtgaatttcttgtaacattatttttcctgatgctcctcaaggaaaggggtttctgtgatcagataaatttcgaaaacctggtttgggatgagtatcttttatctgaaatgcttggcaccagaagtattctagattttggactttttctgattttggaatagttgtattacagttaccagttgagcatccctaattcaaaatttcaaaattcagaatgctccagtgagcactttttttgagcatcatgtcagcacccaaaggttttagattttagatcattttggatttggggttttcagattagagatgctcaacttgtatatggtagtctcacttgagacattcacacaatctacattaacatattagggattctgagaagttctgaaatcaagaaacttgtctgactatgtttaatccttatcgtgggaccccttgcaagtggagaagagagaaacagggtggagatagtaataataccaattaatatttcaccaaaatatttgggaaaccctgctttaagtagtttgctttggcagtggaggtaaagaggtactttacattgatgtaattgtatgttctcatacattaatgtaactatatagactcagatatatccagttcatctgtaccattctagagaccttcaccagcagcctttgctgcactcttctttatttcaatatattcataaagcctttagttcagcaaatgttttttggttctgagcatacattttcctgggtaagacaattcctgtcaagtgttaacactttaatgaggattgtgaaaataaaacacgcaaacaaaaatcttatgaagtagaatataagtagtgacacacaagacatacaaattacagtaggaattcgaaagtag

SEQ ID NO: 14103 - DNA, 1050 bp, Homo sapiens
aagaccttattagagggggttgtaataccaaagggaggtgttagtgaagattctaaagtttgtgtgctaatcgaaatgattcactaaattgagagtaattgatgatgcatgagagagaacaaggtgattgcagcataaaaatgttgagggaataagattcacagcacaaggggagggactagctttggatcagatccaggacacttcctccattctaccatgagagaaggcaggggaaagtaggtttattaatcacattgcaactttgaggttgtatctgattgcttattgtctcacagaagaaagaggtgaggtcatgatcacctgagagttaggaagagaggtgatgcaggtttgaggtaagaaagaagtgaaattcaagcattttggagagtaggcaagcgtactatggcagggtggtaggattgccaggaggtatgcaaacaaattaaatgtttgctgaactatcgtaatgatgttgactgcttaaccaaaagtaaaatttccaatatccatcttatttcttttcagacccagtgagaatatgctgatccgtgtcaataatgatgggacttattgtgcaaattggactccaggggctattggactctacactcttcatgttaccattgatggcattgaaatcggtattttctttaaagccatgagctactacttacttcaaataactagagtcaaaattatttttatcttctagttttgcccattaacttgcactagacatatggataggtttcataacttatttgaggccttgttttctctttcataatgagtatttaattagtgcattaacattttgtaataatttctggtgtccgcccaggcactgtagccctcatgactctctccctccatttcctgatgttactagtcaggtgtgctctcttccacgctgctgttaccctgtctctcccctgtgggtgtgtctgtgcctctcctgactgtgagcagaaagcattcatgtttggatcttccagtgtagctcagtgcctggcacataatgacagcaaatatggatgaatgaat

SEQ ID NO: 14104 - DNA, 1112 bp, Homo sapiens
gctaaaaattcttctctattccaacacttgcttaaggaatttagtttctagtctccttacctccctaatcttttagtttcctatgaacatgcttcagtttgtataatttcttttgcaaattttgttaccacaacggaatgcaatatttcaaacatgttctgagtagcctaggtttagagcaggtatggaataccattcccaaacagtatctgtgaaatgttaattcaggtcccaggaaaggaaattttccttatcaaccattcacagatactatgtattcactcagtagtgagccaagtattgtagaggatggaaagatgaaatatggtctcttctttcattactaagtgtgttaataatatgaatttgagggagagtgatgaaatagaaaatacattgtactgaaagtctagaaacatggatttccttttctcacctttgtatggctaaagactcagccttaacttgcgtttttctcatgtgtaacttttgagtaggtaaagtcagctagatcatttctaattcatttttatgaaaacaaaaagggtagagagaaggaagggggctttgagtttgcttccttttactgtaagtacaggaggagttagaagtagatgagcagttggacatcttgacctgaaccttgaaagataatgatttctttgctaatgttgcaggcatacagaagtattcagaataatgtgccaagtttcatgtacctacagcccatttttgtctttacattttaccataattgtttcaggtcattttgttatttttttattaagaaacagattgctacaggtacaattgaagcctgcctaaacccttcctcagacccattaccaccccttccttagaggtaaccactgccctgagtgtagtgattctcattcctgtatatatttttaggctcttactgaatacaaatttattcataagcagtatattttgggttgttcaatacgttttccagaagtttataaaataatatcgtattgtatgtatcattttgccagatttttgcttaatgttgtttttgaggttcagccgtgtagctataggtcattcattttaactgctttaaagcattccattggggatctattcca

SEQ ID NO: 14105 - DNA, 1060 bp, Homo sapiens
tcagcatttgtttatttaaccaacatttcagtgattcagatgcagacatgaaattgtaagtccaaagagcatttgatggatattaaatttgcagcaacacttattaagatgatgttatcctgtcttcagagaggattttcattggtttttggcagatgtccagaggggatcaccaattacagatcaagttaatcgaatcagagatacagatggattaggctgagtttcagttcctgtgaaagtacttgtctacttctgaccaggaacagtggcccacacctataatcccagggctttgggaggccaaggagggaacatcacttgaggccaagagttcgagaccagcctcagtaatgtagtgagaccccatctctacaaaaaaataaaaataaaataaaatttctaagtacttgtctatttgcagtttactattcttgctagaatgtatctcttcagggttttggggtttacctatgcccccttcaattttgggttctctcaaatgccagatgtatctcctagaactctttgggatttttagctctctaatacctttagacatttaaaaaatatatattttggatgttttagttatcttcagaggcaatgttaatccgaattatcaaggtagtcattatttgaagctgaagtttgtaattttggcattttcagagagcagtggtgagccattgaaggcttttgggtagaggaatggcttgattagatttgtgttttgtaacgattgtggtggaatatggacagtgtaattgggcagatgatcaagaaacatgacttggttttagtctctttaggggactattgacttaatttggtgagatatgctgatcagttggactagtgagttgtcaatgaggatagattcaatagaatcagtagaacctggtagctagtggaggtggagtaaagaagaaaggtaggaaataaaagatgaaattcacatattgagcttgtgtccaattgataatggaagaggggcaggttttggttgagaaagatagcagattcagttttggatgaggtgagttttagatacttctga

SEQ ID NO: 14106 - DNA, 1040 bp, Homo sapiens
aagggtctagctctttctcattcaccaactatattagaagcacttgagggaaatttaccactccaaatccaaagcaatgaacagtcttttctggatgattttattgcctgtgtcccaggatcaagtggtggaaggcttgcaaggtaaatgtactttaagttacttactttattttagggctttcatctttcttcatttctgaaagaggggagtcattagaatattaaaatactactttaaaaaagtctggtttatgtatgtttaacttgctgaaatataaaatgatagttaatatttttgtttggcggttgtttgtttgtttgtttttgagagagagggtctcactgtgttgcccaggctggagtgcagtggcatgatctcagctcactgcaacctccacttcctggactcaagcgattcttgtgcctcagcctcccaggtagctgggattacagatatgccaccacacccggctatttttcttttttgtattttttgtagaaacagagtttccccatgttgcccaggctggaatagttatgatagtatatgataagaccaggtgcaatggctcatgcctgtaatcccagcactttaggaggctgaggtaagtggattgctagagcataggagttgaagacaagtctggccaacatggtgaaatcctgtgtctacaaaaaatacaaaaattagccaggcatggtggcacactcctgtagtcccagctacttggaggctgaggtggaaggattgctcaaaccctggaggcagaggttgctttgattgtgccagtgcaatccatggtgaaaccctgtctctgcaaaaaatacaaaaattagccaagcatggtggcacacacctgtagtcccagcttcttggaggctgaggtgggaggattgctcaaaccctagaggcggaggttgctgtgattgtgccactgcaaccagcttgggcaacagagcaagaccctatctcaaaaaaaaattaactaattaaattaaatttattatagttgttaattgattatttttgttgctttt

SEQ ID NO: 14107 - DNA, 1037 bp, Homo sapiens
gtgaatcattttcattgacataagatttgaaaacatgtttcttaaatttcttatttcctgtaatgatcatgttgtttttggtatcattgttttctcttcttagggttgttttccagttcaagagttcaaagaaatcaaataatggtacagatgttaatgcgggtcagatacctcagttattatacaggtatttagcatatttatactgaattagtatggtttattattttgctataatgaagtagaatcattacaaaacgtggcataatagggagaaattatttgaagcattcagcaaattataatatgctggtagaactataaatatatttaacaaaaacagttaatattttgtatatttttaaacattttccatacaggcttaactttaaactttgcctgattactcagattatctgtattataccaataacaatattttactgactttaaaaaaaatctatccattgattttcttactaatttcaaatgttgtaaaagaataaaatttgtcttggagaagtgagattgcagggaagatggggaggactatagatgcaggcctggttgatatattgtagtctcataagactgataaaatgagttggaaaattccctactgttggtaaattttcacctttagctaaaataccaaataataacttgctcatataatatttactatatttttaacattattgaaaaattttaacttacaataatttaagcatgtataaaggcatatgcctgtgtttaccttatttatttctagactactgcaatacttttagaataaagaattcaaatggatataaaccgttactgaaaaatgttgtcattcgttaagcagtaaaaaatcaaaggaaatggtctagaactgtgattctatctccctatctttctttctggtaatcactttgtggttacaaacattatttttccccaaaaggttttttcgtttgtttggtttttatgcaccgtgcaatctgttatagttactgtttgtaatatgtagctctacaaacataacgtgttgc

SEQ ID NO: 14108 - DNA, 1029 bp, Homo sapiens
cctgagaaatggagataatactactttatgggttttggagaatttaaaagggtaatatatattaaaattatatataaatatttttttcttaaggcttggtacctgcttctatatcagaacctcctccatttaaatgccttctgataaataaagtggatgggagttgtaaaacttttaatgactcagaacaagaggatctgcaaggatttggtgtgtgtcttgatcctgtatatgatgtaatttggaggtaagcatctcagtttataaaatagtcaataagttttgatgcagttatactcttatggtaatataaactttatttacaggtggacttttcacatgtgagtactctcctgtttatctaataactgcaattctgtctcagtgattcacagggacctttatactgtagcatagtggttaagagcatgcattttaagcaacactacctaggtttatcccagctccacaacttgctttctgtgtcaccctggagaagttactttgactgtgtgcctcagttttctcatttatgaaatggggatgctaatactacagaggtgcatactaggtgccatataagtgtttgctattatcattataattattaattttactgttgagagttctgttgttatttttagtctgtcatcaatcctgtttatattgtatagaattcattctattttttgttctcataattattattaactatgaggaggaaattatgccaaagacaataaagaataaagaagataattgagcttgccctttaagaatgtgcattaaaaaatactcttactggtagagaaatatacaggattatatgcattctggaaattataaaaacatagagataaataaggcacaaaagagactcaagaaattatgttgcatttgtttgaaatttattgtggtgctgggccgggtgcggtggctcacgcctgtaatcccagcactttgggaggccaaggcgggcagatcacgaggtcaggagatcgagaccatcctggctaacacagtgaaacc

SEQ ID NO: 14109 - DNA, 1032 bp, Homo sapiens
tatttacttttttttttctttttgagacagagcctcactctgtcatccaggctagaatgtagtggcatgatgatctcagctcactgaaacctccggctcccagattcaagcaattcttatgcctcagcctcctgagtagctgggattacaggcccatgccaccacacccagctaattttcgtatttttagtagagacgaggtttcaccatgttggccaggctggtctcaaacacctgacctcaggtgatcctcccatctcggcctcccaaagtgctgggattacaggcgtgagctactgcacctggcccctgtttacatttttgtgctctcttatttttgtcaaaaaataaggacagatcttaaaagagtatgagaaataaatgttgagtgttttggctgcttctctaatcatgtgcttgccatgtttccttccctggttctgtccagggattgaagctcagttgcttccacagttagtttgtggctgtgttttcttgctgtgctacctggtggttggatgagaacgtgaccagagtgttcgcagtgctccaggctcccttgttccagaatgctgtgaggggagagaggtcccgagccaggggtggaagaatatctattgagtcaatgtcagcattcttttattctttttcagctacaggcttactagtgagaaacttcctattactttttaaattaaactcttacctgaccaggtccctatagagagccatacttttaaactggttaatagttatttacttaaaatatcatatcttaccattgattgtgctgtttattttaaaacataaatgaaataatttagggacatatcatgtgaaaacaacattacatatttttctaattgtattcacagtttcagtatttattttggtctttttacatggatattctcagattatatgagttcaatagtgactttcttttatactatcaacttactatgtcaaagtgactttttaaatgaacaatttggaatactaatattttaacatattgtgtgtatttgtcgt

SEQ ID NO: 14110 - DNA, 1081 bp, Homo sapiens
tattttcttcattatcatctttaattatttgggtgcctagattatctccgatttggccagcagtagccccttcaagttggctcctgtattcttgtgacatgccccttcattttttggagtgcttcctttctttccagcataacaagttgttcagggtttatcttgtacaggccctgtatgactgtcctagaatcagccatttctccaagaaccctgattctttttagtggggaatagtattagacactaactgggcactagaagtgttcattgctacaggacgtctttggatctctggtatgcatatatttatatgtccacatatatgtatgtattttagaaatcataggccaggtgtggtggctcatacctataatcccagcactttggcaggccagtgtaggaggatcactcaagcccaggagtttgagaccagcctggacaacatagtgagaccccatctctattaaaaaaattagctgggtgccgtggcacatgccagtggtcctagctgctcaggaggttgaggtaggaggatcacttgagccctggaggtcgaggctgtagtgagagctgtgattccatcattgccctctggcctggacagcagagcaagatcctgtctcaaaaagaaagaaaaagaaccccactgtgacttctacttccaatccattcccacaaggttctttcttacctgtcctgttctatatttatgtactttcttcctcagtaagaatctttcctctcaacaatatcaatatatttatttctcacttagtccccagatatgtctaaaatagttttatatttgctttgcctgtacaagttcaaaaaaacaaactcactgaaaggtcattcttgctctttcccctcccacctgctccccaccccaagtctgaaggtgtatagtcaagcactgtccatgagtggcctggattctctctctcactcctttcagtggaaattgtgattcctttggaatagagtggggctcatttgtttcagtttaagattcccctcaccctatcctttgattaagttttatttcatttttaaaatatatagaacatttacatgttgc

SEQ ID NO: 14111 - DNA, 1050 bp, Homo sapiens
tgaatccattagcaattttttaaaaatggctagtactaacaatatcactaagtttaaaataattgttaaatgactttgcatgcagtaattttttatggaaactaaattttcccatataaactgttacattttaaattttgttatttctataacttaatgacccgtttattacataaggttttatccataaccagatcttatctctgtttttattaatttagtgatatttgcaaatggaagtatatagtctatcttttcaaaattccttctttgcaggtagattcttgatctatcacttctaacagctacagattcttcttgcttgttccttttaacatttttctcttgttcttccataataaactgatttaaatttttattttgaagatgaataatggcttaatcataattcacaaattataacacttgcagatggaagtggagaaagaggcgaaaaggatgcaagcaaaatcacaacataccctccaggctctgtgcgatttgactgtgagctccgggcagtccaagtcagctgtggatttcaccattcaggtagcggctggaactttagggtataactgcgtttttacaattgtgctcagtaacttatttcttcagatttgatgaacatagcctgttaactgtgtgttaaaagctgtagcgtggcagtctctcaaatctgtaagacctttgtatttattacagaatctctttaaacaactatggcatgatggaacaggtacttgtctagagatctaacttctagtctgtcttcctgtggacttcttttataattcaagacagtctggaagatgaaataatcctttaaatctctttcagttctagaatgctgtggtttttgtaacatgttcccatattttgttaatgttcagtgataaatgtatgtcaacaaatttactttcttaaaatgtagaaaataattaaattcttagtaaattattggcatttgggttagcttttgctgtactgttcaacctttataaaaacaaaaatgttaaattccttccttgaagattatttgataaggta

SEQ ID NO: 14112 - DNA, 1034 bp, Homo sapiens
gaacttctgggtgattggagaaaattcagagaaggtcagaattcatcctatacaggcagatattgactaaaggcaaagcagagtatatagactgaatcaataagtaaaattccatataaaatacagtaaattattctaaaatgtgcctataaactatattcgaaacagaattaacatttgtttcagctattcagtaccttacacagaaaaatgtgttaatagtgtacatagttaggaacatctgaattgttctagagatagtcctaaaatctattttaaaatgactgatttgaaaatctgaaggcacactgataaacatctgagtctattttactcttactttctgtttggaaatggtgcagtgtgatgaaaatattatagcctttggaattaggcttcaattttatttctgaatttgtcatttactagaactacatggctgtgcaaaatgtcttaatctctttggcttcagttttcttattttaaaaacaagaatagtaattcttaactgattgtgttgctatgaagattaaaatatatgtgtgtagtctttgcacacccacatatgtagtctttgcacatataaatcctccatgaatactagctttaatattttgaattgaattatttgttttctctttcagaattatcttaaaggtacaatatttgagatttattaaatgcatagtttatttttacaaaggatttaaggtttcaaccatttggtggtggtaaaatgcatgagccttatttatgattaaactctaaatttgtcctaccatttatgattttgggctggttacttaaccccttaacccttcaagccttagttttttcatctgtaagatggacaaagaatacctatattatcagattgctttattcattaaagaaagtaacaatagtaaatattgattgagcacttttcatattttatttaattctcataggaacctgatgagttacatatcattgttgctatattatagataggaaagctaggaccagaaggtccagtgtccagttgtcataca

SEQ ID NO: 14113 - DNA, 1066 bp, Homo sapiens
gcctcgaacaactgggcccaagtgaccctcctgcctcagcctcccgagtagctaggactgtacaggcatgtgccaccacacctgggtttagttattctttttaattcttggaaaacagtggtgaacaatgttatctcattgttaatttaaataacacaaaatcatattctgtgtaaaattatttcataaatctcattttaatggctgcgtattattccatttagtagatgtattatagtttttaattactttcatttgggtatttttaaaatgttgctataatgaataaagttgtagtaaacacctttgaggtgaaatcctttaaaaatattttagagttttctttaggatagattcctagggtgcagttactagatcaaaggataataatttttatgatcttgaaatatatcaccaagagctttctgaaaggcttgtactatttaacactgccacttattccatgctttttctgcctacctgcctacagatgaactctgaattacccattgtctacacatgagtgtagcttctatctaaacctggttatctcatacccctattttactcactcctctcccaatgaaagaaataaatcaccaagttctatttatacagccttcttaattctttaatagctttttaatatctacttttcagaatcttactgtttccttagctgaggcttcttttctttgcctatctgacagcaaaaagccttttaactggccttacctccagtcttatcttctaagccattagccaccttctttccagaatattcattctgcaatacagatcagatcagtagcacttctctgtttaaaaccaaaaggctattcatagtccttaggatgaaggatatacttttatctctacagcctcatctctctctattctcatttcttttcccttgcccttcctttttttcccctacctctgaacctttatgctacttgttacctcctttatttgacctcatcttatgtggtggtttcttttatctctacactgtctaccttcccaccctcaagttttgttagcttctcctctagtttgtgtgcct

SEQ ID NO: 14114 - DNA, 1082 bp, Homo sapiens
tgcctcagcctcccaaagtgttgggattataggtgtgaggcactgtgcccaacctattttattttaaatgaatatttttgcatttggacaagaattctaactatgtattcattttttaaaaaatcaaacttcagagtcattcagtgactttggaaatccttatactgtattaagtaattaaaaatctattctgatatgacacttttatgattttatctttatattattcttagcactccattaagcaatttttatttaaaaacaaatttttataagaaaacaaaattagatgaatatgatatacttacacttccatagagataaaacaagaaagataaataccaaaatattaacaatgctttttcctgacaggtgagtttatagatattttttattttcttctttacaatttgtttcctaaatattctccaataagcatattagtgtataaatagagtaaaagttatgttttacaactgaagccattttaaaaaaatactgattaggtttaaggcatccatactttgcttacctttgctttttaaaaaatatttttattttaattggatggaggactctctttcaggtgctgtgcttttcattactttctggccatggttctcaaggtggtctcaaagggaccagcatcacttgggcacttgttagaagtaccagttctcaggccccacttcagatctctactgaaacaaaaaactgggggagtacagccagtaaactgtgctttaatagcgttccaggtgattctgatggtcccaaagtgtgagacttagtgtgctaggtcagttgtttgcactttgcggtttgatccaatgaccttctgcatcagaatcacctgggcctaatgaatcagaatttatgggtcaagggtcttggaaatagatctgagtcacttgcacagtgttctaaggctcttctctggcactgtgctagaaaagattgtagtggctttgctcccatgaggaatagaaacatcaaataaaatgttagtgttccggctgccatacatacagatcttttatttctttggcctgttgatactttttagaaactaaaaatttagt

SEQ ID NO: 14115 - DNA, 1051 bp, Homo sapiens
tatatgttgttgttgttgttgtttttggccaatcatctagctgtcccagtgcccggggttaacattgaagaacaccttcagttacgacaagaagaaaaacggcaacgtgtaatcagaaggcacagattagaggaaggaagaggtaagatgtagctacagagaaaaagtacatgaaaatccactttcctaccctatcctgaaaccactgaaaagttcacacaataaactaatttggtaagaaatcatcaaaattaaaattagcaatattctgataactcatataatgggaaaatattcagggtattcatgcttcttctaataacatacgtttaggtatttataattgtgctaataacatacttttaattcagcagggtgtttatggcataagtcagccatattaagaactgtgccatctgcctactatcaataactattagaaatggcaactttttaaaaatagatattctcacaacttgtccttcacccggactttggactcatctatttgaccgtggaacaaaattcaatttagtctttttcatttctattttcttactcatttatgctcattatcatttggacatagtcctgctatgctgccctccagttcagcacataactatgctttcatgtgtccttttttggaaaaacctcattctagttatttacaggaagagtaagatggcaggtctgcaggtttcatttgcaaagataggtctattgtttatcttttcctcattgtttatgagcttaaaagtttcttagcttaaaaatacatttaactggccaggcacggtggctcacgcctgtaatcccagcactttgggaagctgaggcaggcagatcacaagatcaagagatcaagaccatcctggccaacatggtgaaaccccatcactactaaaagtacaaaaaaattagctgggcgtggtggtgtgcgcctgtagtcccagctactcaggagactgaggcaggagaatcacttgaacctggcaggtggagcttgcagtgagccatgatcgcaccactgcactccagcctggcgaca

SEQ ID NO: 14116 - DNA, 1283 bp, Homo sapiens
tattagtataagcaataaagtcgtctttatcaaaggataatatttattctgtagtgctttatgtttggctctgttttctgttttttaagcacctaacttctttatttttaaatttaatttggatgcagaaagactctgattattttttaacaatgttggaattgaaatttattctcctggatctctccaacgctatttccattaaaattcagtgttagctgggtgtagtggcccatgtctgtaatcccagcactttgggaggctgaggccagaggatcacttgaggccaggagtttgaaaccagcttcagcagcatagcaacacccctaactcaaaaaatatataataaaaataaaatttaatatccccactctctgagcttaagcagccagtatatatcgtgaacaaaatctataaattatctggtcccttttgaaattaattattcttcgttttttcctccagagacttacataatttataataattattcatagacttacatggacaatactaaccaagtataataattgctttatgaatgaagcaaactgaatatatcagaatattaaggactattaagctgacttcaattattataaaattgtgactacatatcttattatgataaagtacatataaaattgaccagcttaaccatttttaagtagacagttctgtggtattaaatccattcataatgttgtgcaactattaccaccatgcatctccataacttttcatcttgtaaaactgagactctgtaactgttaaacaatgactcctcattcttccctctcccctgcctctggcatccactattcttgttttctttctgtgtctgattgactactctaggtacctctcatataaagagaatcagagtatttgtcttttttgtgactggcttatttcacttagcataatatcctcagttcatccaggttgtcacatatgtcggaacatctttgctttttgaggctgaataatattctattgtatgtatattaccacattttgcttatccattcactcactgatgaacactttggttgcttccacattgtaactattgtgagtaatgcgctgtgaagatgagtgtacaaggagctctttgagaccctgttttcagttcttttgggcatatacccagaagtggaattgttggactatatggtaattttatttttaatcttttgaggaactgccatactatttttcacagcggccaaccattttacattcccaccaatagtgtacagatgttccagtttctccacatc

SEQ ID NO: 14117 - DNA, 1035 bp, Homo sapiens
ctgcctcttgctgagttttgttcttctgaagaccttggaaggtcactggaggtttgtaaattatgaagttgtcatgtgctttgggagggtgattggtggcagtaggaggatgatctagagtggggaactcttggcttggagcatggttgggaggctttctttggtctgttgaatgaaagtgttggtagtgaggatggaaaacaggaaaagatttaaaagtatgattgacagaaggtaacagccaagagacatttgacaatagccttccttgccttcttttgcagaaatgaaatggggagagtgtttattagtggtccctaaattaaaatttatttttgttactcaaatttaagcatttctttgtataattgcttggattagcatgctgtcattttttaaactgggaaatatagtcatccatcttttatacatgaaagtaacctgtataaaaattacaaattgatctgtcaaatagggtttggagttgaaaatatggcaacagcaatggatgaagacctggaagaagaactagatgaaaaagatgagaagtctatgatgtgccctccaggcatgcacaaatggaagctggagcagtgcatggtttgcactgtctgtggagactgtacaggttatggagccagctgtgtcagtagtggacggccagacagagtccccggagggtaagagacaatgattcctactaaagaacatgtgcagaacacatttctttgcaaaatcattccggagtatactctactattaatatttttttcttaaagaccagtggcatcttcacttgatcttagccaaaaggccaagaaagtattataattcttataattgttttctgttataataatttataatttaatgtcatctctaaggttgcctttctttcatttgattcatttaaaccattatttaaaaacagaccataagtttttcaagacttggggctgtacttttatttgtattatttttcaaagcctatttaatgctagatatctattatatttctttctgttgaacatgaat

SEQ ID NO: 14118 - DNA, 2541 bp, Homo sapiens
tttagtatacctaattatgtttctgggaatatgttacatcaattttcaataatgtatgacttttcctctaattgagaggaatgttcttatatttttaatcattaatatcttttagacatcaatattgatgtattattgtacctcaaaaacctgtaatatggagctgtatggctgctgtttctgctgaattagtaataaatattttaacaggaaaattttttgctgttatcagggttatttattatatagagatgtgaataaccacagcatgacagccataaggataagccctgaaacactggagcaagatggtactgtgatgttaccaggtatgtttcaagtagtcattttttctccacaagcaattttaagaaatgtgcatgttaagctatttagacacataaagaatgattagcaagggatagtgcttgcttataaaagggttttaaaaatcttgacatacaaagcattttatagtctacgtgaagttaatacatatcaagagaatagacatagaaatataacaagttttaatatttgttttcaaacttggccgtctatggcctaatctctgacctcaccccaccactgctgaattagtggggtgatgtaactgtgttgctcttaataaaaatcagaactctggctctcatgtgactcagtataaagaaccttctgtttatttttactttaacaacagtgcagttgggttttcctccttatttaatttaatttaattttatttaatttaatttaattttattttattttattttatgttaaaggggtttcagagacagagagtttagggtaggtcaggaatttttttttttaatttcatcatttatgcttcttatgcttcttaatactttgataaaggtctttggacacagtttattttgctttaattttgaggcttttatatattcacttaaatcactgctaaattatcaggcagtaggtctccaattttgatgaatgctggaaaaatgcatattctttattgtaagatctttgaatttgtttataatgttgatactttctgaggctgtttatattaaaatcttgagtgtctaatgtgtctgtcaataatttcatagtagcaatattacttgtaagcgtttgaccatctgaaagtgagagctacttctgaagagtgcattgagaagaataattgctcctgggctgcatgtttatttttaaatataatcttaataatttcatcaaacatttatttgaaccttactacatatacatagatacatattagtgtacatgacactatgttaaagtaaatatgacatttcatgtccatttcagaaatagaggagctttggaaagcggatgacttaataaaatcattttgaaaataaccatctattttcagatatgtctacagggttttttttttttttttttttttcattacaagtcctggaccatgtctttggtcataataataataataataatgacaataatattaaaaaatacttttaataacatgcacactccccccacatatttatacatatattgaaagtaatcatgtttgttgtataaaaatcatatgaacaaaaaagaatgaattgaaataattataatcccacttcccatatataaacactatgaacatattggtaaatatccttctcgtatttttcctttgtgtatatgtccatacttgtaaaaaagtgtgatcatatgctacatattgcttttttaatctatctctttcacttaatattctgaaaatatttctaggtcattaaatagtcttctacaatgtcacttaaatgttacaaaatatattccattgattaatgtttgagaatgaaagccttccagggttttgctatataaattacactgtaatgagcgttcctatcgtgctgtctttgtgccagtcattttaggataatgacatagaagaaaaattctaaattgacacatcccatccgctataacacatgggtactaatatcaaggatttacttctgagaaaccctgcacatttaatagagactgtgacttattgataagacaatttgaaaatatgtgcctacagctgttttatttattctgccttgataaaaaaattactcgttaatgtctttattcagtttaaatctcgttgctttgtttaacttgtgaaatgcaactttgaacaatacaagtgtggctttctgtgtttcataagtgtgtgctgtattagtggtgaagaatgaaccaaacttcaggaagatagtcccatatttgtcttcagaactggcagatgttgcttgatatattcctgaagatacaagcttaaaatattacatgatggataaagaaaggataaagagaaaatcttgaaatcacgtggcagaagactcctccctcaagcctgaagaagccttttgtaattttcttgtttctttgacctggactgaattttcatccaatagcactttttgtttttcgtgggtaggaatagctctgctctgtagccttccaatcaaggagcagaagtaaattgtcaggtttatagatggtaatgaa

SEQ ID NO: 14119 - DNA, 1050 bp, Homo sapiens
aatccagaaataatcctcaaaccttaaggtcactattaactgaaatcgttcttattaaacttttggccaaaatagctaacattcactttctctaacttgttactctcaatagttttaaaaaacaggggaaaaggaaataaatgccacaaagccaaaacagtacaattagtttctaaattgaggggacttttttttgtattcatcataaataaaaatctatttgtgttatggattaaacttctgacttagcaactttcattaagtaaataaagtgttcgcttttcttaaagtatgttccgattcttgcctttcatatcagtgacccagactcaacatgtaatcctttaaataagataggagcttttacttaaaaggtactaaggaatagaaatatagatggaagcataatttttaactggttaattgctttttttctccgatgctaactatgggtctttaaactatctaaagttttctagatccttctattattataggaaaattctcagaagtactagagctgtggttctcattatgtggttctcaattctcattagcatgtatcagagttatcggggacttccctatggtgtttctgattccatagacttggggtggggcccaaaagtttgtatttggaattagtttcttggtgatacagatgctggtttgaggagtacactgctggtttagactaaaacttggtcctttttttccgacttggctatttagattttgtaggacccacctgtgagaaccaaactgcatgaacctaactacatgtcagatttttcttttttggtcgcatgtggggactcagttattgtgtttgacttttgtttgttttaatgagagggaggatgctggtcattgaatcaagctgaggattttttaaaaccacccccctcacatacacagttattaaaagctattaccaaatagaagctgtcatgttggcaggcaagcaccgtgttggttattgttatgatagcaccagtgatcatattaatattgtgaagtgctgcttggcttgacagcattttactgaag

SEQ ID NO: 14120 - DNA, 1026 bp, Homo sapiens
aggagtttgagaacagcctggccaacatggtgaaaccctgtctctactaaaaatacaaaaattagcccggcattgtggcagtcgcctataatcccagctactcagaggctgaggcaggaaaattgcttgaacccaggaggcggaggttgcagtgagccgagatcatgccattgcactccggcctgggtgacagagtgagactgtctcaaaaaaaaaaaaagaaactggctgggcgtaatggctcacgcctgtaatcccagctctttgggaggccaaggcgggcggatcacgaggtcaggagatcgagaccatcctggctaacacggtgaaaccccgtctgtactaaaaacacaaaaaaaacttagcccgtcacggtggcgggcgcctgtagtcccagctactcgggaggctgaggcaggagaatggcgtgaacccgggaggcggagcttgcagtgagccgagatggcgccactgcactccagcctggacaacagagctagactccatttaccaaaacaaaaaacctgtattatagaactactctcagtttactctgttctgtttaagtattggtatatttaagactggaaggtctatatatatatatatatatatatatatatttttttttttttttttttttttttttttttttttgagacggagtctagctctgttgcccaggctggagtgcagtggtgccatctcggctcactgcaagctccgcctcccaggttcaggccattctcctgcctcagcctcccaagtagctgggactacaggcacctgccaccgcgcccggctaatttttttttgtatttttagtagagacggggtttcaccgtgttagccgggatggtctcgatctcctgacctcgtgatccgcctgcctcggcctcccaacgtgctgggattacaggcgtgagccactgcacccagcctgttatatatattttttctatatagtagatatagttaatatttacaacaaaagaataggtgaaaatatagacatttttaaatggt

SEQ ID NO: 14121 - DNA, 1293 bp, Homo sapiens
gatatactactcatttttatatagtaattttatatcctgtgattttgttaaatctgcatactatttctggtaacttttttgcagattccttaagattctctacatgtttttttacaagtaaaaacatttcttttttagaaaatacttcttgcctttttcccttggctggataggatattttccttgcactagataggatatccagtacaatgttgatgagttgctgagagtagaccaatttgcctggatcacaatcttagagggaaagcattcagtctattaccatgttagctgtggttattttgtagataccctttatcaagttgagaaaattcccttctattcctaacttagactttttttttttctatcatgaatcgatactggatttttgtcaagtgatctttctgtgtttatttgaagtataatatattttttctctgttacaacagtggttgcttttccagtgttgtgccagcattgtccctgggttaaacctcagttggtcataatgtattacttttttatatattgttggatttgaatagctaatacttgtaatatctctggatatttggatgagatatttgtaatatctcttatacatatattcataagttatatgccatgccaatttaactttttgatgtatttcttatttaacaagtgtattttttttttccaattctttatggaagaagagtcgaatatttgggaccaagtgtttttggtacttgaggtatcattttgtttatcttagatacttcctggacatactctaattattggaagttgaatttctaaaatattttaaaacagctttttatatttataatataaatgttgatcttgaaattgtagttgctgtctgatgaataaaatattgggcataaaagagaaactgtttagtcttaacaaattaccaatcacatgatttttagcctttatcaatactgataggtgagagagagcttagggaagcatctacagtttacttggcattactgttacttgaatgagaatgaaatgagctgatgaaaattaagtgtttttttgggaggccctcatttctgtgtaaacttctatatctacttttaaaagcattcaaaatgcaatctaatgtttgtagtaggtcattgagactctacagtgtgtctagagtctcttaggaagtcgtaaaatgaatttcctttgatacagaactctaagagttaagctttgttgagtctattcctgtcatggcgatacaagaatatttctaagttttttgcccatccttttccagcccttgtc

SEQ ID NO: 14122 - DNA, 1035 bp, Homo sapiens
catatatatgcacttgtgtgtgtatgtgtgtgtgttcagttttcttgggtgcatactgaggagtggaatgtttaggtggtttttcctttgatttgccagaaggactcataaatctcacaagcaatttatactcatggctaagatttattacaacaaaggatacagagcaagcagcaggaaaaaggtatgtgtttgtgatgtataggaagttatggcataggcttcctagttcttcattgactgagctttcatgtcagaaagaaagacatgctttctctctggcagtgaactacagagaaatgtgtatattgtttttgctcaggtgagttttagaattcaagactttgtgggtttggtcacacagacatatcttgttagtcaatcagacatggtaagtgaaactcaggtacacattgtaaagcttgatgttcgtacatgcagagcagtctgacaggccaggaggcatggtccattgctctgtgtgttcataacacaatcatcaatcactaccacaaagaaaactctaaacatccacattcccaaaggttagccaagggtcaatcatggtttccttggggaaatacaaggagtaagcaatcatgcctgcagcgttaactttttcctcagagtgggcacggtaaatgtacgtttagtttagctttttttttttttttgagacagagtttcgctcttgttccgcaggttagagtgcaatggcacgatctcggctcattgcaacctccgcctcccaggttcaagcaattctcctgcctcaggctcccgaggagctgggattacaggcatgcaccgccacgcccggctaattttgtatttttagtagagacggggtttctccatgtggaggctggtctcgaactcctgacctcaggtgatctgcccgccttggcctcccaaagtgctgggattacaggcgtgagtcactgcacccggcctgtacatttagctttttaagaaactagaaaactcttttccaaagtggttgttccaatctgtagtcccaccagtggtatatga

SEQ ID NO: 14123 - DNA, 1050 bp, Homo sapiens
atctttatttttgtcttcattcttacaggatacttttagaatcctttatgtgaattatatcagctttcatggatctaaaaacatctttatttttgtcttcattcttaaaagatacattcttaaaggttacatgattccaggttactttcccccacctctaacccccatccctccactctaccacctccccctccccaccccccagcccttttcaacacaaagaatggaaactatcaattttattgttcctttaagcatatctcttctctggctgctttaaagattttctctttatgctttgcttttagcaatatgaccatgctgtgcctaggtatgcttttctttggattttcctgcttaaagttccctgagtttcttgaatctctcagttgatttctttcttcacttttgggaaattgtcagtaattatcttgtcatatattgcttttgttccattcttttttctctctttctgggattccaattatatgaatatgagaccatctgactttgtcccacatgtctcgttctctgtttggttcatcccatttttgtttccgtgattgaattctgttatttatttatttatttatttttggcctgtttgcaagtctgtgaaacctgtttttctgtaacttactctgcttttaaaatcatatgagaagttcttaatttcagatgtttatttttcagtttcagaatgtccacttggttctttttttataaattatgttgaaaattgccaattgcattattttacacatattgttaatctctgcatctcaggtacttgcctcctaacgttaatatctgggttttctgtgagtctgactaattttctggttttctcttgattatgtgtctgccacatattttgcttcttttgatgtcccttaatgtgtttacttagtgtccccgaactagactaacactgtgtatgaatgaacatgattttctttcagatcatgtgttttctcctagagaggtgtgctctttgctgtgtcagacagatagaatgaggagtttgattatctcaatccagtgagggat

SEQ ID NO: 14124 - DNA, 1048 bp, Homo sapiens
gataggagtatcattacattaattacacagaatgaatctggcttctatggaaaagcttcagtttacataaggtgcttcatagattgatttttaaaagttggtcttgtatccagtgaccttgataattcccttgttaattctttatttgtggattattttgtattttctataaatataattatctacaaataaaaaatgctttacttttaatttttaaccattatgacttttatttcatttgcatcacttactgaccttcaatattgtgttaacagaagtggtgatagtacaaatccttgcattttcctcctatgcctaagtggaaatacttaatttttcaacattcagtatagttgaatacactgttaaaagtaggttttttatagataatctgtattagattaagtaaaatctgttcctggttcaccaaggagtttcatcactagtggttgttgagttttaaaaatactttttctgtttctattgaagtgatcatatgttttgtttcttttgttctgttattatattgaattatgttgattatgtatttattctttccacatgttgttagacaaaattatttgtaggtaaatggctctctctttttttaaaaataaaaggggtaatacacataccataaattcacccttttatacaacttattggtttccagtatattcacaaagtcatacaactaaacatttttgtctctccataaatcccaaagctattagcagtcagtttctattctcctttctatcagtttttggcaactactacttcctgtttttatgaatttgcctacctagacattacatataaatggaattatacaatttatgaccttttgttgccattgtttctttcacttagcataatgttttcaaggttcatccatgttgtagcatgagtcagtacttcattctttttttatgggtaaacaacattctcttatatggaagtgctacactttatacattcattagttggtgagcatttgggttgttgctattttttggctgtgcagtatttttgcttctatgttcat

SEQ ID NO: 14125 - DNA, 1977 bp, Homo sapiens
tgcaaaaatcagtgtggaacaggaaaggagggtggcatgttcagtctgattccaagtttgagaagttgttctgtgtctaacaggcacacatgtcatattatcaagtaattgaagtttttgtttgtttgtttgttttgaggcagagtctcgctctgtcacccaggccagagtgcagtggtgcgatctcggctcactgcaacctccgcctgccaggttcaagtgattcttctgcctcagcctcctgagtagttgggattacaggcgtgtcccaccacactcggctgatttttgtatttttactagaggtggggtttcaccatattggtcaggctggtctcgaactcctcacctcgtgatccgcctgcctcgttctcccaaagtgctgggattacaggcgtgagccactgcgcctggcccagtatttgtagtttttaagaaggaaataaaaatatttttcttccaatttatgtgttattttttcaaatgtctactcatttgttaggacatgaattcttgttatttggatctaactacttaataaacactactgtttggtatttcttttggcctatgagtgcatggaaaaattaccgatgatggctgtgcatgggcccaataaaagggttttcattcaccagtgctgatctagcaactgctgctgctgaatatccagcctgacagcagcagagatcaatcatccttcaagcaggccaaccagtccttatacagtggaaaggaccatgattcattttgattggatttgagacatattctgggtctgaatttgtctttccagcagggtctcacccaggactactgtttgagggcttgcaggatgtttgatcctctactacagggatcatttcagaataagggacccactgttatgttatgttatgttatgttatgttatgttatgttatgttatgttatgttatgttatgttatgttttgagacggagtcttgctctgttgcccaagctggagtgcaatggcgtgatctcagctgactgcaacctccgcctcccgggttcaagcagttctcctacctcagcctcctgagttgctgggactacaggtgcacatcaccacgcccagctaatttttgtgtttttagtagagacggggtttcaccatgtggaccaggatggtctcgaactcctgacctcgtgatccggccacgtcagcctcccaaagtgctgggattacaggcgtgagccaccgcgcccggccgggacccacttttatagaataggagaatcatttgtcccatcttgcaccacaccgtccagaagctgatgacttgatagagcagtaaaacagtcctttgatggcacagctgatgatgagatcctgcagcttgggcatgatgccctgcaagggtgaggcgcccattctccagtgttcccagtaggaagatcacatgaaattaggagtggctccgcatagcatcactctgtgaatcacctgggcagtttctgcttcccatctccatagctctgatggcaaggggttaaaagatcctggttctcagaagagaaacatttccaacagagggcgctatgagaatcctgttatactttaaagtacagctgccactaggatttggggctccttttctaaataaagaagtcaccaggctgggcacgatggctcacgcctgtaatcccagcactttgggaggccgagatgagtggatcacgtgaagtcaggagttcgaaaccagctcagccaacatggtgagaccctgtttgtactacaaatacaaaacaattagccgggcatgttggcgcgtgcttgtaatcccagctaattgggaggctgagtcaggagaactgcttgaacctgggatgtggaggttgcagtgagccgagattgcgccactgcactccagcctgggcaatagagcaagactccatctcaaaacaaaaaaaaaacaacaaaaaaagaagtcaccatttggacagggttaatgtc

SEQ ID NO: 14126 - DNA, 1091 bp, Homo sapiens
tttcagatcccgctttcaggcacatgttcccctagctcttggcaatattggcagctaaaactgattgcagctgagtcccactccacgcattgccctgagccaagagttgcctcccccagagtcatgcctcctcttcaggggcagtttacatctaatatctatacagtgtagggatataaatgcctagcgcttttgctataagacaagccaaccttgaagtctatcccaacaccagagagctctcccatgggtctggctgagggcttcctgggactgcattgcagatcaactccttcctctgttcagtcttacgtctttcactgccccacagttgttggttcggagggcactccgcaataaacttccggtgtgcacatctgcatttgagagtctgtttcctgggaaccctcctacccaaagcagttggtgccaggagtggtctcagaaagtagactttacagtgaggttttgaagctggattattggctggctggctggcaatgagaatcgattctggtgctagatggagcactaatactgataacgcttggcatgcactgtagctatgcaacttaaaactttcactggtggtgagttggaatgctattcctgttgaagggaatgcactggtgagtgcactaggcttttgagaagttcagagaaattaattatgaggacaatcatcagatggcttttggtaaataacattgatagattggagaaagatgatgcaaggtggaagataattgggggcaaaatgtaaaaggaaatttatttagcatcatgtaaagaaacacatatacagtaagaggaaaaatctaaggcttcaacccaaaacttaattttaagggtagcagagcaccaaggtaggtagaattctctctcagctatgctaaggtcagtgttctggttgggcaggaatcctgacccttaggatggggcatctgagtgcacttgaaaaccctgaaaccccaaattcctcttaaccctctgggcctgcagaagtggccttcttctactagctagaggggttgcttgcagactgtgctgtccctcttacccccagctcctcctctctcgcctactgacta

SEQ ID NO: 14127 - DNA, 1033 bp, Homo sapiens
gttggagacagttgtaaagctggagctttgttcacactttttctaggttaaccagttttctcatgtctgtgattgtttacaggattgggcacagcagtagttttaccatatggatgtaaacgtgtgtaactattttttgctatctgaactgaaggccagaatggcacaagtctgtttcttgctaatgcttttgaaaatagcacaaaactacgtgagacagtttgccctgataattaggtataattttgatctgtaaatctctaaattatggcaccgcaggaacatctttacaaactcctctcaaagaatttaaatttattttgtgtatggtttccagacttatgcaataatttttgacttgtatattcctgttttgacttcctactactagtgtaatatgatttctgtgtatctagaactatattaacggttttagacaaaattaacatagattaatcatataacatttgtgaatgattttttagcccttggtccatttttgtacaagccgtcaatgaaaagtaatgaagaattagttcaagtatttcaagaactactcatggaaatcagcattatgttatgatattgcctgctaatgcttgttcaacgcaacattattgtttatttaagttcacattattttattacaaaaagtagcctgcaactactctattgatgatttgattaagaattaaatcacatttcttattaaagatgttgaggaaagtagacttggggtttcggctctgaatgaatgatagaattatttgtatagggacacaagttaaaggagaagatgatatcttttagagagactgaatggagcaataatagagaatgaagctctagtgagcatcaggtttaaaggtgtgagagaaaggagacagtgaaggaaacggaatcaaaattaagaagaaaatcatgaaacagtagcctctgtggctctaggagagtggattgaaaattctcagaagtggtaaatgttgaagaaagtgagaaccgttttcaggtcattgataacttttgaggaagt

SEQ ID NO: 14128 - DNA, 1096 bp, Homo sapiens
ggagcacttatcgagataggagggtgcggtggctgcagtttctcgtgtgtgtgtgtgtgtgtgtgtgtgtgtgtgtgtgtgtgtgtgtctgcctgcctatgtggggggatagtgaggggtggtaggggaacctgtgatgctggaaaaggcgatggtgctggtcggctgtgacacgtgtgtgtatcgttgaggtaggaggtggcatgggtagagagggtaagaggatgatacacgaagagaattgcaacagtggcaagggaagtggcgttttcagtgtctctgccgcaatgttatttgcacgtgccgcctctcccatgacattccttccagccctttccacctcccttcaatctgcctttcaccaagaggagtcatggtatagattggttgagttttggataagcaggcccgagggataggcgtgaggtttgctttaaaaagatttatgaataagggacgcagatggagatctgtgtggatgcgaaaggtgtctgatagagatttttagagctgtactttgataaccgggccttttggtcttctagaaatgaggttgcagttactcttgtgatctgatgtcccatcggccatttctcttcatcctctgttcgatttcctctgttacttacaggctttagagtagagagggttttgtagggaaaaggggaaaactgcagaacttcagaatatgacagctggtacagcgttcaactgccactagctagaaaatctgaatagcgcgtagatttgtctcttttacttgggttggctacaccttcagcttccttgatgtagatgttcagttggtttcattttctttttcttaaaatgtgggtgcttttttttgctgagggctctcctattgttttcttttccatgcccttacatgccgcataccctgaaggttggtgactgacttgtttcaccagctttgacagtggtaattgggagttggcttcatcttttttttcccacagcttcttgcagtacatggggaaaacatagtaggaaactgtcaaaatgagttaaagagtttactgttatttattgaatgtgcaatttattaggcaattgttaggtgtctttttctcccatt

SEQ ID NO: 14129 - DNA, 4203 bp, Homo sapiens
agcggcggcggcggcggccgggcaggtggcagcggcatcggcggcggcggccgtggtgggcgcagcgggcctggcgtccatctgcgactcggacacggacccgcgcgagctcgaggcgttcgcggagcgcttcaagcagcggcgcatcaagctgggcgtgacgcaggccgacgtgggctcggcgctggccaacctcaagatcccgggcgtgggctcactcagccagagcaccatctgcaggttcgagtcgctcacgctctcgcacaacaacatgatcgcgctcaagcccatcctgcaggcgtggctcgaggaggccgagggcgcccagcgcgagaaaatgaacaagcctgagctcttcaacggcggcgagaagaagcgcaagcggacttccatcgccgcgcccgagaagcgctccctcgaggcctacttcgccgtgcagccccggccctcgtccgagaagatcgccgccatcgccgagaaactggacctcaaaaagaacgtggtgcgggtgtggttttgcaaccagagacagaagcagaagcggatgaaattctctgccacttactgagggggctgggaggtgtcgggcgggacagaatggggagctgaggaggcatttttggggggctttcctctgcttgcctcccctcggatttggagtgtccgttatcctgcctgcatttggggagtcccttctcgctctctttcctccacccattctctgattttcctgcctttgctgtcccctagccttgaggactggggtgctgggtgtggggattggagtatagggtaggggagaagggggggagcattcgggggagtggggagtggggggaaggaaagcggagacccgagcaggggttttaaggagcaggatggttctggggtttgggtggggggagacgcgggaagggtaggaaaatggactgtttctgaccagagacacttacctaaatatcctggggaccaaggaactatgtacaaaaacaaacctaccaaccaccaaaaactagacaaataaagacaaactaaaacaaaacagaacaaaagcaaaggaaaatgctttagaaattttaactccggggagccataatctgcaacttcattttcccccatagaagagaaaaaagagcaccaccattattaccacctccccaaccctacacgcacgaactgagtcgaaaaacgaaaaccaaacgagcgagaagttgaagttctgggtatcaaagctagttgttctgtctgcgtgtttaatttttccctctctcacctccaccccatccatatcctctttatttcctccgttccaatgagaggcctatggctgctctccaatcccgggaagtgagtgggagcacagctgaaaagagagggtcagggggaggctggctgcttgcttaggtggaatccaagttttcccgtggccctgcctatactctggtggcctggtcctgttggggtgggggtctttggagagaagggcatagtctttgagctactaaaaagcagaattccggagcttcgagatatcttattctaggaaaatgaaacaattttaacaacagttttttttcctcttatgtcgaagatctagttttagacaatttcaaaataagcttttcccactcatagaactttaacttgccctttcagttttatcttttttttagagagaggtttaaactactgatttttcctgttgattcaaatagactaatggggtgaaagttattaggagagatactctctcctgttttctccactgaacgagactcatcttgctcttctaggtcccgtttcttcctctcttggaggacatgaaattatagaaatgttgagaagttcctgctttcttttgcggtaggacttggctgtgagaaaatcacctaaatcccagaaaagaggaagacagatttaaagtgcccccacccccatttgtttcaaagaggtctgcatgttgggcgaaaacagaacaactgtgtttccttttacttgttcttattattcaagagtcatttattacaggggataaatgttgggtagcaagaactttaatttgcactaccagtctcccaaatagaaaatcatgtatagtatttcatagtaataatcaggtaccttacaagctgctggtggattttaaaaaattaagatagttgaaggtggttaggtaaaatgcctgctttgtgtacaagatactctttggatctctcgtagagatggtttgttaccatcctttaatcataactaaaacattgaaaacagaacaaatgagaaaagaaaaaaaacctgccgattaacaagactgaaatcatgcatgatctgaaaggtgtggaaagaaacacaattaggtctcactctggttaggcattatttatttaattatgttgtatatcattgtttgcagggcaaacattctatgcatttgaaactgagcactaaactgggctagctttctggtagaccgttttgtggctagtgcgatttcacagtctactgcctgtttccactgaaaacatttttgtcatattcttgtattcaaagaaaaaggaaaaaagattattgtaaatattttatttaatgcacacattcacacagtggtaacagactgccagtgttcatcctgaaatgtctcacggattgatctacctgtccatgtatgtctgctgagctttctccttggttatgttttttctcttttacctttctcctcccttacttctatcagaaccaattctatgcgccaaaatacaacagggggatgtgtcccagtacacttacaaataaaacataactgaaagaagagcagttttatgatttgggtgcgtttttgtgtttatactgggccaggtcctggtagaacctttcaacaaacaaccaaacaaaaagaaaacacaaagaaatggggggagggtagggtgttgaagggggacaaaaaggggagagattgagaatgatgtatttttttgctgaatcagaattcactttcagataactcatgaaaagtggtgctctaaataaaatgaattctatattagttgcctgtgtttataaaagttattattttttaactgcagaaactcttaaaccacagcacttgatccagagtggtgaaaaccaataaataaccaggcacccaaaaaacatttaaatttagggtcagggacagaggaatttggaggtttagatgtgatattctaccctaaaaacacctagtaactgaatggcttttctttggagggtaatacattttaaaacatttagtgtgccacctactgctccacagtgactagagagcctctatttcttggtgacttgggactagatcagatgccaaatgtacaaagtttcttaagagttgagattatatcatctgaagtcatcttattttagccaaatctttttaatttcaccggcaaatctgtgaaggaaaacacttgatgttcaaaaagaatagtacattttaaaagctgcgattttaaacagttgttaatgttaaaaaaaaaaagcactagaggtatttttaaacatagaactcttccataaaaagttgatttgtttttgctgttattgacttgaaacatcatcagttttaaataaaatgcatttgtaaaaaaaccgttattttatagaaaagtatgactggatttcattgttggaaaaacaggacagaacaaatgaaaagatttacaaagggttttttttaaagtctgcctcaagcagaaatgttgcaggcaaacacatgtgtattatataataatgatcaatgtaggtattaagaatttaagaatttgctttaaataaaacctttaccacataaaaataagagtattatgttaataaaacatcatgaaaatgaatttcctattttatgtagtaggaaactgtgcaaaacaaaaaaaaatgctttgctttctggtaagcgaatctatatatggcttgaaggagtagtaagactattctaagacgcctttaactgtcaatccatgaaaaaaaaacaaaaagggacctcctgaagaggccaaactatcattgaagtgggtgtcaatgagtgatagtttggcctttcaaagttttctagttctgaagagaagttcactctaagcggattcctccaccagttttggggtgaatatgataaaatgtgtgtctcggattcttttaaagaataatctcaaaataagtttgagagagtgggaa

SEQ ID NO: 14130 - DNA, 1027 bp, Homo sapiens
acggccgcgagaagtggggctcaggtgttagaggagtgcatcccgtcggcgcgcggggctagagctgtcggagaagcgggaccgcgaggccggcgcgcggcgctctgcgcggtcagagggagcgcctggcagcagcaggagcagcagcagcagcccgcggcggggccgccgccagccgccgcgaccgccgcggctgcagcctccgaagggaggccgggtgagccggcgtacgcactttcccgcggactttcggagtgtttgtggatatacatgccaagccgccacgatgatgtccatgaacagcaagcagcctcactttgccatgcatcccaccctccctgagcacaagtacccgtcgctgcactccagctccgaggccatccggcgggcctgcctgcccacgccgccggtaagcgccccacgcccgcggccccggcccgcgcgcccgcccctccccgtctccgaaacgctgcatgtcgggggctggtgtgtgcaggtcccggtgcggggaactgcgggcagggggtgtagagcagtcccgcagcgaggcacgttttgtccggcggcccttaatgtcgtgttcctgtctgcctctgcctccgcgtcaggcgcctgcgatcggagtagggagcgctggggccaggactctcgacttccctctactttctctgttaatttcacgcctcagaaaggcagtctctgtgcgtgctcgggtgtgtgacacgggtccccagctgcgagttacatttccatttcttcttttccctctttttcgtctcccacgcccgtttccggaatgtgttcttgtgtccccctttctccctacttctgtccccctctccacgctcccatcccttctcgtctgccccctccctggtcgtcaatgtgccccctctccgtctttcccgctctccactgcccccaaacccgttgttattttggttgctttgtgtttgcccttcgcatgctgtgctttccggcctgtgtgtgtgtttcttctgttgttttgttttgctcttttggtttt

SEQ ID NO: 14131 - DNA, 1573 bp, Homo sapiens
tttgaagatcaaagatttgggtcatctttgtttaagatgtcctcagagatgcacagtcttcataaccaccttcagtctccttggtctacttcctttgtgcctgaaaagaggaataaaaatgtgaatcaatcaacaaaaagaaaaatccagagcagcctttccagtgccagcccatcaaaagcaactaaaagttgactcattagaaaggtgtcatttgtggttttgtcctgagagaaatagaaaagttgttaaagttaccttttttcctcataaaagttctatacaaattggaattgataatctttagtcaagtatcaagtcaggatggtggattaacctgtacccagaatacttattgttcattttgaaaagactttgttcttttcatttttatttgggagtctttgtgaccagagaagttagggaggaggttatttttgtgttttggggttggttggttggttggttttgtttttggttttgtttttttactgaatttgatatgtatctcggttggatatacattgtttttttaaaaaatgttatttaactgttagatacagtggcctgttgataagccccacttgtcttcagaacttggatttcttaaataaaacttttagtgttgtctatacactgctcaataagacacttgagtttaagcttttcccagggtggaaattattttacctgtccctttttatttatgtttagtgatggcctagtttttctgcagggccatgatggagaaatagcactctagccttagtccaatattgatttactttctttttttaggttttatgtatatgtttgcattttttagcattgtgttttgtccagttttgtgaaaatgttctgctagtatgaaagaaaacattttctatatgaagacatttgttttatgttaggtagcttacattttctcctctgcgtgtgtgtgtatgtgtgtaaaatcagaaatttagcatactatggaaagaaggcatggagcacttgggtttagaggaacctaaaacatcatagcttcattgttccagatgtaacaggtttgaaagagctcatcgccaagttcttgatccacttgcattccaggggagttttcttttgagtagtatgtttcttgtttgcatgttcctgttctttgtggaaactatgcatggtagcatttttgcttgctgtgttttccatacttaagaaaaagaggtttcagttggctgatagaatatcttttatgtaggacaaaacttttctgtgaagagtgttgagggggtgaagataggtaagaggtaagcacaatttttaatttaggctctgaaaaagtgtattgttctaaacgtatttggtatgcctatataggtctttaaaaatgggtatgtatgctgtttaatgtgcactgaacattttacattaatattgtactgttttacattaatactgcatgcttttctatgtgaattgaataaagaatgtcataagcactgtgttccttgatgtcgatgatgattctttgtctcgtatattgaattagcctataaagaccaggaaaaactacttttttttttttttgaga

SEQ ID NO: 14132 - DNA, 1090 bp, Homo sapiens
ctgcctcacctcccaaagcattggaattacaggcatgagccatggaccaaagcagtcttagtaattaatgggaaaaatcacaattgtttgatgacctttagcaactttgtcaaaacatttaactcttattatcaattacatatgtatatggataggcaagaacagtaaaagtaatatttagtacattgatatttatgtagtacaatttgaaacatgagaaatattgagaattcgtggtttttttgtgaaaaacttctggagaataatttgaatagtgcttcccttctcatataatttatgatatgaagctagcatcatttctgataccttgatgaattttcacactcctaagtttgcatcaacttccagcattttatcgtttgctctcaatatcgtgaaagagctccacattgctttagtgcgaagtgttttgtcagcctgtcattttctctagacatcttcatccttttcaccaccacttttctcatccatgtcaataagtttgcctctacaaagtgcttctggcatatctagaatttcttgaatggactgacattgttgtaatattcccacagtcagtgatttcttccataactacatttacatttgatttcaatttcacttccaatgttatcattgtttatttctttgttacaccttcatctttgttgaccagttctgtcgttttattaactgtttttgtgaaatgtcatgcgggttttttactgggagacaaggagcagcccagctgcacactttgctgtctgtatgttaactgaaaaacaggtaaatgcacagtgactaatcactgactgaccttgaaagaagtgacttgatgggtcactgatcatgaagcacgtctattatttatgtagtgttttttgaactgaaaagctagaagtgaaggttttacttcatgcagttactcattaataatggtgtggtaactgaaatttgaaccatattgttgggtgacttgtaaattaaaccatggtaactgaaatttgtgcatattggaaccatataaagcaaggatatcaacactgaaaacctgtcagataggccacaccacaaaagctggtccaggtcc

SEQ ID NO: 14133 - DNA, 1227 bp, Homo sapiens
tatttctccacctggatgatatcttaaatagaatcaaagatttggcatttttaaaaatcacaactaacattgaattaaaatgaaggcaacataaatcccaatttttatcagtcaggccacattttgagaatttaaactgtatgtgactttctccctgcaaaactcttttgatatgtaaagaatctatgtatctacagaattttaagtacaaaattcaaaccatgttggcttcagtttagcatatgtatgtatgtgtttagtgtctatgcctgcctcatgactatgcaatgctttttcaggacgaaatagattgtttacagaaagaagtagaagagcttaagagtaaaaatctcagcttggagtcacagatcaaaactattctggatcctttaaccttggtgcagggcaaccaaaatgaagacaaacatctagtcacagataatccaagtaaaattaacccagaaactgtagcagagtggaagaaaaaactcagaacagctaatgaaatctatgaaaaagtgaaagatgatgtggataagctaaaggaggtaagttgtggtttttaaaaatctattatggttgtttttaaaataagtaccttcaaaagcataaatagccatattatcttgactcatcatcagatgatttgtgaggaaaggacagaatctctggatgagcatttatatgcaataagaagactttttcttatttaaatatcattaactgccaagaaatatcaggtggttccatgtgtgactataattagagactgttgtgcttctgtataagattgcatcttcttctagaagaataataccaatttaaaggatgtgtttctgtttcgtcctctttgtggtttgccataggttttttaagcttatatcagcgacttcccctgtgtacctaaaaacaaacacataaccattttcgcaccaatgaaaggaaaagttttgaccttatcttttcttttgctaccactctcttatttttaagattgtagatagataaagacttggtgactaattccaggacagcaataagcagctgcttcagagtacctcatgcaaaagaatgttgtgatttatgaaactggttcatttttttcagtttttctttgaacgagatacagcatggtgaaaaaggcaaacctctaggatttttcggcctagaaagggagataagatccatgccatcagcactagatgttacaggcaactcctacaacac

SEQ ID NO: 14134 - DNA, 1589 bp, Homo sapiens
gctgggaattacaggcgtgagccaccgtgcccagccaagatttttacaaaggaaatagaaaggaatatatatgctacagagcaaaagaagaactagtaggacttaggaaataagagatctgaaggcgcaatcagagttggctcttggtacctgggtgaagtctggtagaggactggttctctgctgtgttgcatgctacggggttaacctctatctgtttttttttacctgctgaatttcaccaaggagtcaagtcttttcttgcagaatatgagctttgatgatttgaatattttcccccagcttttcttctcatcccatatcctacctttattcattcatacctaagtgatatttcataaattctctcaaggaaaatagttcatccatttttgcatttggatagaacatcctgaaaaagaacacctgtaaaatacctttgctattattataatgctaaaaaatacaaagaaggtaaccagagcatcagtgaagagctctcaggaagaattcattgtgagtgcatttgtaacaagtcatgacatagagttaatgccatgacttacagtccattgtaactagcctgttagaatccgtgaaaagacacattaatctatatacataggtatatagcagtaatactttttttttttttgagacggagtctcgctttgtcgcccaggctggagtgcagtggcgcaatctcggctcactgcaagctccgcctcccgggttcatgccattctcctgccttagcctcctgagtagctgggactacaggcgccagccaccacgcccggctaattttgtttgtttgcatttttagtagagacagggtttcactgtagccaggatggtctctatctcctggcctcgtgatccgcccgcctcggcctcccaaagtgctgggattacaggcgtgagccactgcacccagccagtaatacatttttatataatctcttggttaaatgtaaatgtaataattggttttattatttaaatatagtctagttttcagaatttgaagtagtccaaatgtgataattacagccctttcctccactgagtttgctgtgataagatatgtagatatgtaaatacaatatgatgtgttactgaaggtatttcttatggtgttatttgatatatttttttttcctcaagattagggtagagaaaaggcctagatgtaagccccaagtgtgtatgtaaggggaagggtagatgtgaagctgggaagctatataaaacaatatgaaaaaggatcattttcattcttcccgaatcagaatgaaaaattaggatttttttttttttccctacaggaggaacaagtgaaagtgaacctatgctaagccatacggtcaggaagcatcttcggaaaactagacttgaattactacacaaagaatatgaggtaaacagtaatcaaagtttaaaattatgttagcagtgaattcaaggtaaaaactgacctacctcagtccccagacttcttagagtaaatatccaatgaaattttattttaaaagcctataaaaagaaattgtttgataaattcttttttcttttttcctttcgtattt

SEQ ID NO: 14135 - DNA, 2039 bp, Homo sapiens
tttctagtgtacaatatttgtaagacaagaagaaaatttccttttcccagatctcaggaactaccttgttcctgttaacttcttgaactggctagttgctcaaaggtatgtatacaggcctttagggaagagcagtttttaaaattttcctttctgatcattatatacctgtcagatgacaatagataatcttccaaagttgctacttaaaaatcctaggaaagaaactttggtgaacatgactgccattcccattaattgctaatgaaaaacatcaaacttgcttagtagaaaaacacctaatttggtataactttcttgcagtttatccatattatgtgcttgttacttaatgtaattaaaagcattttaaaattctacttttttcgtatccactttttatacttgctacttcctaaatcctccctcactgtttatttcatccatctactcatttcccatcatccaaagttagcctctccttgtataccaggcactgtctgatttccatgtattccttttatttttactgtgggcctttgtgcttagtatacttttacttcatataatgtgattaacaaatgaagtgattatcatatggagtttaaggaaattagatgtatcttgcaattactttgaaatctttgggaaaccttaagaagattgtatctgttttcatttttatttacaacatcttggaatttgttcatgatttcctaaaatttctttgcctacccacatctctgtgaaaattttccatatcagttaagtagttttcgcaatgaaaattttagaccatagatatgttgtatgctgtgatcttttgcagcctaatgtttgaagggagtatgatgcagagaggttttggtaaaatcattttagcccaaagctttgtgtaattttcctgcaactttgattttgatttctttctcaaatagacttttttaatgtttagaaaagttggaggtcaatttatgatgtgattcaagttttagatttatttgctattttcaaagttttttttaatagtcttctctttttccagcagagagagatcatcattgcctgaatttagctttgtgactgcaagagcaagaccagttcctgtctggagacgactgttacaataatatcatcctattattttatgttcactctttatcaatttgaacagatgtttacatgtactataattagcattttatctctacagttctctaagagtacatctgagtccaaagtgtatctgaatgtgtgctctgaccttattcttaaatgttttctccccatactttatagccatttattttttaaacaccttaagaaggaacgaaaaagttctcttggatgacgtatattcaagtctgagccaaattgaggattgtgtctaggaaatctgtaaagccatactactgtgttcattagcatgagcaatttaaaatgaaaatgaattaaaaagttaaacatgagtttggttttaattttggggggatcttaagatatatttctgggagtaggatagccactgaaaataattttgaatagatgataaagtacttttttatgtactgtaatagcttgtgcatttcttctgaatatactttctgatgttgccaaggtcatttacccaaatatttttttaaaaattcttagcccttcaaaaccaacaaagaaaataattttcttccaagtgacaaatgatgatctgtggattataaatattttaaaaattatatgtcttaacataattttttcacatttttttgactttcaatcaagacatcgaagacgacctttaaagcaagaggaaatagtgttgtgtgcctaacattggtaaagactagtttttaaccattttaagaagtgtatgtccaaattatttataagcagtatgacttaatatggcttagaattacttataaagaatctgattaaatctcatcctaaatatgtagccacaatatcttttttataatgggactataagaaatgtttgcacttagtttctgagtattccttcatagattctcaggaggcat

SEQ ID NO: 14136 - DNA, 1089 bp, Homo sapiens
agtggatttcttttgcaagtgaacatgatcattgaaagttgatatggcagtttccaggaaataaatgcattctttgtagaatgggggtgggagattacatatttatattttcaaattcatcattttgattgcaagtgtttctgcctctcttgagattatagtgataatattaaaaaatcacatttaaaaaattactttcttccatattggggtcctcacaatcaaaagctgttgttccaccaccaccatagtcttctgccagtggagtaacttaaggatgctgttctttttcttcttccccatacacccctaattggggttgaagttgtgtgtattttcttgatggtaacactatttcatagaaatgctttgccttgcaattcgtgtctacgtttatatttaaaatttcaaaatcagatttcagttgtcaaaatagtgactttgctcaaaaagtcactatttttacttatatatttaaatcaaagatctatttttatgtagtctcttgtatgttgactatgtgctattctgattcattaggtaagtttgttttcttttctttttagtagtcgtgaaaggtgccaaattggcagaggctcacgtttcttctctttacaccaaacaggtattacaaagaaagtaaatctttcaaaggccagttaaatctccatgctgatttttggctttataatttgattagtatgttttagcctgatatttcaaaaattataaaattcccttacaatgtaactgaaaatacatattctgtttatttcagtccatgaatagctaatcagttttcctagaacttaaaatgttttaagccatgttgctttgaatgaatcagaagacaaatatatttcagcgtgatcccaaagaatggagattaaatcttaccaacattaattaggtttacaattatattattcatagtattaatattattttaattataaatattacttagtattaagttgctactgaattttttacttgtttataaatactagcactctacatgtactttcatatgttttcatttaaaacttaggaaggagttgttcatttccattttatagataaggaaac

SEQ ID NO: 14137 - DNA, 1151 bp, Homo sapiens
atgaatctcgttcttggagaagatgatttgactgatcattgatctgcatatgctagaactctacctgtgtttcattagtattatctaatgtacttttacatatttgtaaaaacaatttttggtaaaatgtgatgaagatggatttcacaaatagacaaaaaagaagaaaactaccttctgatcttgtattttgaaagattgatgtttgcattttacttcagtaaacaattgctaaagacatcacactagaaacatatgcaatgtttttattacatacttctactggacatcacagaattctttgggttctttgtaatttaatgaataggtctgaaaacttatgaccaatacttgttataacttagaggactttgttttattccaaataaggaatgaatttgcatttaaaatcttaatgaatgttttcaaaactgaatagataacatagtactctaactaaagtctccaagttatgtattataatattacatagtagtatgcttaggctttactatgtattagccttttgttggactgtgtatgtattttaccatatgggttttaatgataatggtgtatgactgctttacatgagtccttatgcatccagatgttataataaagtggaatggtctctttaaaaaaaaaaaaggaaagaaaagagaaaagcaatgacaaaaaaaaaaaaaaaaaaaaagccaagacaatgttccttgatttaaaaaaaaaaagaaaagaaaaaagaaaagaaaaaaattaaaatagaccattccagatggtgatctacccttccccccaattatcacaaaaggagctataatcactaacttattcttaataataatggttactggtacccttacaataatgtacaatccaatgtttaaaaattataccacttgagtttggtttgatcctataaattttcaacaaatgtcttaaaatttaaaagcaggctgattagtttggaaccagactgcaagtagagctaacatttggtgaataagaaaacatcacattacattttggatgtatgaaagaaaacttgaccatttgaagatatatgaataaagaaatgtactatagatactactttaggaaaacactgtttggtaagtgttccagtctgatattttaagtgtgtacttcct

SEQ ID NO: 14138 - DNA, 1065 bp, Homo sapiens
acaataaaaaataccagggattaatgtataaggaagactttagcactgaattacatgaaggttgaataagtgacagaataactaaggccaagttaggtctaatgagaattacctatttagaggaaatagctttagttggatttacttaatagactaaaaagagtaatgaccactgctatgataaatgtttagatttttagttacaaaagttgttaaagcataagcatatccttaagccagaaagtttcttaaaattttgtaatgttgaaaagaatagaaaattaagttgaagcttatcttatacaagcaggatacatatagagcagtggtcttcaaacttttggatttcagggaacagtaaagtttaggaatttaaaaatttgtgtgtttgtcatagaggtatcaactttttattttgccagggaagaatactttaaaaatacaaaaagattgtcatgttctatcaccattgttatataaaataaaggaaattttaacactgaaaatgtaggagaacatgaactcgcagtaaaggataggccttcccaagaaaaaactgtcagcccttgccaatgtttactgtcaaacattacattgttcttgttttctggaccattatcctagatgactgaatgaatttattttctataatcaatagatgcatagtatttcaagatgaaagtacaagaataaataaggtaattgagacattcagatataactgaaaagtgagaagttttcctcaggaaaaatattgaagcattttaaagaccatcagtataagcagaacactgttagctttaggttaagatggtttatggtttgactctgccttgttacctagaagatggttcctattaccttattttctatttttttgtctatcaccatgccaaagtactaaagttggataagtactcagacaagagtaaagcagtcgtctcttccatgactgatttgaatattatcttttctgcactgaattgttactgtacctttgtaggagcccaagatcctgttcagaataggaataattaagttgctgttttagaagaatcagaacaa

SEQ ID NO: 14139 - DNA, 1604 bp, Homo sapiens
attagtatttaagaatgaggagtctaaagtcctgttcttggtggatttaaagggataaagaaaggaattaagagaactagaaaggagcttggaaataaatcttgcccatcttttccctgctgtgtaccccacttccacaccttccacaagagaaaggagagccagataatttgtatgttgtgtatagttttacagctaatcaggaaactaacaatgaatgtgctaaaataatccaaacagacaaagtgagtttgttgtgatttatgttttggtgagactaaggtgcttttggctgagaagtattcagagcctctaaatgaaaattctgacatgcatttggacattgaaatttcactccaaagttcacatttaaattattagtcttaagtatgagcacaggtttagttgaagtttagcttcttttctctcaacctatgatttgaacacatgatggatgtcagaggaaaaaaaatttacattatttaatatatgtgatgttaaaggaccattaactattacaaattgtgattaacaaaaatgctgtatcttccagtaccagtagtaatagtaataaaaattataactaaaaacctatagagcacttactttgtggcaggtatgccctctgagtgccttacaataattcattatgaattatttggataaccctgtgaggtagatacctttatttacgcccattttagaggtgaagaaaatgatgcatgatgaggttaagtaacttgtttacacagctaataactggcagagctagaatcttagtggctctaggacattctctttactgtgctctacagaacatttctatgatatgtgtggagctaatgagattacagttataatttttgggggggataattaggaaggtattgataatgatatataaaggactagaattttgtgggataaaggttgctgtttgtagaaaaatcctcccacacatgagggaaaaaaatccaacaaaccaaaaacaggaataatataatgtgtttagcttttaaatgttctaaacaactataaagtacagtagagtgtgtagtaagcaaaaccatggtcagttagggtgttaaacttttgaatcaagagacctggaatctcttcccattaattaacaattaactttggggaagttacttaaattttctttttctttctttccccatttattgagaatgataccaaaaactcacaaattctgaggattcagtatgttgcttaagaaagagtttatcttgggattggtttagtgagtataagaggaaagttagttagcaagaacgctcaggctttgaccattatttccttcatttaaagcatagttcaattgagtataagttttactaattctgggaagtgtgaattgtatgtaagattggaagacaggaccaccttttatcttatcaagtactaaaataaattactcaccatacttttctgttaaccattatgaattgttatgtattctgggttatatttattagtattttaatgttttttaataccattaggatttttggatatttcaaaatatttatttggaggaaatactttttttttaatttaaagcaatatggtgaaattgaaga

SEQ ID NO: 14140 - DNA, 1046 bp, Homo sapiens
ttgtcaaattgcattaaagttttattcatctgccagagtgtaatgcttggcttgtgttagtaatcacagcattgtttaacctgtgtgtctaatctcttctaggctgccaaacgagggattctttcatctggtcggggcagaggaattcattcaagaggtcgaggtgcagttcatggccgaggcagggggcgagggcgagggcgaggtgtgcctggtcatgctgtggtggatcaccgtcccagggcattggagatttctgcatttacggagagcgatagagaagatcttcttcctcattttgcggtactttcttactgctcaacaaaacaaatgctgataatcatcattggggatagtagacataattaaagaggaagttatgaaaaggacataagtaatttcaactcgttaatctgaacaaagagtttaatctttaatttttttgttaatttaaaaacaaactgtaggatttgtataattatctagaagagacattactattcttacacttagtaggccatgaaatactgtgaaatgaacaatataaactttgctgtttcagagagggaagtcttgtagtttagtttgatttgatatttacttttaaagaaaaagttaacatattgcatgggccatccagatttttaaaataaggtttgtgtttgttaaaaatgtattcttgatctagctgacccagtattgaaacaagataaaattttgacctatgatcttgaagttgcctccgtcagtgtcaggatgtaatgaaaaagactttgtataatggtaatatattgacctacaagaagggagaatgggattctagtctctgttaatccattatttaacttggacttcctgggatttattaggctcatgttcaaaatgaagattatacctgctgaatggccctttcatctcaaatgctgtgattcttagtggtatcccaaaggttggttactaagcatcagttttaccctcagcattatatttaatagtagttgctctggagatatgaaggaaataatcagttctttatcctcaaggct

SEQ ID NO: 14141 - DNA, 1044 bp, Homo sapiens
ggaggaatagagaaaaactgttttaatttgatgaaggaaatctgcaataaaagaaaaaaaactacagctaacataatattcaattgtgaaatattgactgtttttccttgaggttgggaaagacaaggatgtccatttgcatcacttttattttttttagtattgtactggagagactcatgggtgcactaaggaaggaaaatagaataaaccatataaagattggaaataaaactgtttacttgcagatgacatggttgtagatatagaaaattcaaaataattcacacagttgggattaagtaagtgtagtaagatgtatagaagtaaatatgtaaaaattatagcacatatagaaatgcatttggaatatagaaatgtggttgtttggagaagtcactgtctctgttcttaggaattggagtatcttcttttctgttgggctcgttacttccctccactaatttcagttttaatagattttcttcttttgaaaatacatgtgtctcttactatccaaactgtctaatctccagaaccagatagattcaaatagtgaacaatatagttcattgtttataagtcacatttttacattttaacacctctgacgttgggctgtgtcttataattgttagacacaggttatgattggcagcctttttttctttagtaggggtacataaatgatagtttgtcttacagtcactgagttgtagccttagtgagtcacattcgtggatgttctagttttacagaaggatgttcctggataaaaaaggaaatgggaatacttctaggaataaaggagtcttatcattgtcagatacttttattcactttgaaccagcactccttagtctgatactacatgtcaaaaatgatttgaaaaggagtattctcactgaaactggagaaatacttggttaaataaattatatgggtttgttcttggcttctcactgcttttattatgaagataatataaattaaaaactggaaaattgggttacgatattcattgtttcacacttaaataattag

SEQ ID NO: 14142 - DNA, 1046 bp, Homo sapiens
tgtgtagatgctaagcaaatcttaatatgtttccttggatttttgaaatttgaatttgttgtgtaactttgctagttaaaagatttagagggatttggctgggcgcatggctcacgcttgtaatcccagcactttgggaggccgaggtaggcagatcacgaggtcaggagttcgagaccagcctggccaatacagtgaaaccctgtctcttctaaaaatacaaaaattagctgggcctcgtggcgggcgcctgtaatcccagctacttgggaggctggcaggagaatcacttgaaccagggaggtggaggttgcaatgagccgagatggcgccactgcaccccagcctgggtggcagagctagactctgtctcaaaaaaaaaaaaaagagtgggatttatcatagtttttttttcttaactgttattgactatttttaatttttattttttaattcagtggcctctcaggattattacctgcatttttttttcaggaaaatatgaaattaatttatttgagtgtattagctttgctgaactttgtagtaactaagctatttgtgtagcaaaaattcattactagctgtacatattttttactttgatgtttgttaaaatatttctctgcaagttttttaatctttgtttcttttaatccctttgtctatttcacttatatgtggaatcttaaaaagttgaactcatagaagcagagagtagaatggtggttaccagtggctgaggacaggggattgggaaatgttggtcaaaagatataaaacttcagttagatagaagaaataaattaaagatatctatagtacaacgtggtgactatagttaataacaatgtgttgcattcttgaaaattgccaagaaagcagctcaccacaaaaaaaagtgacgtaatacaaatgttaattagcttgacttagccattttacagtgtatatatttcaaacagcatgttgtacatgataaatacacagacagtcatcaacttacggtgacttgactaacagtttttcaatttgatgatgcattt

SEQ ID NO: 14143 - DNA, 1781 bp, Homo sapiens
tctctgctcagtgcaaccactgcctcccgggttctagcgattctcctgcctcagcctccctaatagctgggcttatgggcgccagccaccacgtccagctaatctttgtatttttagtagagatggggtttcaccatgttcgtcaggctggtctcgaactcctgacctcgggtgatccacctgcctcagcctcccaaagtgctgggattacaggcctgagccaccacgtccagccagattgtcacatttcaacatgagatttggagaggataaacatcctaactatatcagtatgttaaatatactatcactttacaagtatttatattactggagaagatcaggtagctcttgggaaatggttaattatacttttgtccaatattaaaaatattcatatttttaaatattttacttttgctaacttagagaaaatatatatttccagtgcttttgacatttgtttctaactattccttcctcatagaaaagggtttttgtatgagaggagacatgtgtccttttgatcatggaagtgatccagtagttgtagaagatgtgaatcttcctggtatgctgcctttcccagcacagcctcctgttgttgaaggaccacctcctcctggactccccccacctccaccaattcttacacccccacctgtgaatctcaggcccccagtaccaccgccaggtccattgccacccagtctcccacctgttacaggtaagtaaatctgtttgtttccctgtatttatctagccattcttagtctatttttaaaacttaatagattcttaaattaaaagtatctaaaggaatcccaaaaatgcctgatagaaattaatagcagtatacttccatttggaatacacctccactttgtagcctgtgccaagccagttactatggtttggagtgaccctgtgaattaagtatatcactggtaaaacccagctgcctgcaggccttcatagcttaaggcaaacctgctttggaatgtattaaaaggatattttaccctggatatctaattcagttgtaagggcttggtgtttgtagatattatagtttgataaatgagaagattatgttcggatgtgcaataacttgttttatttgtttgctttcagatgatatttcttattctttggttttgacaggaccaccacctccacttcctcctttgcagccatctggcatggatgctcctccaaactctgcaaccagttctgttcctactgtagtaacaactggcattcatcaccagcctcctcctgctccaccctctctttttactgcaggtgcagttttggccctttttatattcgtaatgtaacacagttttagatgaagaattttaaaatgtctagagagaattgctctgtgaggactacttttctcactaaaattatgtagccgtggtgaatgaacattaaataagccctcagttttgaatgttttcaaaaaaacattttctttttaataacttttttaaataaagttattttctttttgatacatatagagcatgttatatgttaatatgttatattgtttactttttctcttatcaatattaaaaaattaccaagtggagttttataattgttttttaattacagtttttgtattaccagatacatatgacacagatggctacaatcctgaagccccaagcataacaaacacttccagacctatgtatagacacagagtgcatgcacaaaggcccaacttgataggactaacatcaggggatatggatttgccacccaga

SEQ ID NO: 14144 - DNA, 1118 bp, Homo sapiens
accatgcctaattttttttttttttttttttttttttggtagagactgggtttcgccattttgcccagactggtcttgaactcctgggctcaagcgatctgcccgcctaggtctcccaaggtgctgtcattacaggactgattcactgtgcctggcctcaatactgtttattgcataatttatctcttcttagttggtttggatgccacttttataaaatctgaattcctagtacatttggatccatttctagactttctttttttgctgtttaaactaatatactgatgggtatgtttttaagaaataaaatggctacacatagcattaaggagtgttagtataaagagaacttaaatttcttcaaggtcctctgtgacccgggtgctttttacatgtattaactcacttaactattattctcactaattcagtttgtaactggaatttgtagaatgtgcagttggctaaattttcttcaacattggtttttttctttagctgtgatgcagatccatccgccctagcaaaatatgttctggctttggtaaagaaagacaaaagtgaaaaagagttaaaggcattatgtattgatcagctggatgtatttcttcagaaaggtaagatctttggtttaaaaatactactatattttaaaaagttatttaaggcttggcatggtggctcacgcctgtaatcctagcactttgggaggctgaggtgggtggatcacctgaggtcaggagttcaagaccagccgggcaaacatggtgaaaccctgtctctacataaaatataaaaattagccgggcatgatggtgggtgcctgtaatcccggctactcgggaggctgaggcaggagaattgcttgaacctgggaggcagaggttgctgtgagctgagatcgcgctactgcactccagcctgggcgacaaagtgagactcatctcaaaaaaaataaataaagttatttaaaataagtttatccacagaatattaaaggaactcggtaagaagccctaattttaacaaagttaaataaacaatattattattgagtatatccatagcttatttaaaatggatgccacctctcagtaatgtccatgtgcttattc

SEQ ID NO: 14145 - DNA, 1030 bp, Homo sapiens
tattggcagattttgttgtttgtgggagctaagaaatacttttcaaaacttgattctttttttccccgatctataaggcaatttcaggtctgctttttctttcacacattttcaggatgctagcagtatatagcaggggtaaagaaaagtctagctctgacaagatatagatcattcaaattacaaaccttttatcagcagtggcaactggtaaagtacctcgaacaatcttgctagccatggagataatttttaaaaataatttgctatatgaatatagtttttttaattagttaatttgaatgtttatttaattgactttgcataacatcatcactagaagttcagataatataacatttaagacaaatagaaaagagaacataggttttgcctttctgttcctgatacataacatttcagtatattattaaatttctgtggtccatattttttactcagctttttgttttcaaaaatattgaagtaaaaatggaacttcttgtaggacttaagaaaaattgtttcccaaatgcaaattcagttgttttgccattaaatgtgaaattataacccctgcttctatataatttgaacttttaacaaatgttaaaaagtcatctgcctttcaaattatttcaaggatttagaactgtatatggtagtatatttgttgtggctaatcgttttttattcagttcagattgcttctacagaagatgttgagcagagattcttctttaattctgtcttgctgttttatccaactgtggtttatagaccataataattataaaaatcatgaaagccttcctctagatttttagctgctaacattttaattcagttttaaaatgtcctatttaaaaaataatggtgcaaaaatgaaatagatttggtatttcgttgagagaattgaaaaatgacaggtaagttactggaaaaaccactaataagttaaaaattcaccacaacaatcaaaccaatattaaattacagcatttagactcagtgtagactgaatttatat

SEQ ID NO: 14146 - DNA, 1048 bp, Homo sapiens
aaagctcactgaagcagttaatttgaaatccttggagaattaaaattggaaaccccagtgttcgtgaatgctcactttgctccatttcactggactcctgtccctcatatgtgtcaagaaggtcaagtaggccttaggctctttctgatgggttcccttggcctgggctttttaaaattttttcttttccggatagccataaagcatatttgcattccatttccattcctatctaaattcagatccctgtttaaatgtcccttcaacagagtccttccttgatgatcttaaataatacttgttttatcttttctgttttctttctccttacctttcttcctttctcctcctttacactttatcttttcaacctggatttttcctcagagcacgtgtctacatgacaatacatactataaacgtatgtttgtgtaatatgcatattggttccccccaccccccaatgtaaattccgtggcaacagtgatgtttctaaaagttgtattttcaggatctagaacagtgacagagtaggtgcttttaaaattttcttgaataatgaatgcgatatttggacgataatcactaaacccaacatacttattttcttattttattcatcaaactttatatgaagatgaaagattccctgacagaaatgagccattgatctagtgagacatatatttgtatgtatattctctctcttagtaactattaatatgtttcagatcttttgtagtgtgtattttatctacagtgtaatttttaaaaaatgcttttctattactaatatatgtagatcagtaattgaacagactaatgtgttattttatatttcatatatttgcacagtatcttatgaacagatttaaacctaatgattttactcattgatacttgtgtgggatttactatccagtccagtgcttatttgccaagagctgttcagcctatgcttgaaaccattctaatgaaggagaaccctcaggcagtttattctgcctttgggaggcctctgattattttaaaaaaaaaaagcctatct

SEQ ID NO: 14147 - DNA, 1030 bp, Homo sapiens
aggaagcaagagaaatactcatggaaagcctttatatgcttccaaaaacggcactttgattccagagggcaacgtttatttgccctcttgacagaaagtagtaacctctagaggacttagggcttgaggtaaggactcgcaaatggcagaagaatttctcttcctaccaaaggggtgctaactcaaaaagcaagtaggtggaatcattgaagggccagagtgagcctttatggaggttgacaaactgcttcaaaagccaccagaaaactcagccatggggctggaatggaaagcatatggtaagtcgtaaggagctagcagagcggcagttccagttagtgtttgtccccacaatgtgccagcagaggggaaggttggaggtcatttgagctggtagggtaagaacaagtacaaatctcaggggatatctgcgggggatcccggctttgctactgtgtaaacacagtaaaagccgcaggcgcacaaataataggaagtgtgtgtttaagaagtcacgtggcatgtagagtgaaaacagagaagcagacttgcccccaaggtgaacagtccagcacgtgcacaaagccatttcagaacacacacacacaaaaagaataggcagtgcagcttcttggagaaaagctgattttagttgaaaaaacaggaaaccccaagcactgcacggttttaggctttaaccctatcattctcgtgagcctcctgcccaggagggccattagtgcctcaggtccactcggtgcagaccccaaggtccttcccacccccacaaggtgatctcagtggtcatacggggggaggagagccacttgtgaccaagaggaattgttctgagggttgattagtaagccagacagcgaatgggagaagaaaactgtatgggggttgaatgtctccagccgaagatggtactgtgtacaggtctcttacaagtagggaatgtactcaagtcatgcggaactgatgtatgttacctgctgcaaatccatatggatctgcagcaacctcactt

SEQ ID NO: 14148 - DNA, 1215 bp, Homo sapiens
aatcttatttggcctttccatctgaatgctgagtggttaaaatgcatttagcactttttttctgtatgttttagcacttccttatctttggctgacagtgcttctcaaaattattttacatgcttaaactgagagatagggactgtattatgagcaaaatgtaaaatattcccatgttagttatgtacataacctaagcttgagaatgactaactgaagcttgagctaaatagcttgtaagatttttttccctcttcttgcttcctttgtgccagagaaaagaatgaatgagagaaatgaatgaatggtaagctgttcctactagacttactcattactctcctactactttatttctgtggaaaaagtcttttcaatttacatgcagtaactttgaaataggtaaaagtttatttttaacttagggttttattagtatcttttatgtgtgtattaaataatggagtaagttcaagatctgttacttagtgattcttcttgagatattttacctatgtagaagcatttcttttgttatttttttctgcgacatgttttacaaatgcttttaaaattttgattttctgatttttattgttagtatatagaaatatatttgtatattgacgttgaattctgaaattttaccaagtgtacttattctagtagctattttatagattctgtggaattttcttctaccaatctcatcatctatgagtaatgacaattttctgatttttataccttcatttctttttttttttttttttttttttgagatggagtctggtttgttgcccaggctggattgcagtggcgtgatctcagctcactgcagcctccacctcccgggttcacgcgattctcctgcctcagtcttccgagtaactgagactacaggcacgtgccaccacacccggctaacttttttttttcatttttagtagagacgacagggtttcatcgtgttagccaggatggtctcgatctcctgacctcatgatccgcctgcctcaacctcccaatataccttcatttcttatcatgctggctagaagcaatagtacaatgttgaagtagtaagagtggacgtccatgtcttgtttccagtctaaagggaaagagattaaatgtttcagtattactgatattggctctaggtttttagtaactgccttttaccagattgagaatttttttcttaatttgctt

SEQ ID NO: 14149 - DNA, 1031 bp, Homo sapiens
tgttgaagtctgggaacatcaggaaacacttccctggtgtaatgtttatctcagcttggaaggatgaagaatactttgctggggcaaaaggatgggattggagacctgtgaaagcgttataggtttggtgaacagattgtatggaggtcctaaaaatggacaaaaaagatatgttggaggaattgaaagaaatagaaaaaagcaaaggagaagaatggcagtggaaagctccagagataggagccagatcacacaggactttgttgagtcatgtttaagactttggatgttattgaaggatagtgggaagccagtgaagggttttagggcaagagggttttcagatggatgtttaaaaaaaaaaaaaaaagcctggctgtgttttcagcgtgaaatagaagtctgcatatctgtatttactgtttcataacttctgtacatgtatcagggttctgagtttcataaattattgaaaataattttcaatgtctttttcataaattgagaattttgaactttattaaaattgtcatcttgaaatgcttaagattgatgttttgttatctcaaagatttgcttagtcatacttgccaataatatgaaactaaatgttagtcttttttctaacatttcgttttgatgatgagaagtcctgaaaaaaaaattaagctcctttgttgtagtaaacttttaaacaaacaaaaaaaacagaaaacactttctactgtatttaaaacttttaggtggacttacacatcaaagtcatgtttttttttttttcctgaagagacacctaaacatctaatgaaactttaattttttagaaaataaaattgaggggcaggtggatgtaatgacgtactgaggttttgtgagttgagtagtaaagaacaaaatgcctagtgttgtgcttctgccactgtgtagtgctgtggaggaagtgtgtggtggaaggaagatctctgtgtccagatcagtattcaaatctcacttctgccatttattagctgtctaggcaaagaaacctcctc

SEQ ID NO: 14150 - DNA, 2369 bp, Homo sapiens
aatataattcctgaaagcaaggccacgtctcccatgtgctgtctggctcatctgcacctctcttcactgattgaagatgtaacaggtgctgaggtggccagtaaaattcccctttcccgcctacgcgttcgttagcttggagaggaggaagaaaattgaatcttcatccatatggaatatttagcagttttaagtgggatgctatagatagattttgtgttgggggctgcggttagagtgctgaaatagtcttagattggaaaatttaaggagtgttttgacgacttgttaatacaaaatatgacatggaccaaagtgcttaatcagaattggttgatttacaataatgcaatggggaaaattcacgtatttaataaagttattaggtacctactgtatactacgggaggctttggggatagagcttttaaattctaaaatcgacaagacataaataaatccagatattaatagagttgtgactattgtaataatagagaatcatgtaaaagtgattatgaggggggctatttcacattggtcaaggaaggactctcagagaaggtgacattggagtaacatctaaagagaagggaccatgtgtgtcaaagtcttggaaaagaacattccttgcaaaaggaagagcaaatgaaaggccctgtagcagaagtgattgtggtgtgtttcaggaagagaaaggccactgtggctggaaagagccttgtgatgagggagaggatataaaggcaacaagttggacaagtaggtaggggccacatcatgtatgggaagacgtgagatgatttaaagcagacaaggactgatttaattttgttttaactctgcctattttgtagagactgaaagggcaagaatggaagtaagaagattattcagaagtgtgttgtaggcagagatgtggctagtttgcattagagtgatggtggagacaggcagatccaaatacatttcataagtaaaattaatggattaaatgcgggagatgagggaaagggaaatcaagggtggtgccttagataacccaagcaacagaatgggtgatattagagaaggcagagaacaggttaaggggagaaggaaagtggatggctagttttgataataataaatacagtaagtatgaagtctgtgggatacagctaagtgtgatagcagatcattgaatatatgagtctaaaactcaggacaggactggagaaatctggagtcatgcagatagtatttaagacgatgacattgtgggaaatttcatagaaaaagtgtgtaggtagggaagagaagagggcctagtactgaggcaggaggaaaactgggctttatgtcattaaaaaacaagtgtatggcaaaagagaggagtttatgaaatgctgcagaatgcatgaaaaaatggaggcaaataggtagcccttagatttagcaaagtggaagtcattggtaaccttagcaaaatagtttcactggagtagagttgtgcagatggaagtcctatttcggtgtattggagagtgggcatcatagtatagcggtgaggagaactctggagcagaatgtctggctttgaattctgcctctgccacttaccagctgtatgatattgggtaagttacttaactcagggcttccatttcctcaactgtaaaattgggaaaataatgggtgtatattaaggaaatcttagactactgtctggtgtgtaattagcattcagtagttattaggtgaatacaaaacttataaatgttttggattgaaatagctttcctttaagcgttcagtttcatattagatttactgccgtatccctccatcttacctaaatgagaagactgtagctacttagagtgtatgcttgtaatttttctttagtcttaatgaaacatattccatgtatcataaagcctactctcgatggctgtagcactgcagtcattatgttgtaataaataaggctctgctagtagagcctagacactgggaattgtaattggtccttttctaatgtgtgtagctgtggtaaaattgagcccttattcaagttcttgtccttttaattgcatttcaggtggattcttttgtatgatgacttataaaagctgatcccaattatggatcagtggtttctaacgttggttttgtgaaatgttatgatctgttatctaaaaggaatttttttttttttttgctttaacattgtaattaccaaacgacctctgtttgagagaggaacatacagaggaccaagggtaagctgtaacttgaaacttacataaaactttttagttacctgtggtggttaaatacttcatggttttggacttactccacattttgaatgtgttaattcagca

SEQ ID NO: 14151 - DNA, 1029 bp, Homo sapiens
tcctgagtagctgggattgcaggcatgtgccaccatgcccagctaattttttgtatttttaatagagttggggtttcaccatgttagccaggatgggtttgatatcctgaccttgtgatccacccacctcagcccccaaagtgctgggattataggcatgagccaccgtgcctggccagtaatttttttgtaaacttttattggagcttcttcaacacaagttttcccaattggattgtcagttcttggatggcaaagaccatgtctcatttttctttatatttctcagtatagtaaagcattttgtccatagtagggtctcaatttaattggtttaatgccttaatataatagtagggctaagtactcctgttttaatgctttcagaatattggattgtccaagatttaaacagatatataggtatactcaacgtaggtagtacaggaaagataaaggagataagtgaggtacctagatttacacccaactaacctatgcaggaaacaaagaaattctcattccatctggcacagtcaatatagtccccttttgagtgttcaatgcatctaacacatgtgataagccaagtcaaagaaataggccacaatcccctccctcaataaatgtgccttcacagacctcagtgcttctatttctccatcaggtatataaagcaaaacaattcaattttatgatacacaggggattttgaggtggtttccctccatttgatataggcttaaagggaaaccaatgggctgagcgctgtggctcaggcctataatcccagcactttgggaggccaaggtgcgaggatcacctgaggttggaagttccagaccagcctgaccaacatggggaaatcccatctctaccaaaaatacaaaattaggcaggtatgatggcacatgcctataatcccagctactcaggaggctgaggcaggagaatcatttgaacccaggaggcggaggttgtggtgagacaagatcgggccattgcactccagcctgggcaacaagagcg

SEQ ID NO: 14152 - DNA, 1049 bp, Homo sapiens
atttttttgtatttttagtagagacggggtttcaccgtgttagccaggatggtctcgatttcctgacctcgtgatccgcccgcctccgcctcccaaagtgctgggattacaggcgtgagccaccgcgcccggcctctaattcagttttttaatgggctctgatctctaaagtataactcattggtttgaatattgagcataaagtgatagtcaactgaaatttgaagaggatttgaattaagtatattaagtcctatgaaaataatttgtttaaagataaataagaaaattggagcccaggcatggtggctcacgcctgtaatcccaacactttgggaggctgaggcaagtgaatcacttgaggtcaggagtttgagaccaacctggccaacatgatgcaaccccgtctctactaaaaatacaaattagtgggcatggtatcaggcacctataatcccagctacttgagaggctgaggccggagaattgcttgaacctgggaggtggaggttgaagtaagccaagatcgtgtcactgcactgtagcctggacaacagagtaagactctgtcttaaaaaaaaaaaaaaaaaaaagaaaattggatttttcaagaagcttccaactaacctgttaaatgttgactttatctatataccagcatagaattaattttcaaaatatggaagattaaatatttatgtctaatagattaaaagcaactggcactcattcactgcattaaaaataatttcttatttttatttttattttttgagacaaagtcttgctctgtaacccaggctggagtgcagtggcgccatctcaactcactgcaaccactgcctgccgggttcaagagagtctcctgcttcatttcagcctcctgaatagctgggattacaggtgcgcaccaccatgcccggctaatttttgtattttcagtagagatggggttgcactatgttggtcacgctggtcttgaacacctgtcctcaggtgatctgcccacctcagcctcccaaagtgctgagattacaggcatgagccac

SEQ ID NO: 14153 - DNA, 1038 bp, Homo sapiens
aaattgttgcattgatactaatttacctaaaaatctctttcactgagtggaaggtttttcagagacaatttacacaaactaaagctggtaagcaaggaatagggataagtttgctatatacatttcatgttatcctcttggcaggaagaatcatttccagatcatttcagctgagctgaaaatagacttctgctgagcatttcctaagttacactgctaaaatattctccttagctctggtggcttgatgttttactcatgctatctcctacattgttgagattgaaaagagatgatatttcttttttttcatacatacagttttaatacaaatgaacttattaatatgacatccatttattaccaggaaaagagatgatatttcatatcattgataccccactgcattcaactatgagagcagaatgttgagcttaagagatactaacataaatattaattgattgtcacagaattgtttgcctatctgactttaaaatgtgtgtctatgtgtatgtacgtacttcaaaatattcaagattatggaacagagtttttttgctatcattgaaggtaaaattcatgtgaaacctgaactagagctctcagtattatgaatgatagactccatctatccaagataacatgtagatgaacatgcattttcatatattcctttttcctcaatatcaggtttcttattgcttgtcgaacttttcacctccattatttacttaagggcttcattaatattagtttatctcactttatttctatccccatattaaacacagagttggaaaaataaagctttatattaagcagtgaccaagaaagaagctcttaattatatctacctcctttttggcctcaacaaggccattttcaaatgcagcaatattgtttatcatgtttaatactgtcttgaggtttgtaaatatgatagaatttatgcttcttctatccattcaaaggaaaaaataagaaccatgcacatttatgcagataggcaaggggaaaataatatcatagtaaatt

SEQ ID NO: 14154 - DNA, 1043 bp, Homo sapiens
gcaaatcccagaaatgcagagaaccctggttagatactatacaaaataaccattcccaggacacatagtcatcagattcaccaagatcaatgcaaaagaaaacattcctcaaggcagctagcaaaaatcgtcatgtacagagggaatcctatcaagatagcagaagacttctcagcagaaaacttataaacccaaagggattgggggtcctattttcagcatccctaaagaaataaaatcccaactgagagtttcctgtccctctgaattaagctttataagtgaaggagaaatgaaattatcagatagcaaatgctgagggaatatgtttcatctagataagcctttcaagaggaatgctaaaaattgaaacaaacgaaaaatacttgataccacaaaaacacacttcagcacctagcccacaggcaatcaagtccacataacaaccaactaacaacaagatgacaggatcaaaatcacacatatcaatactaacactgaatataaatgggctaaatgccccacttagaagatatagagtggctgaatatataaaaaaacaagacccaaccatctgctgtcttcaagagaccgatctcacatgtaacatcacccacaggctcaaagtgaaagaatggagaaagttctatcatgcaaatggaacaaaaaagtacagaagtagctattcttatttcaactaaaacagattttaaccaataaaattaagaagcaagcccgggcacagtggctcacacctgcaatcccagcactttgggcggccgaggcaggcagatcacgaggtcaggagattgagaccatcctggctaacacagtgaaaccccgtctctactaaaaatacaaaaaaatagccaggtgtggtggcaggtgcctgtagtcccagctactcaggaggctgaggcaagagaatgatgtgaagctgggagatggagcttgcagtgagccgagattgcaccactgcactccagcctgggtgacagagctagactccatctcaaaaaaaaaaaaaaaattaagaaacaaaa

SEQ ID NO: 14155 - DNA, 1073 bp, Homo sapiens
ttgtcattggttctgtttatgggatggattgcattattgatttgcatatgttgaacaaaccttgcattccagggttgaagatgacttgaatatggtgggtaagctttttgatgtgctgcttgatttgatttgccagtattttattgtggatttttttggcaatgttcatcaggaatattggcctgaagtgtgtgtgtgtgtgtgtgtgtgtgtgtgtgtgtgtgtgtgtgtgtgtctgcccgcttttggtatcaggatgatgctggcctcataaaatgagtttgggaggactccctccttttcaattgcttggaatagtttctgaagaaattgtgccatctcctttttgtacctctggtagaattcagctatgaatacatctggtcctgggcttttttggttggtatgctatttattcctgcctcaattttagaatttgttattgatctattcaggaattcagcttcttcctggtttagtcttgggagggtgtatgtatctaggaatttatcaatttcttctagattttctagtttatttgggtagaggtgtttacaacattatctgatgggagtttgtatttctttggggtcagtggtaatatcctctttaacatcttttattgtgtgtctacttgatcttctcctttttcttctttattcatcttgctagtggtctatccattttgttaatctttaaaagaaaacagctcctgcattcattgattttttgaagggttttttcacatctctatctccatcagttctggtctgatcttagttatttcttgtcttctgcttttggaattgtttgctcttgcttctctagttcttttagttgtgatgttagggggtcgagttgagatctttctagcttttggatatgggcatttaatgctataaatttccctcttatcactgctttagctgtatcccagagattttggtacattgtctctttgttttattggtttcaaagaacttcctgatttctgccttaattttattatgtacccagaagtaattcaggagcagtttgttcaatttccatgtaattatgtggttttgactgaa

SEQ ID NO: 14156 - DNA, 1034 bp, Homo sapiens
gttggatggattcacaaaaggccattagttagcaacaattttccaatactccaagaaacaacaatggaaaaatcatttctgagtgcttaattacacttatactctttcatttcgtatacaatgtcattatctatcctcttcttgtctgctgtgtgaggtaaatattattcatccatagctgaagcaactgagcttcacataaatgatgatgctagcaaaactaacataatactttagtgttgcagacatgaaacaaaattgaatactttgaactcattcactcgttaaataaatatgcaccaggatctaactaaacccccattgatcatatttaaagttctgtcatattcaccatttcatgtgtaatatctaacacaatgcctggcaaatatccagttctctaaataagtgttgactgaatcgatatgccaggtattttactatgtcctctttcttcctcttatcataaaaactcattatctttcatatcagtgcagattatgtaccaaagagtgactattgatccaataccacaattcaatatattttagaaacaactttttttctaaatactgaaaaacctcaaactcctatttttattgaaatctgggtgtcaattatggagtgatactttaaagcatttcttaggttattatcttaaagatatcacaaagtctgtatttcacagcccaatatgcatattttgaaaaatatgatattaaactttaataaattaccatctgtttagaataaaaccatactaactagaggtaatgaacaaaatagatctataatgatgttgctatgcttgtgaatttagattggagaaacttttctctggaattttctctaaaccctaccttagcataattgtaacattttacatttgcttctcatattatttgaaacttatgccactattctggattcattgaggaagctgcaaggaagcaataaaaattctttctagcaacaactggaaattttggaattatttacctcttttttttttttttttttttttaaagacaggg

SEQ ID NO: 14157 - DNA, 1052 bp, Homo sapiens
ctattcccatcaaaccacaaatggcatttttcacagaattagaaaaacctattctaaattttatatgaaaccaaaacatgccttagcagccaaagtgatccaaaaaaaaaaaaaaagctggaggcatcttattacctgacttcaaactatactacaaggctgcaataaccaagacaacatggtactggcacagaaacaggcatatagaccaattgagaagaatagagccaattgagaagaatagagagcccagaaatagagcgacacacctacaatcatttctctattcaatacatgactctgggctaactagccacatgtggaagattgaaactggaccccttccttacattacataaaaaagtcaactcatgatggattaaagacttaaacataaaaacctaaaactataaaagccctagaagaaaacattggaaataccattctagacacaggctctggcaaagattttgtgacaaagatgccaaaagcaattgcagtaaaaataaaaattcacaaatgggacataattaaagagctttgcacaataaaataagctatcaacaaagtaaacagacaatttacaaaatgggagaaagtatttacaaactactcatccaacaaaagtctgatatccagaatctataaagaactaaaacaatgaacaagcaaaaaacaaacagccccgttaaaaagtgggcaaaggacatgaacagacacttttaaaagaagacatatgcgtctaataagcatatgaaaaaaaactcagcatcactaatcattagagaaaagcaaatgaaaaccacagtgagatgccatctcacaccagttagaatggccatattaaaaagtcaggcataatagatgccggcagggatgtggagaaaagggaattcctatacactgctggtgggagtgtaaattagttcagccactgtaaaaaacagtttggagatttctcaaagaatgtaaaacagaagtactattcaacccagcaatgctattattgggtagattcctcccaaaatataaatttttctaccatgcagaca

SEQ ID NO: 14158 - DNA, 1080 bp, Homo sapiens
gattagtcactatttggaaagaaacaaaattgaagcagatccagttttatatataggaactggagttaaagaaagacactgtagattataattaaagtattaccagtaggtgagccttctatatgacattttctgcatgttcaaatagataaattcaacttcccaggagtaataaatttgtttgaccagatatagcatcaataaaaaatcaactgaccaccaattcatttttttctatatccatcttgagaaagaaatcagaaattatgatctattttaactgggacataggctatgaactcctgaggcagaaatttgtgccactatttttttttctcaatagcactaaataaattagaatatttttctcatgaaaaaccttcaaattaagaaggatcaattaagtcgattcctttgagagtgagaagaaactgttttctagcatttttaattatttcagctaatcaattgtgtgtccaaaacattgctttaactctattaagacagtagaaattgggaaaaaaacaaaaaactatgtattccctgaaacagaattggggtaaaatatattcttatttcttgttccttactaaataaatttatcatatatcaatgtcctttgttgtgcttaaaaaactccagacccacaaggatcttttgaatttcagagtagaatcatgattaatatatttatttttatctgattttagtctttagaaatctatggaaatctctcctgtcgatatgggggagatggtaaaatataatttatcctcatgataaatatagcataatgtattccagtgaaacccattatgtgagcttgagataaacttagttggcaggcacaaacctcaaacataggaccaatctaaaatttaacattagaagttaattagcctagaaaattaagtagaaaacacaatgtgtatgcatacaaatggcataactatgttaacttttagaatataatttatctgaagtaaatgtaagcgtagtctcagaatggatatcagctagcattaacaaatctcgacagctggaatacagatattattttaaatagttatgatcatggat

SEQ ID NO: 14159 - DNA, 1027 bp, Homo sapiens
ctccagctgtggcacaaaggggcccaagtacagcttggactgccatttcagatgctgcaagccataagcattgctggcttccacatggtgttaaacttgtgggtgcccagagtgtaagagttgaggcttgggagcctccagctagatttcaaacaatgtttgaaaaagcctgggttcccagccagaaaactgtttcagtggtagaaccctcacagagaacctctactaaggcagtgcagtggggaaatgtgaggttggagccctcatacagaatcctcacagcagcactgcctagggcagctgtgagaagggggccaccatccaccagaccccagaatggtggagccacttacagcttgtaacctgtacctagaaaagctatgggtacttaacaccagcccatgagatcagccacagggatgaaccttgcaaagtcacaggggtgaagccttccaatacctttggagaccacctaccatatcagtgtgccttggatgtgggactgaattcaaaattttggagatttaaaatttaatgactgtcctcctgggttttgaacttgcatggggcctgtagccctttgttttggctgatttttcccttttgaaatgggagtatctacccaataacatacctacattgtgtcttgaaaataactaacttgattttataggatcagagttgaaagggcctagccttgtctcagattagacttcagactttggacttttgaattaatgctggaagaagttaagattttgggaattattgagaaggcattattgtattttgcaatgtgagaaggatataaggtttgggaggggccaagggcgcaattatatagtttggatatatgtccctacccaaatctcatgttaaattgtaattcccaatgttggaggtatggcctggtggggggtgtcatgggggtgagtttattatgaaggatttactaccatcttttttggtactgtcctcatgacaatgggtcagttctcacaaaatctggtcatctaaaattgtgttg

SEQ ID NO: 14160 - DNA, 1050 bp, Homo sapiens
attttatcctataactgtgtgggatttattaggtgctgagagtttatcagaattactgttgtatagagaacactggtataatggttcttagatttaaaccaggcatgggaaaatataatccagaaataattttataatactgcttaagctagcacagatgcccgtgttggattaagttggatataaatttaaagtaccaattaggtcatgttacggacattgccaatttgagcaggaaccatacgaattgctaaaaagcgacttgacataagcatatgttttaaatgcagtcttcacctgtatattagcagatcaaccttcacctaacaaatgtgtattttcctgtttacattagattttctgcttttaatggaagatattagctgaataatacaattgaggagtatataaatgcactatctacataacatatttcagaaccagagggtgtaaaagtgactataatttcatgggtgtattccttgctttcatgtttaaagatacatcatctgtgttgactaaaaaattgactttaaatttctgactaaaatgatcacttccatagataagcaactcatctaactcaactattttgccccctgtctagaaaagtagcttgagaggatattataagcaataatttttggtttcgtcaactttgatagactttttctcaaactaaagcaactccaaatgtttcatttagattaagtttacctctaaagatacttagcgtcttctaaatgttgtcttccttatttactgttaggatcccagggttgtttcattgctattattattacctgtcacagataaatccaagaatactgattcctgctatttgattcttattgccagaattgcttaatttatgagcatgaactaatagtttaccttttctgttctcacagactcagggataaagccacattataccctctaattcatagaccacctccaataatactggcaattatatataacgaaaagctatgaatccatttgtatctatgtagcccctcttttacgggctgagttagtatgagaggg

SEQ ID NO: 14161 - DNA, 1025 bp, Homo sapiens
tttttcactaaattaattatgaactaaaaatttcttctgatttatactgatttataaatacacaaattaaacctataaacttctgcgttttttatttctttgtttttattactagcttaaggatgaaaaaaatttttcctccaaaaaatatatattttcagaaacaatgtgagccctgggtttcaattgtagtaggtacatgacatccaaattgtatacattaaaaataattatgtctatttgtgtttgtgttacaaataattcaatattttaagtttaaatagaaaacatgtttctataaaaaacataattagcaccattgtagtcagaatgaagatttttagatgaagatttgctgttctgtgataaaaattcccagaggctagctacataacctttcgaaaaatatagtatcttaccaaattcctaacagaccaatgggaagatacttattcagatttgggggttgtctatttataatatttgttttacataaaatgtcttttttaaaactgttgagacaatgactgcaaaagagcagatattcaaaattctaaatgaattttataaatgtgaatgcctgaaatgtagaaagaacaaaggaagatcaggtatatatcttctactatttttatccctagatctagaattataaattttgatatagaagtcaaattagtgaaaggaggaaagaagtaaactgaaaaataatctgccctcagggctttatgtaacaaagcacatgttttatatctgggcagtccatagagtagtctcaagctctgtgtagattctgagcacatgaactgtggctagtataattgggaaactgagttctaataatattttaatttttaataaactttattttaaaatggttgtagactttcagaaagaaaaagtaaggatagttcagagttctcatataccttacactcagttttccttagtaataacatctcactttggtagggtaaatttattatatttaatgaggttatactactatattattattaacttaa

SEQ ID NO: 14162 - DNA, 1086 bp, Homo sapiens
tctttgagctctgagattattccttctgcttggtctagtctattgttaaggcttccaattgtattttgaaatttctgtagcaaaatttttaatacaagaagttcagtagggttctaaatttaaaaaaaaaaatgtttaacacatgttctttggacattttagcaagtgacacacatggaaatatcttgagtatcaatgctaacttttttgttaatttttttttaaatcttgggtttatggggcagctactgaaattgaggcatgagaatagtgtgtggaggcagggaacctaagactgacttgtgctgacttcctagaactgaatcaaaaggaaaaccccacctcttcacacccaagtaagaaaaggatcagaggctactctctctgcactacatgccagaggaaaaatggaaagtacctctgtttggtcgcctcccacaaccaatcagactggtcgtgggccaagtcttcatgtgtaactttgtaacttcactttagcctctgatttgaccccttttaaaaccaatcagatgtttgcataggatggaactctgttacttcacgtcagcctcagattggtcatcttctgcaaccaatcagactggttgttggccactccttcatttatatagagttaaaacaagtaaccaacgggaaacctctgcagaatatttaaaccccagaaaactctgtaatcagtgctcttgagcatcttgcttgagtgtgctacgactctgtggagtgaactttcatttcaacaaatctgtgcttttctttcattgctttgtgtcttgtccaatactttgttcaaaacgctaagaatctggacaccctccattggaaacaaaaccacattaatttttagatctgcttcttaaagacctacaacaatttgctatgtataaatcacctgctaaaataggtctgtatcattctactgttgatcttttgattatatactcatatttccatccgcagagtagttgctgctttatttgattaccctcactgaaaaagttaccctgaagcatggtagggatcctcgacagtaaaggatgtaatgtagaaagggacgtttaaacacag

SEQ ID NO: 14163 - DNA, 1047 bp, Homo sapiens
acatgctccaaggagtcccactattctttatgtatacatcaatgtatcattatcatgcaatagtttgatctgactcttcagagataccaacatattctcatgtctggaccttgttttttcccttgtttaattgattacaacataacaaatgtgtcatcagatatatcttaatgaatcgagttctggtgacccaacacaaacattaaaaaggcaactgttttatcttaatcagctccagagtaagcaaacagcagatacacagaaaaaaatcaatggattaatggagactggactcccaatactgagctgactgctggaatttgctcagttgtccctacccagcatcttcccttcccatgtgtgttgttgatattgatattgttgttgctaagactaatgagtccataaattatttgaaaatattttgcttctggagttcatggactgtaattcataagactatttctcaacctatctgaaagcagaatctcaaaattttaaaataagaaagaatgtcttcatctgaagatgtaatgaagaagaatactgaatatgatactctaaactatcactttggttgtactaacctgcaccaaatgcaggttgaatggttagttaaatgtactaaccatttaactaacctgcacattgtgcacatgtaccctaaaacttaaagtataataataattaaaaaaaagaaaaagaaaaatatacaaaaaaaaaaaagcagaagagaaaatggcattttgaaattccttaatggatggaagcaatatgaagagatatttaatagaggttaagtcaatactggctcaaacaggaataaaagatatttcaattgttatagatacaattgaactgtcaaataatttcaaacatagtcaaactcaatcactatttttttaaattttacttcagttctgggatacatgtacagaacgtgcatgtttgttacataggtatacatgtgccatggtggtttgctgtacctatcaacccattatctaggttttaagccccacatgcattaggtatttgtcctaatgc

SEQ ID NO: 14164 - DNA, 1049 bp, Homo sapiens
ataaatagaatatgtctttatatattgaagttagacatggctctgtacaaaaggtaaaagagaataacttggctaatgaaaacaaacaaatataggtacatatctctcctcacctgttttcaagaaacactggttctgactccaatgacagcaaaaattacaaaccacaatgatcatccagttattttttctttttcattttttcctcaaccagtatttcttaatgtaaggttaaagtatcaacacggtagagttctacttcgagattctctttaagctctttactaaaatatgggaggctgagcgtattacttgaagtagattaacaggtaatccacctcttttattcatgttatattttcacctaagttggtatcaattgttatccatgcaaaatgtaatttcatactgataacagggtgttttaagtcacaaaacagaggatttgaggacaatagagaaaaggggcacatatagtatgggatctattaatatcagcatcaggtcttaacttagttcatttcccaaattaatagatgagcgagggctcagaatcttctgcaatccacgtgagaaggttttttgagacatggatttgtgattgcaggtattactaattcacagttcatgtgttaaaaaaaaacttcacctacaaaatcaacccagcaatgtactatccacgagataagagtatacagattcaaagtgttgtttgttggtaattaggtaaacattagcatcttcatgatgtggaaagtgactgaaatgtttgacaccagtttggcagatggtcagcaggtacagagaaagggcagtgatcttgcatggagactgctgctaatggaccattttgtgggcacaggtaaagtagccctttgggaactcataaataatgggagaggggtgaacgttgaatgagctagtctctatcaggctgctaggaattccattaactataatgggatcataaatagcaatgaatgcagtggtgcgatctcagctcactgaagcctccacttcccaggttcaagcaattctcctacgtcaac

SEQ ID NO: 14165 - DNA, 1018 bp, Homo sapiens
catacaattttaatttatgctctctataaagattatgttgctttacataatgtattggtcattgtattagtcagctcaggtttccaaaacaaaatactacagactggatggcttaaacaatagaaatttgttttctcacagtcaggaggctgaaagcctgagatcggtgtttccacatgttcagggtggtgagggctctctcactggcttgcagatggctgccttcttactgtgtcctcacctggtgtggagagggagagaaagaaagagagatctttttgttcttataaggccatagtcttttgtaacctctgtctccaatacagtcacactggaggttaaggcttcaacttacgaatttgggaagagtactgttcagttcatagcagtcattcctgaatagttactaccaaaatagtaacgtattggcccttgatgaatatttattctctgtatagttaacatttattgttacagttttccttcattttgtattttaatgttttgaaatatttgtaactgtttgctctgaaaatgtaagaataatttttatggatcaatgtcatgaaaatgtgtgcaaaaaattatttacattatttaaataacagaaaaatatttaaattatttttagtttttcatattaaactccttttgaatatatattctagtaaataaatttgttaatagttaataaaagttagtttttacataaagtaatgatgactcctaaacattcttactttaaaatgtccatcagtttttcttcatttacttacttcttctgaagcatctattagtaaagtgacacggtctgtgaaaaaaatcacctaggaaaagagcaatgttaagtgatgttaggatgtagtcacctatggtccagtcaacaaagaatatctgcaaaactaaatgtgcacatcaactactcagaaagcatttacaaatgcttcctaaagtccattctttcaggattctaaatagccaatatctacatagtcaaattaacaaataaatttgatat

SEQ ID NO: 14166 - DNA, 1048 bp, Homo sapiens
gttgataatggtgaatggtcttttaatgaactgtttgatttggtttaataatattttgttgagaatttttgcatctattttcatatggaatattatcctgtagttttctttttttacagttttcttatatggcctttgtatcaggccaatcccggtctttaaaataagtttggaagtagttcttctttctcagttttttttaagagttttagaataaatggtattactttttctatgattgtttaataaaatgtatcagagatgtcattagctcttgggcttttctttgataaaatatttttagtgcagatttaatcctatttcttgttaatgtcctattttggctttctatttcttcataattcagtgtttacaggttgtttgtgtcaaggaatatatcaatgtattctaagtttacaattttgttgttatataatttttcatagtagcctcttctgattctttgtatttctgtagtgtcggttgtaatgtctgctttttctggttgttttgtagattctttgttctcttttcctctcttgctgtttcatatatggctaagtgattttctttaatggaatgttttgattcccttgtctttttgtacctctggtattggtttttgttttgtggataccattaggctgaaaaggaaatcttataattacagcaggttgtcttaaacctgctgtttaagatatctgataacaacttaactttgattagaaaatttaaaaatcacttgtgcagtaatactccactatccccacacatattttgagggtctaatatcataatttacatcttttttgtatttttcttaataaattatagtggttatgattttaatagctttgtcctttaacatttatacaaaaaagtataagtaatttacacaccacccttaaagtattattctatgcacttgcttttaccagtgtgttttacactttcctttttttcatgttattagcattttttaaatttcagcttaaaaacctccctttagcgtttcttgcaagacagacatcatagtgatgaattccct

SEQ ID NO: 14167 - DNA, 1009 bp, Homo sapiens
gatgtataataatagatatatagacatcatatacaaacatacacatacatgcatatgtacatagtggaatggtgccaattaaggagaccagagagaataacctttttcatctttgaacagaatgaatcttacttcattctgttttctgaagtgcttcgcacttattgtatggtttaagtaaatatttcttgattaatttgtcaaagaaaatttgaaaatttgagcagtttaacaggcttactatttaggaccaaaaattattaaataaaaaattctgctttaaatttctctatcatctagaacttgcattcacttatttgcttcaacaatacttaattttagatctcctatcctttctcttttctattaataaattctattcttatatatgcaattatttgcttactatcagactcttgggcctcaatggaaatacaaaaacaaaatatttaaattaattcatgggacacccattaatttaatctgctgatcttctgtcattgatacacatacctggaaaacttagttgaaatctcaacaaagagtagtcttctgtcggaaactcataacaaatatttgggagtgactgctatctctctttctccacacaatcaccttttatttctttattccatccatgaattatttttcaaatttgtctgtttttcatatagagtgacatgatactagtttgagccactatcctctcacttaaacctgtgtaatatgctgtaaacctatcttccctgtcctttcttgtaacttttcgtttgattcatcactgaatatcggaacaatctttacaactatgatttaggtaagagtatggtcttgctgtaaactttacaatggcatcctcttttcattacaaaaccttgtattaaatggctacaaattatcttcaaatccacttcattctgttttaaaaggccttcatttcctaacatatacaggcttcgtatttccagaatttcaaatcctcctctgccaagcatgctttttctcttct

SEQ ID NO: 14168 - DNA, 1032 bp, Homo sapiens
taatgaagccatatagactaaaaactatttagaccatctgatacaacctttcctctgatagaccaggaaggtctggaaaaatgtaatgacatactaaaattatgtgactaattattgagatcatttgaattcatttccagattttgaaacccatgtcctaaattcaaattgtctttcaaatcagctaaaagaagaaagaagaaaacttatgtaattacactgcattttgaattacataattacctttactggtgcttattgtttgatgtggatttaaatttttctctggttttgttgctttcagcctcaaacttttcctttagtatttcttttaaggtgcatttggggtttattaatttttctcttgtctacttttttctttgttctgtgactttgctggactatctctacgaaatctgttccccttgccatggaaaggcttatacccttaccatgttgctcctcagtgaatagtattaaacatctatagagtcccctgtgttggcaatggttttagataagctgtatttcacagtctctttacctgatctctgttaagctgtatgcctctgttagcaacacacctagctgttagataccgctaattgctggctgattgctttactgtttttgacaatgccctgatcgaactccacttgggctcatttgcaaaggtagtttttgagcccagtctttcttttccacttttttattatttgtttatttatttattttgagacagggtctcacttttttttcttttttttttttaagacagagtctggctggagtacagtggtgtgatctgggctcactgcaccctctgccttctggttcagggttcaagcaattttcctggttcagcctcccgagtagctgagattacatatgtgcgcaaccatgccccgctattttgtgtgtgtgtgtgtgtatttttagtagagacagtgtttcaccgtatggaccaggctggtcttgaactcctgacctcaagtgatccgcctgcctcggcctcctaaagtgctgggatta

SEQ ID NO: 14169 - DNA, 1079 bp, Homo sapiens
aaaaatcttacaaaggctaacttacttaagacaatatgtaacatttagcttttatacttaagcttttataacattcaaccacgttgctgaatatgtgtatatatgtccaaaggaaatgaaaccagtatgttaaacgagacacctgcacttccatgtttattacagtgctattcacaatagcaaagatatggaatcaaactcaatgcccatctaatgatgaattaatacagaaaatatgatgtatatatatatataatatgcatatatttgtcatatttgttctgtttctctgaagaactctaacatgacaactaagatatgtgcatttatttgaaaacattttgggggtgcacaagtctgttattctagtaaacgttgttcaccaactacatgccaggcattgttttaggtacaggacaaaagaggaaaggtatataagacatgggttatgcttttaggtgagttgaaagtctatagtgagagatatgaaaacaaaaaatttaaattaagtattaataggaatatgtttaaatacagataacagagcgttgaatatggaaaagaattgttctttcaatatataaaaaaacctgttaaagagtaaactatgaaataaaattatccagaaatgaggataaaaataaaaagcatagaagattatgaatgccatgaaaagatattgaattttatcctgtatttacagcactcattgaaagttgttaaatttgtcaattaaatgttttgattcagatttttggtttctctttctgatgataatgtagatgatggatttgtacagggtggaaatagaataaagaaaatatgggaaatttttgtagtaacctaggaaacaaatgataaatacctgaactagtagagatggagttcagagaacatatttctaaatattaatgagattgatttgggtagattaattaatgaggtaatgggaatttgatctataattagctgccccaaggtaagtacttcagtatatgaagtctggccagtgaaacagaggtcttttcaagtcataaacaattgaaaaattttctgttattctttgaataaaaaattca

SEQ ID NO: 14170 - DNA, 1039 bp, Homo sapiens
ggtaatgcctcactaagctgaggatataataggacatcacttccctggttaggggctgtttttttattaatgcagaataaaatattttgccttttctgaggaaacatgattcacaaacaatctaatggatatttccatttttaattgtgtctattttgccaaagctaaaatcagttttgccaagtgtcaaatatcaagaattttagagccttttaaactgacatttaaaaaccaagaaaacaaaaaaaaagttgttctaaataggttaagattccaaaataaattcagaggattgacacaaaatgagatcctgctgttttcacaagcgagatcaaaagaagcttccaaataattcatgagacttctgatttaatgccatatggctggcatctttgcaataatcagcttgaacttcctatttaaaaaatgataaagaccttcaacggaagaaatgaaaacaacagaacctaaaattgattcacaaccaatggttagaatctgttaaatttgtaacaattatttcccttttgggttggattaagactacctttgtttcgttccgtatgtcctactcatatttagactctaaattctgtaatgtctagaactttgttaagaatatcaccacagtagtcagatacactgggttcaaatcacagggtcaaccttgttgattttaaggcaagttatttagcattttcatgcctcagttttctcatttgtaaaataagagtattaatagcatcaaatcagaaatacatagaatgtacttaaaataatgtgccatattactcagtaagtataaaacaggtattcaataaaagtaagcaattgatggtgaggttattattatagaatagaatattttagtttgcttgaagacatttagagatatagaatcccttcaccaatggcttccctattggctaagaaattcacattttagtaccaaaattttgtagttctgttgctctatggaaaaaatttacctttggaggtatctgggtcaccatcaccgccgtcaccacctccactactc

SEQ ID NO: 14171 - DNA, 1050 bp, Homo sapiens
tttgggagagtttcagtactggcatagaatttaaatgtcaaaattctttctgaaaccctttctcctagaaactaggaaataataggtgtagaagactctccctaagggtagccaggaagaagtctcctgattcggacaaccatgaggggtagtggtgctagggagaaggcaaccttcactggttttgaactcagtgcctaagaaagtctctgaaatgttcgtttttaggcaatataggatgtcttaggccctaattcaccatttcttttttaagatctgatatgctatcattgccttaataatggaacaaaatagaagcatatctaacactttttaaattgataattttgtaaaattgattacgttgaatgctttttaagagaagtgtgtaaagtttttatattttcacaattaacgtatgtaaaaccttgtatcagaaatttatcatgtttactgtttaaaatgattgtatttataaaattgtcaatatcttaatgtatttaatgtagaatattgctttttaaaataatgtttttattttgctgtagaaaaataaaaaaaaatttgattatatatttttaatccttctttgccctaaagactttaagaagacttgaaaaagtaactgattggctattgggttgagaaagggaaaagaaactgggtggccctctattaagaatgcagattttggtatggaggcatcataattcctcattagaaagtcttatactttaaaaatacccttaaataccagcctcccactgtgcttagggatccctgagtccatacctcttctattcaatttctccaatttcccctttctggagagaaagagagggaagacaggtgtgtcagttgagtcttacaggaagcagatgcagagagaaagtaatgactataacgataaaagaaggaggaagcaaaattgggcaggctgtgcgggcagaaaggcaaacccaacccatgtggagaaaatgtctattgtgagaatcagctactagccctttcacagtggaaagggcccaatggagttcatgtcccaccagg

SEQ ID NO: 14172 - DNA, 1026 bp, Homo sapiens
ataactaggatccattatttcccctgaaggcttcttgttagaaaatagtacagttacaaccaataggaacaacaaaaagaaaaagtttgtgacattgtagtagggagtgtgtaccccttactccccatcaaaaaaaaaaatggatacatggttaaaggatagaagggcaatattttatcatatgttctaaaagagaaggaagagaaaatactactttctcaaaatggaagcccttaaaggtgctttgatactgaaggacacaaatgtgaccgtccatcctcctttagagttgcatgacttggacacggtaactgttgcagttttagactcagcattgtgacacttcccaagaaggccaaacctctaaccgacattcctgaaatacgtggcattattcttttttggatttctcatttatggaaggctaaccctctgttgactgtaagccttttggtttgggctgtattgaaatcctttctaaattgcatgaataggctctgctaacgtgatgagacaaactgaaaattattgcaagcattgactataattatgcagtacgttctcaggatgcatccaggggttcattttcatgagcctgtccaggttagtttactcctgaccactaatagcattgtcatttgggctttctgttgaatgaatcaacaaaccacaatacttcctgggaccttttgtactttatttgaactatgagtctttaatttttcctgatgatggtggctgtaatatgttgagttcagtttactaaaggttttactattatggtttgaagtggagtctcatgacctctcagaataaggtgtcacctccctgaaattgcatatatgtatatagacatgcacacgtgtgcatttgtttgtatacatatatttgtccttcgtatagcaagttttttgctcatcagcagagagcaacagatgttttattgagtgaagccttaaaaagcacacaccacacacagctaactgccaaaatacattgaccgtagtagctgttcaactcctagta

SEQ ID NO: 14173 - DNA, 1029 bp, Homo sapiens
ttatatattaccacataataatagaaataaagtacacaataaatgtaatgggcttgaatcatcctgaaactacctccatcgccatccatggaaaaattgtcctccgcgaaaccagtccctggtgccaaaaaggttgaggactgtgttctaatccacttgtttgttttcaccaccttctggattcacagcaccctccactccacctgtagcacatgcctgccactgggctgcctctggcggaccccattctctgccccaatccttggcctcattatgcttcctcagagtcagttgtgattcttcctcaacgtattcatgctacttatccttgttactgtaattttgtgatggcaatacttatcatataaactgatgaaacaggaatgccacaagaaagatttgtttgacaagtcgaagccttgggaaagaaatcttcactttaaaaaattgttaacaaattatgtgtggatgagaataaatggggtggagatgagaattggaggaaaataggattgtgtgctaatagcttcacatgtgtcttaaaattcatagatgatgtattatgtgtgtgatatatacataagaaagaccatgaaaatctccaacatcagacccggacatgttttttcatgcctgtaatctcagcactttgggaggctgaggagggcagatcacttgaggtcaagagttccagactagcctgaccaatgtggcgaagccccatctttactaaaaacccaaaaattagctgggagtggtggtgcacacctgtaatcccagctacttgggaggctgaaagaattgcttgaacatgggaggtggaggttgcagtgagtcaagatcataccactgcactccagcctgggcagcagagagagactccatctcaacaacaacaacaaaaaaacccaaaccaaaaaaacctcaaaaccaactttaaggattttgtattgtgtatcccttatttccatgctggccaaatacaagttcacatcacagcagcaaagggctttgtctgttgccctgctt

SEQ ID NO: 14174 - DNA, 1042 bp, Homo sapiens
ttttttaaatttacttttgaatgcatttaacaaactggctaggagtcctttaaagagaggtaaatgcaatcgtcaacagcatctgcaagctaaccccaaagaacccattttcagccaacttcgtgatctctcattcagattcaaatctacaatgaagtgccaaaatcatgcttttaaaaaatgacagcattagtgaaactttggaggtgcttatattgctagtgtaggcaaaaacgcacagcaatacagagctaggccgttttccttgattctttcaccataggaagaaatgaacttccagggaggtaatggagtccttctgagaaccatgattaaaagtctttgggaattatcagccaaacttaaaatggatctctaggttttcatggggagttgtgttaaaaagggactttttaatttaaaggaaccaagttgataaggtaggttcagggaaccaaaaatgttgaacagatttttgctggattgacaacttgtacggatggtgggtttttagggtggttaatcgtctgcgtctagggaaatggccacagcttgcctctccttcggggtgaaaggtaggttctgagtctgtgatttttccctgctcagagtgaataaatattgtaagtaggtgtggtcagctgtccagctctttactttttcagttgggaaggaaagagttgcacagctatgatgttcagagccaacaaggacttgcagacgccctgtgcataggagcagctgaacacattcagaatcatgtaattgagcaggctgctaagtaatggagaaaagaatatcatgcacagagatttgatgtctttttatgggagaacaaaagagtttcgattctttcacattgagtttagcctagccattgtgtggcacaggaggtttaatgaatcattgtttaactaggatcctgccaagtatttgaccattaaatagactccaatgtgtatagagttcttctctgacagactcttatttgactgtgattaattggcatcgaattgttatttaattacctccacagaaatct

SEQ ID NO: 14175 - DNA, 1055 bp, Homo sapiens
ggtgggtggatcaacttgaggccaggagttcgagaccagcctgaccaacatggtgaaaccctgtctctactaaaaatacaaaaattagccgggcttggcagtgcatgcctataattccagctactcgagaggctgaggcaggagaatcacttgaacccaggaggcggaagttgcagtgagccgagatcacgccactacactccagtcttggcgacacagtgagactctgtctcaaaaagtaaacaaataaaaaataaaattatattggaggatgtctgtatgttatatgcaaatggacttgagcatttgcagatattggtattggtgggaggtcctggaaccaatcccacacagatagagagggacaaccaactgtaccatctttcgtttatccattcatttgttattgatgtcttgggttgcttctgccctttgactattgtgcatagtgctgctgtgaacatgagtgtgcgcatatctcttttagacccccgtagtctcttctgttgtgtatatatgtagaggtggaattgctggatcatgcggtaattgtgtgtttcataatttggggacctgtcatattttttttttcattgcacctggaccatttttatgatcccccaactatatacaagaattctaattccttcacatccctgccaacacttggtattttctggttttatgatagtagccatgctcctgggtgtaaggtagtgacttcctttattttcttaaatcaatgaatcctacaaggcagctttgagttgttaattgtggggagtgccaggtcgcctgacatctttgggcaactctttttcttttctcttctttttttttgagacagtcttgctctgttgcccaggcaggagtgcagtggtgcgatctcggctcactgtagcctccgcctctggggttcaggcaattcttctgcctcagcctcccgaatagctgggattatagtcgtgcaccaccaagcccagctaattttttatatttttagtagagacggggtttcaccatgttggccaggctgctctcaaattcctgacgtc

SEQ ID NO: 14176 - DNA, 1061 bp, Homo sapiens
ttgagagttttgagttggtaagtcatgcccaagtttgatttttgtctttgttgtttctcccctcctaggttgcctatgtgcttcaagattggtggctttcatactggtaagttatttctggtctgatgtatgaaatactccaaaatcagtaagaagactcgcttttccatagagttagagggaggtgtttgttgatccttctcttctaatcctcacttcgtttacccgaagaaaaattagagtgcttgctggtggagtgtaaactgcggtggtctccacccatgtctgatccgcggcatcatgttcacagacagtttcgggaactgaaagttgtgatttaaattgaatttttataaggtagatatacacaagactaagtgagctgagaatcattttccagcatgaagcgtttctcccaaattgtggttcatttttaaaaaaatgtatttatctaaatttcatatatagcttaatatttttttctccccatgttccatagggcaaacaaacaaagtatgctaaatgtcactgtaaatggaggaggaaatgtaaccgagaagctagatcttaactggtacttaggaatttattcaggtaaagtttaatcatttggtgtattgtatgagaggctgaggtgcttacaatgagcctgtgtgagtaactagggcttccaggagtcattcagtaatgtcttaacagatcaggagtctcagtcgaatttactctgtgaattaattagaataattattttaaaaatctactagaagagaggttgactgaagactcttaatttgctctgtactggattttgaaagttaaaccaggattgagcattcagaaaatcagccactggaaatatgtggctattgtctattctaataggttgctttagctaaatcttatatcattatacggatgggcagggggattagaaacggatctccaccctgtggttcggatggttccaattctgtctaaataaaccctggcttttattgaacttggatgaaatcctctggcagcaaggcccccaaaataaaagcattattccctcccaggta

SEQ ID NO: 14177 - DNA, 1047 bp, Homo sapiens
ctttattggcttatatttgtatttagtttgtatttaacctctagatctttgactactgtgttgtctttgactacggtttcaaaatgtatgtttttcaatgtggagcaccccattcatgcattttttcaccctgtgccttttacatttataggtgtatttgtcaaattttgcatgagaagatcacaattttagtgactcatcagttgcagtacctcaaagctgcaagtcagattctgatattgaaagatgtaagtagtttctagaggtctcccgaacttgcaagtacttgggtgtgttgaatccccttcttcttcctccatttcatgttcctttcttctcagagctgggattcatgtttttaagtattaactcaaaagacttgtagaaatgtcattattacatgctaaaccatattaccgtaaagtatgtaaaattgctacctcaaggttactacattgttaaagaaaatgatgctgttttaatttagaactttttgtttacctcttccatgacttaattcaaattgtattatttggaaattacagactctaagacctgtttgtatccctttaattgtcatgcatagtttggctaaagatcctcttctattaatagcagaaatggctgggcacagtgactcaggcctgtaatcccagcactttgggaggccgaggcaggcagatcacctgacgtcaggagttcaagaccagcctgtctaacacggtgaaaccccgtctctactaaaaatacaaaaaattagcccagcatgatggtgcacacttgtagtcccagctactcaggaggctgaggcaggggaatcacttgaacccgggaggcggaggttgtagtgagccgagatcatgccgttgcactccagcctgggctacagagtgagactctgtctcaaaaaaataaaaattaaaaaataataataatagcagcaacacagttggataactgagcaacccctagtcacagcacccactttcctggaatagccagcagttagtgtcactgcacaggaatttttgagtgcctgatatgtgt

SEQ ID NO: 14178 - DNA, 1073 bp, Homo sapiens
gttccaacgaattggaaatggttcattgtcaaggttgtcagctggatcgagatgagccactgttggaagtgcattgagttctttgttttatgcttttgcttatggtgtattttctacttggaccttcccctctttgccatctggagaaatagtccttgtcctttgaggccccgttcaaatgctcctggtcctctgaagcttttttttttttttttgctctcctctttcccggtggagttaacaaacagccctttcttttctgctccccagcacttcattcccattttagcactctctgaccactgtgttatcgtcaggctcgggtgcctttctgcctttcctgcccacctgtgagctcctcgaggggacagatgacatctgactcattttcatgtcttcctcagcagatattacaaattctccaaaatacttgttgagttggtatagattgttgacttcctaatcgaagtctttttctatttgtattttgagtaggacctgtctgtgttgtcggaagcaaaagcgctgtagggaaccatgtgatgcaggtccctgcctgtgcctgccgctgataagggcaggctgtgatcgctcaggctcatctcccgtgtctggttccccttaggagtaaaactgcaactttcacggatgccaggatcaggaccatgaatgaagttataactggtataaggataataaaaatgtacgcctgggaaaagtcattttcaaatcttattaccaatttgagaaagtaagtttttgtatacattgtaccatatttttgtatttttctatttgctattcttgttgatggttttagaagttttactatgttttcacattatgggaagttcagtacaatccatcccagtccccacgcttggcagttgggttaagtagaatggtagagaacgttattttcacttggtcttccatttaccatgttcttaaacagaaagcatgtatgcttcttactaatacaaaagtgaaattccaaatgtttctgaatatcccaaatcccaacaatgagtctaagatgttagtatttgagaataatggtgtttaaaataaaa

SEQ ID NO: 14179 - DNA, 1022 bp, Homo sapiens
gccttcctgggtcctgtctggagcctccgtttacccttaaggtgaatatgtgtcaccttcctcaggctgcccctaggctcagcctaccatggtggcctgggggaaactcctgttgcctgtgcctccgtagaggtcaggggagccagcaccaaaggcccgagatgcctgaggtctgtccctctaggtggaagtgttgtggttggaggaggttgtctggcttatctgtgctactgatggggcttcaatccagtaaagcttggcagtaacttgtttccccagacttcccctcaaggcctgtttttctgatgctccagattctgtaccacacataaccttcaggagccctgggagcaattagtagcatttatgaaatcgtcacaaaatgccctgtcttaaatgcatacctgtcactctgccatctcccctgttttatattgtggcagggttcactcttatttacgaagctttttcctcattgtaggttctgggataaagaagttttaagagctgagaatgacgcacagaagccttctttaacaagagcaatcataaagtgttactggaaatcttatttagttttgggaatttttacgttaattgaggtaaaagcttttacataccatgaattgtttttcaggacacatagagtaaatgtgctcgccattgactggtgctgtaatggatgggggaacagaagggagaagtggccagatggggtttgaaggtattttaaggtctaaggattaaacatgtctaggaagtattaggtagttagttcagtgagcgtatttatccaggtgaatacttaagtgactgaagttcaaggtcattattgtttttcttgtaaccaattaaaatgcagtgtcatggaagaagagtattttattctatggtaggacaatgttggtgctcggtaaatgttttaaatgctaagagtcactcctggtcaaaagaggatcctacagccttgaggagtgcgtgccctgtggtttagaggaagtgattttggatcggagcccaga

SEQ ID NO: 14180 - DNA, 1027 bp, Homo sapiens
aagtaatccctcagattactgtcttgagagacggagagtgcatacagtccaacagtgtgtactcttcctctttaaagacagtagaaaggtatccatcttgttttaaatagtagcagggaggtttatcaatggcttaacatggtaggctgggcctggagagctctcaatgtaacagagctcaaatgtggcatttacatgaattctaagttgattaagcgacacaatttgttcaactataaaacataatacattcttaatagattttacctattattgtatatgtaagttcctagtacatattaggctgtaggtaaatgggatgatgagggttcttgctaaatttatcccccatccttttttttttgagtcagagtcttgctcttgagcaacctccaccttctgggttcaagcagttctcctgcctcagcctcccgagtagctggaattacaggcttgtgccatgacacctggctaatttttgtatttttagtagagatgggactttgccatgttggccaggctggtcttgaactcctgacctcaggtgatccgcccacctcagcctcccaaagtgctgggattacaggcatgagccactgcgtccagcctaaatttacccttttatcatgccttttttattgtcttaagtctttaagtcttatttaagtcttgactcatttgcgacttttttactaaattgttagctctattaaggcagaaaccagtatcttcaatgtcttaatctctcagtgactggtttaacatcttgcaattaatatgcttaattaatgtttataagctattactttagtcttaatctcaatttcttgaatttagagttgctgacacctgtgtcttaggtaggaccaagtgagaagctagttattgtgacagcctcagactggagccagaagacccatgatcttgtatatattagctgtgtgtgaccttaggcaagacacatgaccactctgggcttcagtatcctattctatgatttagaaaaattaaacctactcatggcatg

SEQ ID NO: 14181 - DNA, 1050 bp, Homo sapiens
ctgaccctagtagatattcctgtcttaggttctcttaggatactaaaaaccctagcccagttgttcatcacctgtgtgctactgatttagttgattactgttttaagcctgttttcttatctgtagtatgggatgttttaagtctcaatttccttatctgtaatatggaataatgctgcctttttcacgagatagttctacaaattaaatgggaatgtatgaagagggcttggctcagtgcttggcacttgtgggtactcaataaattgtaggtatattgttactaattatgagtaagactaattttatcatgaataatttaatcatcattgccttattctggagatattgatgacataaatatcttttcattgaggcactgtgtattagagacaataaacaatgattcacccttcaaaagcacttttcttatacgtaatctcataggaagagcattatttcttgggatgtggtgtgaatgaatcaacatgtacaagactgacacgttgtctggaatttaggtgcccaataaatattatttaaatgaacgaacactgctttgaacttctatttcaccttaaaatgggggtaataattcatgtgataatacaaatgagattgtgtatgtaaaagctctttgcaagaaggtgcagtataaagaagctgtaagtaatgacacaattttaaaacatggagtggttttactgaggaaatgtttttcttaggtgtgtgaaaaccaaaattattaagaatatatacacatttgggtttagaggagacaggccccggcttcagcccattttgataaacatgccccgtggctggcagagatctgggcgtgggaggatgctacagccgtgggtataacctctggcctcgccgccatcttggccatagccccaaaggcacttgtgcccactgagaattacctgagaaaggtgccaccactttaagaggcacatctcttaatattataaatcctaaagcgttacgaaaacagcgcccctatctcggtgttgatttgtgtaggacccctccttttagttcaga

SEQ ID NO: 14182 - DNA, 1401 bp, Homo sapiens
ggaagtgcactgtatcagtctccaagatgaaggtgagtgaaccatgcaccaactttgctggttgcatttcatcccatatctaatgcctgaccaccatcattaaaccttcacctaaaacctgaccttcaccatgaaggaaatttccttcagttggtaggatagggcttggttttatacctgctgctggcaggcttccttgtgtatgcatataacatttctctgggaatagtcacccaaagacctcatctcccctgagtgcggttgccattctggggtgagattgggaagagtccttcctcatctgcccagctgtggggctagggcattctccagccccagaactaggtcgtgaaatgcatccatgcaggtgtcgaagaatggctctcattcttgctgctgacctctcgcctgtcgttccccttttatattctgggtcttaccacttgaaaaccgtggggttagcacccagaacaagtgggaatcccaggaccttgggaatttttaatgtttttgtagttgaaatattttcattaattttctgtttagccacttgattgaaatactttataagtaatgaagatcttttgcagttgtgcccttgtgtcttaaaaggctaccgtgtactaggttgatgaatgagaaactttaacttaattatttaaaactataatttctgtagagtgtagttaatggaaagtacatagaaatcgaagatatgatgaaaaggtgaccatctatgactgattgcctcaacgttttttcctcagtaaattcttgctattcaggcatgactaaaataccatggaatgatatctttcaaaatcatttgaaaggaaactaatgtaactttgctgttgtcctgtttgtactgttcttatttttccttgttaatagaacaggcattctcgtcgcacatactggaaccaatagaagaactttcagaggaagaaaaaggtaacaaagggcttgatcaggtttacctgcacagattatatttatatgccaaaatctaggcctggaaaatatgagccagtggtttttattccactacatcaaaattaggaaagacatttagatttggattttactttcaacccacatagagtatcctgttatcctattcccctaatattctgttctgttttcccctgctttgtggtattcttatgcaagcagataaaataagaaattttttgtgtcagagaacttgaaaaaaaatttgtctttattttaatgcagatttttctgatgagatgatatatagacacacacgtgttgtgtaccagaagatctgaaaatatttgtatcatagtggtgatttatcatacccttaatctgaaatgaattggtgaagtgcttatttccaaattatttttaatagcaagaaaagcatcatgtcta

SEQ ID NO: 14183 - DNA, 2067 bp, Homo sapiens
taaagtgcttacagtttttatagtatgttctttaatgtgatgttttcctgtgctctgttggatattacaaatgaattaagacgggagaagggccatctttttccagtctcacatacagttgctctggaatccaaggattatttcactctttcatttttggtcttttaaaaagattacacttaaatccatgatctaactggtcagtatggtggcactttttgtcttcatagatattgtgatctgtataccatgaactttagtaataatcctttttactcatcactgactcttgaagtgtttattgcaccttatttttttcccgaagatcatttcaggtgggtcagttgtcttgagtatgtgatcacaatacgtaatgtgtaaattctccacatattgatcttcttatttacaagtgttcagagcatgcagttttttcctttagaccagtaacagataaaagcacactggacataaataaatttgctttaatattgaatatataagaaaagtatctagcaatcattctgtattcatattattttatgtcaggtctaaaatctctctgttgcgtccctttgtaaagcattgctggccatttctcttttgtacttcaacagtgtattttagtttcttttacttccccacccctccactttgttattgttagctttctgtatgacatcacacaaggttcctagtttctttgtcatatatttttgttgctaactaaaggacaccctggtaggtacattaaagctgtctggggttgattcaagggtccggacaaatcgatcatttctaaagcatgtgttcatggggaccctaccctcactagcccagagctgcatgaatcagtcatgcccccttcctggcatctgctgggattgaaatgctagttttaaatgccagccagacctggcacagggcctacagcccttggatggggatcaaagcttatttgtgagcatctcagtgggcaggagctaggaagagacttggccagggcccgccaacgtcccccaccccgtcaggccagcttccccagggcggcaggggcagggcaggttagtcatggattgcgtaatgtttattcgcctgttcactctctgtcctttgttccatctcgaagcttgatgaggttctttaccatgaaaaatctcacaatttcttaccattgtaggtcgggtcccctgggaaacagactgatgcggaagtttacaggtgggaggtgggggtgcccttggacagcacctgtgagagaagcagggttgggcgaagggaacgttgaacctagacgcagccacagtggaggcctcagccagccctgcttcagagctgcagagctgggatgagtgctctggcttgtcctccactgaggcaggggtgggccattgccccttgcactgatttgtcatctgatgggggctgccccaaagagagggtgagctaaagcagcctggaagggactccactgtgagctgctaggagccaacattgccagcacgtttgtcctgggaggatctaggtaaaatgggaaccctgatggctccctgctttcaactctgctacacaagctaaacggtacaggcagtaggttctgatcctaaggcagttgataggatgaaacacgggttctggagaagataaacaatcatgcttgattcccatccccagtatgcattttttttctggacaaacctcaaataaatttttgtagtattttcaccactggagaccactttgctctttgctcatggagtagtgactaaatggtggtattaggatgcccagaaaataaagtatactttgttgctgttaaactgacccatacaccaattgcttaggttgcctgggctgataatgtggcccacttttagagcgacgagtgcagtgaggatgcaaaataaccgcttttcccaaagtctgtgggcacctgctaggttctatctacatgtaaagccctcctttaatttggtctataaattgtgaggggcttatgtatgcatgactttaattgtatatagctacagtgaggaccacaaaaactggaaactctttttttttttt

SEQ ID NO: 14184 - DNA, 1040 bp, Homo sapiens
ttttccttctattttccagctcagcatttcccagactgctttggaggccacttttccaggggcctgtaaagatgtagtgaaagctcttgacaatgccctccttgggggaggttcttagtatccactaggaaaggaaagattctttttaggtttcactcggaaaatctttctagattggttccacccagtgtttgtccagcctcataggagcacagagcatttcagaggcaaggctgtgcaggatgctaagacactgcttttttttttttttttttttttgagacagggtcttactctgtcaccggggctacagtgcagtggcttgagcatagctcactgcagctccaacctcctggggtcaagcaaccctcccacctcagcctcccgaggaactaggactacaggctaaccccaccacacctagcttaatttttaaaactttttgtagagacagggtcttactgcattgcccacgctgaactccaactcctggactccagtgatcctccctcctcggcctcccgaaagagcactgactttgaaacttgcatgtgaaagtttaagtctgggctctgcccaccttcggctgtctcaattagagccagtgactttacctttctagacttgagttttcctatctgtacgatggggccaaaacatgtgtccataacattgtggtgtggattcaacaaaatgaagtgcatctagtacacaatgagtgttaattttctaaaagcaagcaaatgaggaaatgctggtctaggtgcccttatatactcatctcaggcacggacacttcctgctcctttatttgatcaggataccctgtcaccacttccaggacatagacttggaatgttcttcaccccaattatgaagccttttttttttttgagacggaatctcgctctgtcacccaggctggagtgcaaagacatgatcttggctcactgcagcctctgcctccggggttcaaaaattctcctgcctcagcctcctgagtagatgggattacaggcgcccgccaccacacctagctg

SEQ ID NO: 14185 - DNA, 1043 bp, Homo sapiens
ccaggagtttgagaccagcctgggcaacatggcaaaaccctgtctctacaaaaaaaatacaaaaattatctgggtgtggtggtgcacgcctgtagtcccagctacctaggaggctgaggtggaaggattgcttgaacccagggggttgaggctgcagtgagccatgatcatatcactgcactctagcctgggcaacagaatgagaccctgtctccaaaaaaaaaaaaaaaattagactcgtttaagattagaaagttagattttccttccccttttttcaccctgtacatattctgataggaagaccagcaagcagtagaaacaaaccagtaaaaccacagggaagcagaagcaggagaagcgtccaagagcgtccaggagcgtccaagagggcagtcagatttaaaacacagctatgtgctccctgattttattctctgtttccatcttatgaaagtctaactgtagtactgagcttgaattttatcttatagcaactgtcagaaatccagaagtccaatatgcagatcaagtccaacataggcacattaaaagatgcacacgagtttaaagaagaccgttctccatatccccaggatttccataatgtcatgcagcttcttgatagtcaggtacgtgcaagtgggtgacagctgcagtggatgccttcctttttcttagtgaagtaatttacagtgagtgtcatctgcagaaaaagtgtttgtcttttttagtaaccctgaaggtgactagctgttatttttctcctacagcatgcctaaatcataagaggtgtttgttacatgcttgctgttggcaaatagcatacacaacagttggcagaactgttttgtttcttctctccataaagtcaatttgaattggttagtataacctagctattcatttttcatctttcagatgtagctctcaatttcaaaaggtgtagaagggcatattgaagcaccagatttaattttagagtttaaatatactgctaactgtatttttagtagaaacggggtttcaccatattggccagg

SEQ ID NO: 14186 - DNA, 1053 bp, Homo sapiens
atattctttccgcctcagccttgcaagtagctgggactacaggtgtgagccactgtgccacacttaccctatcagattaggccccccgccttatgatcttatttaaccttaattatctcattaaaggcctcatctccaaacacagtcacagttggagtcagggcttctctcccagtttggagagttacactatccaggttggtaacattcacattctcttactcagccataatgtcttacttgtttttttcattggttttatatttatgtgctcattcaaaatcctttcacctcaacatctccattcttgagtttctcattttgaattatctcttaattcataggattgtcaaaatgatttgtcttacccagaaggcccaagagtgctgcatttcttcaactctatcaagtttgaaagacatattggatgaagaatattcttagtcacactttccctctgaactttttgatgtggttcctttgtcttctggcagtaaatgttgctgtgagaagtttgagggtggcctaaagtttttttcttgtgagtgacttgctttttctgcctgcatgactgaagagtcccttctttctgcttgaagcctagtagctttctagggtatgtcttggtgttgagtgttctgtatcagttttccctggaacctggtgaattcttaatctgcagattcagctttcactgcacttcagagaaacactcttgtattcagtctttaaattttgtttcatttttggcttctctacttctgggaaaccagttacctttatgcagtattgattttgtccattagttctccgtactctttggtttctttctcattgctttaattctttccttctaatctacattcactgtgataaattatgtcagcctttcctttagtgagcaattcagttttcaacagtgtctcttttattccttgctttctcttttctttttttctatttttttttttttttttgagtcaaggtcttgttttgtcaccctggccccgagtgcagtggcgcaatcttgtctcactgcaacctccacctccc

SEQ ID NO: 14187 - DNA, 1030 bp, Homo sapiens
gaacccggccttctcccgctcctgagggctgtggcggcggcggcccgggaggcggcccaggctgggtaaagaccgcccggctcctcctatgcaagctgaggcagcggattggttttcaagcatggtaagaggcgggaggccggggcgcccccgacggggatgccgggctggggagaaccggggcttccccggacccccagctccccagcctgcccgccccccatccccgcctcccgccgcgctctctttgtgccccccgcagcccttccagaagcatgtctactacccgctcgccagcggcccagaggggcccgacgtcgctgtggccgccgccgccgcgggtgcggcctccatggcctgtgcgccccccagcgcggcttcggggcccctgcccttcttccagttcaggccgcggctggagagtgtggactggcggcggctgagcgccatcgacgtggacaaggtggcgggggctgtggacgtgctgacgctgcaggagaacatcatgaacatcaccttctgcaagctggaagacgagaagtgcccacactgccagtcgggggtggacccggtgctgctgaagctcatccgtctggcgcagttcaccatcgagtacttgctgcactcacaagagttcctcacctcgcagctgcacaccctggaggagcggctgcgcctgagccactgcgacggcgagcagagcaagaagctgctcaccaagcaggcgggggagatcaagacgctcaaggaagagtgcaaacgccggaagaagatgatctccacccagcagctgatgatcgaggccaaagccaactattaccaggtgggcagctgtgtgtgagcacgattcataatccagtaaacaactcagttcccatttgataggcctgtcccgtatcaccactctttcttcttaaagatttatattgtatatcagaagacacagtatatttaagcaaaaacagtcatttaaccaacaaatgtcatggttcattaccttctgcagacaatcaggggattaataattaaa

SEQ ID NO: 14188 - DNA, 1031 bp, Homo sapiens
tgttatatttttggtgtcatatgtaagaagtcattgccatgtcagtgtcatgaagatttttccctatgtgttcctcaggagttttataatttcaggtcttatatttaggtttttaatccatttttagttaattttcatatgtcatgtaagataggagttcagctttattcttttgtgtgtagatatccagtttgcccaactccatttatgaaagagactgttattttcccactgagtattcttggcatccttatcaaagatgaattgatcatatacacaagagtttatttctgggctctctattccattgggctatttgtctttatgccgggaccatactgttttcattactgaagctttgtaatatgttataaaatcaggaaatgtgaatctgccaacttcattctttttcacaatattttcggcatcccttgtgattctgtatgaatttcagaatgagttttcctgtttctataaaaagcatcattggggtttttatagggattttgttgaatctgaatctgtagattgctttgggtagtatagacatcttaatattaaatttccagctcatgaatgtggaatgtctttccatttatttgtgtcttctttcatttctctcagcaattttttgttattttcagtatacacatgtatcacctcctagattaggtttattcctaattattttgatccttttgatgctactgtaaatagaattgtcttcttagtcctatagatcttttgtacttatattttctcttgtttatcttttcctttcatttgtgttctgaaaaaattctttgacattatcttcaatctttctattcatttattttagaggggtaatcacttcttaatttctaacagatctttcttttccctgcttgcttctttttaatttcattttgttcttgttttatggtttcgtggattttttctaatatcccctgaaataccagttagaactgttttgaatattgctttagttcttttcagttcctttttgtttaagctgtcttatgtattca

SEQ ID NO: 14189 - DNA, 1002 bp, Homo sapiens
atgtattttttcattgtggttaaaaaaatcacgtaacaagatttactgttttaaccatttttaagttcagtaatgttaagtatattcacattgttttgaaatagaactccagaactttttcatgttgcaaatctgaaactctatactcattaacagttccccttccccctctctccctgcccctggcaaacatcattctactctgtgaatttgactactctagatactttatataagtgggataatatagtatttatttttttgtgactggctgatttcactcagcataatattgtcaagatttattcatgttgtaacatgtgacagaatttccttcccttttaaaagactggataaaatcccattgtatatatatattgccacattttgtttacccattcatccatcgatggacatttggtttgctttcaccttttggctactgtgagtaatgcagctatggacatgtgtgtgtatatctctttgagaccccgctttccattattttggatatgtatgtccagaaataggattgccaaatcatatgaatatttaaggaacctctatttttcatagcagttgcattattttacactcccatcaacagtgcaaaagagttccagtttctccatatcctcaccaacacttcttattttctgggttttttttttttatagcagtcatactaatgggtctgaggtaataatttcattgtggttttgttatgcatttctctaatgattagtgatattgagcatattttcttatgtttgctgactatttgtatatcatctttgaagaaatgtatattcaagttctttgtccattttttaatcaggttatttgattttttgtttttgagttgcagggtttctttatatattgtaaatattaatggcttatcagatacatgatttgcagatattttctcttatttgctaggttacctttccattctgttgatggtgtcatttgatacacaaaggtttttaggtttaatat

SEQ ID NO: 14190 - DNA, 1026 bp, Homo sapiens
tttgcgtaacaccaaaacaccagtgaaattctggttgctaaaaaattatctctcaccgacatttaaagtaagtacatagctttttttgtagaatggttaatgtttgaatagtaaattatttgtatcattgtaagtttatatgatatttctcttttcagaataagctttttgaaaaaatggtatttagtatttttatgtagcttaagaaaaattctgtacaatttttatttagagatgttcaaaggagaggacagaagactgtatatttttaagtaaaatcaaaatcagaatggctagtagtttttcatgataatgagtaattaaatacaatttggcaatggaaaatatatacagattttcaattaaaagaaatggattctgtcatttttgcaaagataggcagaaacagtagtagtatcaagaaaatacaaagactatacctataccgtagaaaatagttttacagtactgaaacaaaaaagctctttcgtctgtgtagtgtattgattgctgggcaccatgatctgaggcattttatatttagaagatttcaggtgatcaacagctattaccctttactcagccctatactcctgctacaaagtatactctgtttcttcctattctccctacagcataatcaaattccgtgaaatttagtgtctccgcagcaatttggtgtctcattcaacagcatttcaaatgagtttgttttttctagaccaaaagcagtgggaaaacagaagtaaaactagccaagcatgcttttattccttaatatttctaggcatgatgccaagtgtttaactgacgttattcaattgtttttcataacaatcccacatgataagaaaaccaagattcaaaagttacgtaactagcttgcacagttgagaggtacctgagaccacttttagattcaataacttactataaggatttatataactccaaaaaacagctgtgctcacagttacagtttttatagcaaaaggacacaaataaaatcagcaaaaggaagagatg

SEQ ID NO: 14191 - DNA, 1020 bp, Homo sapiens
ctcaaagaaaagaaagtagcctagctagctgcaacttgaaaataaaagggactgtttatgttagattgatacctatactgttttattgttagtttaaaaaggaacacaggccaggcatggtggctcacacctgtaatcctagcactttgagaggtgatggcaggaggattgcttgagcccaggagttcaaaactagcctgggcaacatagtgagaccctgtatctacaaaaaatttaaaaattagcctgttgtgatggcatgtatctgtagttccagttactcagaagactgaggtgggaggattgcttgagtctgggaggtcaaagctgcagtaagtcaagattgcaacgctgcactccagcctgggtgacagagtgagaccctgtctcgaaaaagaaacatacataaggaatatattgtctcagatatctaaagaatccaggagtacacctggtgttggccactgggtgatgtggtgtggaaacaatctttctccatctcttaggtctactgttttctgtgtctcctccattttaagatagacttttgtaagtaaaagtttactgtttccagtggaaggaagttgcctctttccaaacagtaccaataaaagttccaaggctgactcatgggtccaactatagctgtgtgtcccaaactgaactgatttctgtgactctgataacccagcatgagtcatatacctacttctagaactggtgggaagccctgtcccacctaaacctcatagaatgagatgggaggaggaatgattccccccaaaataccaggttgttactagaaggggaacagatgttaggtgagcaaaaacaaaagctgtctcctgtagatgcacattgtaaagaactttgaatgtccattttagagatttgaacccaatgtgagctatgatggaaaaccattaatcattttgatcaaagataagaaatagaaatgttagcccaaatagattcaacaacttaaatatatttggttatagtagtcaaaagcacttctat

SEQ ID NO: 14192 - DNA, 1053 bp, Homo sapiens
tgaaaatggcccatataagattataatagctactaagaaggaaaagtgggtcactgcaatagaatgacaacactaacatcagaatttcattttcaaaatacttagatgttaaaagacagcaaaacaaagctttcagtattttgaggaaaattattttgaacccaagattctgtatctagccaaattcttaatcaaatgtgaaggtaaaatgttagtttctgaagtgtgaagatttagaaaaattatttttcataccctttcttggagatgtttgccagtacaatgaagatcaagatcaagaaagaagataggtagttcaagaaatggtgaaactaatctgtaaaccaatgtaaagaaaatctagaaagaaacagttaattgttgaactttaagaaaaatgtcttcaggtagacaagaatcctagacaattagataacatgagtaataaactggaaaagattatgtctgtgataaagaagacatatttgtatatctccccacaagaaaaaagaaggacaatggaattccaggaaaaaatagttctctgctggtggaatgtaagaaaggagaattcatctaacccagcaagagtctcctaggagtggcacagtggccataggaggaaactataactatgctgtactatgctaaaactataactgtacagaggaaatagagttttagtagcttttccgactcttcagtggttaatctttacattgtcataatgaaaactttttactgattttcaagttttagaatcaccatagcaaaatgcaacaattatgtctactgaactaaatgtaaatgttatcaatatttacaaatgctaaagtcaaggtttaatataagttgggaggtagaaggaaatcatagaaatagtagtgtccttataaacagattatacaagagaaactgttgggattgtgggaataaaaaaataagagatttaaatattatttaaagtgacaaaaaatactcaatagaagaaccgaagataaacacattactaccaaaatttccagacaaatagggaaagggaagggataacga

SEQ ID NO: 14193 - DNA, 1029 bp, Homo sapiens
ctgtttgttctggatccttgctatatcacatattctctcttgtggatctttaatctctatactagcttttttcattcagtccttaaagttattcaatttttttaaaagttgctcccttaactttctctcctctagagtcttttttttccctcttcttcattccttcttaactaaatttcttcaaagaatggtcagactctgtcttcatatctcattcactgtaccttccactgcagtttctctttaactttctctttgccactgaaattgtatttaccaaatcacaaagaaattgctactcactacattcagagaatactttttctttgatatttccactgcagcaagaatttgttttgaacatttacttcatgactgtattctctcctgtttctcctctttttattttctttgtctatctgcataacatggctcccagtgatcaccactgcctgggactcacactctgaaagttctcctggagtgagagctagacctagtgatttggctctcataaaacaaaatatggctaaagtgatggaatttcccttctgcaattaggttatgaaagactgtgacttttgtcttgctgacattctctctctgtggctcttctgtgtgcttctcttttgaagcatattggagatgcctttttgggaagtaactgcaagcagtctgcagacaactaccagcaaggaactgcggtcctcattcagacagcccttggggaactagaagaacctggaagtagatcctacccttgttgagccttgagagaactacagcacagctgacaccttgactgcagtctcaaaatagtaaaagccactagccttgatagcataacataataattctgtgcacaatattgaaggatgaggttaaaatacagcaaaactgaagttaagtctaaaagtgctattaagcagttgctttcaacttaatcctatttgtttttagttgagcttttaaaagtggtactagaatttcagcttgaatttcatttgtttcctaccatttctcttcata

SEQ ID NO: 14194 - DNA, 1044 bp, Homo sapiens
gtatgttaaatggcattagatactattttcagttttgaagtatcaagtagtataaattgccatgtagtatttattaataaaatatttacaaggctgtaggaagaaaatctcttactctccaaccaccctaataaaacttaatagcttattgtttttcctttcagcccttttttctaccatacatagatagccatttttggttttttagaatacatccttataatcctactatatataattttacatcatgatttttctgttaatataaatgtttttctgattgcagtctttgtagacacatacaaaataagtggatgatatctatatactaatatttttaatatgatagtcttatttcatacaaattgtttaagtaaaaaactgaatctggtgcttaggtttattaagaaatcaacaaatgcagtgtttttcacgtatctgtggcttgaattttcaaattatatatccctcaatcatcttcaaagttctaatgcactcttaatgttttgtttttcacttacttttgaattctgttcacctgcatattagattcaggttcatctatgtacagtgctattttacacatgtcaaaagctgccatttattgtaaaaagtattggtgaattttggtagtgagatatgtagagctctgtaaatggcattgctttttcactttaaaagttactttgggaggaaatacagcttttaaaaacagttctaaagcttttggctgtctttgaccatgtcaagcattttaagggataaagagggaaacaatggcacctgttttatctagtgccttaccttttagttatatactagggaaaagctatcctatgtcttgtcattttgatataattcatatagtgttattgacattaatgataacaaatactagatacagttatgttcaacttatttctcataaacataaaactatgttttgtcctgactttccttaaaattgataaaaatattaagatattaatcttacacctactgtgaaccaaacattcttctagattctgaaggcacagcagtaaa

SEQ ID NO: 14195 - DNA, 1013 bp, Homo sapiens
ttgtcgtttgtttttttcttgtaaatttaagttccttgtagactctggatattagaccttggtcagatggatagattggagaaattttttcccatttcatagattatgtgttctctctgatgatagtttcttttgctgtgcagaagctctttagtttaattattaatatatcccatttgccaatttttgcttttattgcaattgcttttggcatttttgtcatgaaatccttgcccatgtctacatcctgaatagtattgcctagattttcttctagagttttaatagtttcgggttttacatttaagtttttagtttatcttaagttaatatttgtataaggaaggggtccagtttcagttttctgcatatggctagccagcacttccagcactatttattaaatagggaaccctttccccattgctggcttttgtcaggtttgtcgaagatcagatggttgtaggtgtgtgatcttatttctgagttctctgttctgttccattggtctatgtgtctcttcttgtaccagtacaatgccatcttggttactgtagccttgtatattttgaagttgggtagcatgatacctccagctttgttcttttttcttaggattggcttgactattcgggctcttttttggttccatatgaattttaaaatcactttttctaaatatgtgaagaatgtcaatgttagtttaatgggaatagctttgaatctataaattacttagggcagtatggccattttcatgatgttcgttcttcctgtccatgagcatggaatgtttttccatttgtttgtgtcctctccgatttcctttgagcagtggtttgtaattctccttgaagagattctatacttcccttgttagctatattcctaggtattttattcattttgtagcaattgtgaatgggatggctctctgcctacttgttgttggtgtataggaatgctagagatttttgcacattgattttgtatcctgagactttgctaaagtt

SEQ ID NO: 14196 - DNA, 1521 bp, Homo sapiens
aaatggcctaagtgcctcacttaaaaggcacagagtggcaattggataaaaaacaagacccatctgtctgctgtctacaggagacgggctcaaagtaaagggtttgagaattatcatgcaaacaaaacaaaacaaaaccaggagttgctattcttagataaaacaaacttgaaaccaacaatagataattataaagtgttcaacaagaagacttaagtgtcccaaatatatatgcaccaacactggagcacccagattcgtaaaacaaatacttccacacctatgaaaaatcttaaggcagctgcgcaataatagtgggagacttcaactcacccactgttattgaactaacccagtcagacaaaaataaaaaagaatttaggccagaaatggtggttcatgcctgtaatcccaccactttggaaggtcaatccaagaggatcgcttgagctgaggagtttgagaccagcctgggcaacacagtgaaacctctccacaaaaaacttaaaacttagccaggcgtcatggtgggtgcctgtagtcccagctactcaaaaggctgaggaaggaggaagacagcagacagatgagtcttgttttttatccaacttgccactctgtgctttttaagtgaggcgtgtaggccatttatattcaaggttaatattggtacatgaggttttgagcctgtcatgaagttcttagctggctccttgccatttctatcgtgtgttagacactgacagtgttagacagattatcgaggcagaaaactaacaaattctggacttaaatggacactgatcagttagacctaatagacatctacagaacattccacccatcagccacagaatatttattcttttcagctgcacacagagcatactccaagatcaagcacatgcttggccataaagtaagtctcaataaattttttaaagtcagaatcataccagtcatactcatggaccacagtagaataaaaatagaaatcagaactcagaacatctctcaaaactacataattacatggaaattaaataacttgcttttgaaatcacttttgggtaaactgaaattaaggcagcaataataaaaattcaaataaatgaaaacaaacaacatacgaagatctctggcatgcagcaaaagcagttttcagagttatagtgctaaccacctatctcaaaaatttagaactatcaccaggcgcggtggctcacgcctgtaatcccagcactttgggaggccgaggtgggcagatcacgaggtcaggagatcgagaccatcctggctaacacagtgaaaccccatctctactaaaagtacaaaaaaaaattagctgggcctggtggctggtgcctgtagtcccagctactctgggggctgaggcaggagaatggcatgaacccgggaggcggagcttgcagtgagccgagatacagccactgcactccagcctaggtgacagagcaagacttcgtctcaaaacaaaaaacaaaaacaaaaaaatttaga

SEQ ID NO: 14197 - DNA, 1042 bp, Homo sapiens
aaaagaatccattgattgtgagatttgacacaggaggttagtaaagtaactggatatgagatcagtatactaatatcagttgcttttctctcttctaacaacaaatatttattaattattttcatcagttttattaaatgcctactacataccacaccctgttttaggtgcttggataaattaataacatatatagccaacaatccttatcctcatgagagtactttctgtaatgactcctacatttacaatgacaagagcaagcaaataaaagatacttaggaaacctgggggctggggggaaggtcagttttgtggagaaaatttggaattatagccatgaaagtttacctaaatgaatgaaaagctctaccatgtttatcaatagaaatatttcacttcataattatattgttttctgcaagtgatttctaaattcattgcatttccgaccaaagtggaattttggggatttttgtgaaatgtgatgttttattttaaaatttatatggaagaatgaagactcaaaatgggtgagactttgaaggataaagtgatgggacttgtcataccaggtaataagatgtataaagtttgtggtattggttcagggaaagacatatctatcaaaagaacgtgggggtcccaaaacttaagaatacagaagtgacattacagtaaatgggagtggacttacaacaactgtggttcaacagtggctataccaatgcaagtaaataagactttacaccttgtgtaaaaatcatttgagttagcttaaaaatgtaagtgtggaaaacaaaactttaaaacatttagaagttaggacctcaaggtaagggtttcctagataaaacttaaaaagctctaagtctgcaggaaaatactgataatttcagctaaattacaaatgaaaaccagtgcccattaaaatatgtcattaaaaaatagggaaaaatgttataagcaggagaagtatttacaatacatatggccaataaaatatttatattccatgagatgtaaacattttctacaattc

SEQ ID NO: 14198 - DNA, 1027 bp, Homo sapiens
caaaatatcacaagatctccataaatgtgtacaactattatgtacccgtgaaaattaaaaataaaatttttaagaaaaatttaaatttcagagtgtgtatcatttcaccttaggaacacccaaacatgtttataaaccattttaacattgtaaatctcaaccagtcttctgagatccaatcaattggaatttctttagcttcaggtaatagctcagctccattggttattaaagagacatattagaataaatgggttccctcttctttaaggaaaaatgagcttatatttcttcattaggatttgcatttatttctgctcaagcctaagagggctgctagtttcattgcactttaaatacaaaaatctaagttttttggactataaatatagtatgaaatccagctccaaacccatatgaaaataagctagaggccatgaattcatttgggagacttactcttcctccaccaagaaccaaggtgaggtagacaaatttctatgctgttactgcagagcattttgttttctaattcaccttttcaccataagtgtagcactttatgtgtgcataaggatatctggatgtgggtcctggatttaaatttcttgttcttctgagattggcccttaaaaacccaaatcctaggtcatctaggaagctctaaatttcctccaggcaaggtctttagtgtttatttacatctctatattcatattcctacttcctctctgtccttaggtgaatactttcttcaactcagagccgcatttaggggacatttttcatatttatttttttgagacagagtatcgctctatcatccaggatggagtgcagtggtgcgatctcagctcactgcaacctccacctcctgggatgaagcgattctcttgcctcagcctcccgagtactgggactacaggcatgcaccaccacacccagctaatttttctatttttgatagaaacagggtttcaccatgttggacaggctggtctcatactcctgacctcaagtgatccac

SEQ ID NO: 14199 - DNA, 1047 bp, Homo sapiens
tcatcccttagcatatgctgttccttttgcctaccgctgtcttcacttctttcatttcttctaaagacttcacatctttttcttttttttcctgagatggaatcattgctctgtcacccaggctggagtgcagtggtgtgatctcagctcactgcaacctctgcctcccggattgaagcaattctcttgcttcagcctcctgagtagctgggattacacgcgcctgccaccatacctggctaatttttgtatttttagtagagacgaggtttcaccatgttggccaggctggtattgaactgaccttgtgattcacccacctcagcctcccaaagtgttgggattacaggcgtgagccaccacacctggccagactaataaatatatcagtctgtgcctctgagatggctgcctatcttgctgctctgttagagaatgctcttctcttttctatatcccatatctttctgtgccttcttttagaaaagttcatggtctgtattttttgtgtctctgttgttcttggtgtctatcctgtcatagacacctcatagtaagcagtcaataaatgtttgcccaatgaatgaatgaacaaacaagaggaaaaggatgactagatcaaagtacccagggttgcttttacttatagtcctagagattcagagtctcagaaaagtaagaaagagtaagcgtaattgctgagctctgataaactctgatagagagccaccccacacactataagaggtcacagtctttatgatcctaaagcacccttcacatattacaccaaccagactgtatagtataattatttggtatgtaagggagaagggaaatgactataaaatattatatctttattctttgagaccatgagttttggtgtctttctaaatgttccttgattatctttaaaggtgttggaaatatgtaggaactcatatttaaacttagggtttggacctcctgcctcacttaaaagctaaacccagcatttgttacaggccttttggcttatttctgattatgaaatagaacttgact

SEQ ID NO: 14200 - DNA, 1081 bp, Homo sapiens
agaaaaacaaagatttttttttttaacctgttgatttggtagtttggtttgcaaatccaaacttactaaaactacaaaattacaattcaaattttatatcaacacacttccaaatgaggaaagtaaatatgaatttaggaacatttttattactgaggagctaataactttccagaactgataatggaaattggctatgtgaaattgcatttcttttatgaactataacaagatatacggccttatagtttcgattcacttagccaccaactgattggtcttttgactagatattcaaaatgtagttttaaattgagctgttatgaaattgaaaactctaaaaaattttcatctttgtcagattactgtaattagaaataacccagtttctacatgctatctttcatataatgtgggcctgagaaattagcaaattaaattttagtgtgggcagcaatgttaagtatttgtctgaatagctgaagctaacttttacatattcttacctggaaatagaacaggccaaagaacagtcactctggccatatacatatcaataaggcttggtagaaagtttagggaggaaagaagagaatacaaagaataacacactactaaagttctccttccctccaatctctaccttttcctctatcatgcaaaactgtccctgtgcaaacctgaattaagcaaagacacatggcttcttccagggagtttgctgagctctaggttaaagttgttttctaaccccttgagatgtgccaaatgataatggttgcagtacagccaacaagaatttcagtctggaagctggaacaactttaaaactattatgtgtgttcatccaggtttcttccttttgaataaaatatggtgacttctcttgtttgatgaggtaatctctaggagtacatttaatatttgccctttgtagaaagaataaaataaaggtactaaaattctgatcataaacatttcagaccactctgttttagtgaactgtagccccttattgcaagaacagatgttaatttgtggcatttggtatattttaatcattgagaaacaaagaaaactt

SEQ ID NO: 14201 - DNA, 1039 bp, Homo sapiens
aagtcacaaggccagccagattcaaaagaatggaaaaatagactcaatttcctggtgagaagtagcaaggtcacattgcaaaggagtctggacatgggaaggagttactcatttgtggcctttataataatcttccacaaatgcctgtaatttgggcactgtgcttagtactggtgatagaagataagtagcttatttcagtatcttaattttgttttatatatttgataattttatgatgcaggttcactgtgcactggtatcaatcccaggggaggactgtaaacaccttgccaatactgtgtaccagtatcaatccactggcatgagtctggtgagacagaacacacaataagtttagggaagcaactttattactcacagacaggcagcaagggacaatagacacctaaggattcatggcaagctcatcccccaaagcttaggatagctgtccaggatggatggagtctcacgtgcacgtcattcatgttgcaccgcagctaaggaactctgaaagcctgctctgccctgggttttatacctaggagcaacttgatgagctgtgctaaagcattgcaagacatcctgttctaggagctatgggaacagagcttggctttactggcaattccttcatatttcttgcatttccagcacatcattctacagttattctgagatttacaagtgagaaagcgaggaagagctgggttgccaagatcttttggggacttgccctacaataacatcatataaaatgtgttttttccctcagtgttcttcacattctcaattttaattgttcattgtataattttgagttagttattgctatttagtaaaagtggaaaatcttaaatattcttgagtgtgttggcatatagatatttgcataatctacataaagattatctgtaaagtgagatgtaaagagaaagtgtgggtgtgtgtacagtttgtaaatgattacatatttaagtcattaatttcataaatatttggatgcctctgtgccaggcattggttcatgtagcag

SEQ ID NO: 14202 - DNA, 1032 bp, Homo sapiens
cagtctcattctctaccccaacaccaattggagtgttcttttaaataataaagtgctgtcactcctagagatctttcttcgttagatctggcacattggttgggaatatatagcatatgattctgaggccctctgatatctgtccactgaagaaagagaaagatgagacattctagttctgagagaggaggtcataactaggtggctgtttaataaggatacaatgcttataaaattatttttccttgttttgaaacatacaataaattatttttttggttttattacatttttttctgttctttttttcatttattattattatactttggggggaggggggagggatagcattgggagatatacctaatgctagatgacgagttagtgggtgcagcgcaccagcatggcacatgtatacactaacctgcacatatgtaactaacctgcacattgtgcacatgtaccctaaaacaataaattattaaccatagtcactcgattgtgctgctgaacactagatgttattcttcctaactgtatttttatacccattaaccatcccctcttaatccccacatccccactagtttttccatcttctggtaactaccatcattctagtctctgtctccctgacttcaaaaattggaatgttcctaacacaaagaaataataaaatgtttgaggtgatagatatcccaaataccctgatttgatcattacattttgtatgtttgtatcaaattataacatataccccataaatatgtgcaacttttctgtatccataataattaaaaataaaaaattttaaaaacaaatatgttttttttttttttcctagagttgcttagataccatagctttgctgcttacctggggatagctttgctgcttacatggggaatccaaaatttaagtttcttagtgctgattgaagctatcttataacttctgaaagcagtaatatatgattgtagaggatgaaaatctcttaagttactactatttatgaggaaactaggtatt

SEQ ID NO: 14203 - DNA, 1098 bp, Homo sapiens
aatatgaattcttccatgaacatggaatatctttccattttttggtgttctcttcgattcctttcatcagtgttgtagttttctttgtattaatgtaggtctttcacttttttggttaaattaattcctaggtattttatattatttgtaactgttgtaacattttcagaatgttgtttgctatttgtgtatataaatagtactgaattttgtatattgattttatatcttgcaactttactgaattcatttattggttcaaacagttttttggtggagtctttaggtttttctaatataagatcatattgtttgcaaaccagggtaattttacttcttcctttccaatttggatgtcctttatttatttctcttgccttattactctggctaaggcttctagtattatgttgaataaaaatagtgaaagggggcattcttgtcttgttccagatctttgagggatggctttcaattattccctgtttccatatgatattagctgtggatctgtcatatatggccttaattattttgaggtatgttccctctatacctagtttgttgggggggagggacttgtcagaaagagatgttgaattttgtcaaatgccttttcagcacatatttaaattatcatatggtttttgtgttcttggttcttttaatatggtgtattacatttatcgatttgtgtatattgaactatcctgtatccctgggatgaatctcacttgatcatggtgcatgatctttttaagttgttgctgaattcattttgctaatatgttgttgaggatttttacatctgtgtttattagtgatattggcatatagttttctttttttgttgtgtccttgtcttgttttggtattgaggtaatgctggcctcctagaatgaatttggaggtgttctctcctcttcaagttacagagcagagttagaatttccaagactggggatggcagtcctgcctttcctctttgtctttgtcctgaggcatatttctccctttagacactcatgatgtttcccatgtgtggtactatcccacagctcctgagtgttctgctcagtttcttgctgttgtttgctt

SEQ ID NO: 14204 - DNA, 1048 bp, Homo sapiens
ccttcctagattttctttagttttcattttctttcagtttttccagattaggtttttatctttttttaaagaaatgactgataaattttttctgcttttttattctaataggttttgcatttatgtattttcttctgtctgtggttgagctaaacacttggttttttgtgttttttttgttttttttttcaattataacatatttaggtcatcaatgttgcctttctttactatgtgatattctcattgtcccaatttcgtaaaattcttcttaacagtagttttatttacatgttggaaagtagagtgaccactgggagaaagttatactcatttaggatggtaatgattgctgtcactttcccccagatatataactcatattttattttgttttatttatttatttttttgagacaaggtctcactctagtgcccaggctagagtgcagtggtgcagtcttggcttactgcaacttctgcttcccaggctcaagttgtacttctgcctcagcctcctgagtagatgggactacaggtacaaaccaccatgctcagctaatttttgtattttttgtagagacggggtcttgctatgttgcccaggctggactcgaattcctgagctcaagcaatctgcctgcctcagcctcccagagtgctgggattacagacatgagctaccactcctgatcttcattcacattttcgtattatgtctataaagttttggggcagttccagaccatagatttttgaaccagggaataggaaatagggagagatgaagaatcagtttactattctttttttactagcatgttcttgttctaagtggtagttgactgtcagttatgattctaagttgaacagcataggttttatagttagtagactttactcccaatttatgtatgatacaaagttatttttagtttgcaacttcattaagaatttttgtatctgagtctttgtaaatatttttggagatactgtaaaatttagtgtcagggactgctctccaaatgccacttcaaatcaatatgac

SEQ ID NO: 14205 - DNA, 1035 bp, Homo sapiens
aattatgaggacaaataattgaaatgaagtatcataaaattttaatagaattttttcaataactatgaagcatgtctttcctaggataaagttgattttattaaaatatttcttagattctacctacgtatagatgtttttttactttaattagagcaataacttaatagtagttgatgagttattttaatcaaagtaatgtgtgagggttttaaaatcatattgtaattatcaactgctgtagctaaatataatctttgaaatcttagattgcagctgatgagccaccaccagatggttgtaatgcatttgtggttattcataagaagcacacctgtaaaattaatgagattaaaaagctgctgaagaaagctgcttcaaggtaaattaataatagcctataatgaaagaagtggttatagagaggagagttcaatagcagaaacttcttataataaaaaaaatttaatattctaagacattgtatattcaagaatgtgatttgtattgaaaaccgtaatatatctgagaatgttttgtcttgattagcttttgattttagcatataaattgtgccaaaataacataaaatgtatgaaatgtttcatataagcataacttgttttttgaaataaacatgcaaaactgagtttatttggcctatagctctttaaatataaactgaatatatacctggggaataacaaagtaatcaaaacaatagatgaggttgcttcctatattcaaaactatttttttgcttttttgcaagtatttaatttaaaaaatggcaaatcagaagtaaattattaatttattagtgattttttagagtaatactaccagtatattttttttgcctgattatttatactttaaaaaataataaagtagtttttttaattttgaaagagctctattaaacagtaatatatatttatgcatattaatacttaactcacttgttaacaaaccatttctaacattttcttatacttgtattgaatttcatatacaaaagacttttatttttat

SEQ ID NO: 14206 - DNA, 1031 bp, Homo sapiens
atcctggctaacaaggtgaaaccccgtctctactaaaaatacaaaaaattagccgggcgcggtggagggcgcctgtagtcccagctactcgggaggctgaggcaggagaatggcgtgaacctgggaagcggagcttgcagtgagccgagattgcgccactgcagtccgcagtccgacctgggcgacagagcgagactccgtctcaaaaaaaaaaaaaaaaaaaaaaagaagagtgaaagaggcaatgcttattctcatatgtcaactgtttaaagcaactggattaggaaaatattgtttagaatgaagaaacttatttataatatttattaaatattaaagaaatttattgaatgtctattttgtatgccaggagtagaaatgtacagttgaaaaactatgatagaaaagatcctttccttcatggtttatagcttaataagaggcaccaaattaaacaattataccaatactttttaatgacttctttgtgaattgatgtagagatggtatagagctcacaatcagactttatgctgcaatttctccaattatttcttggttatataaagtttgctctctggttggtgcctcatgaataactcttggaaaaatagcccttgagttcttcacatacttaattgttcatgtgtgaattcgaaacttctgatttttaactttagagccccagagttgttttttgtttgtttgtttgttttttaaactagagaatgttgcaatgctgatcattctgtgtcttttttgttttaggtatgtaagttcattatttttaattctggaaagttttcttggattatagttttctttaattattctgttccattcccttgattttctgccttagggtctacaagtatacatatattaatctcctttgcctgacctctgtgtttgtcatttactctcaagtcatttttcccttctctcctttttatttgtttcatttttatcacttttcctctgcatattctgtttctcctactgttttccacagtgtctctttactcttg

SEQ ID NO: 14207 - DNA, 1138 bp, Homo sapiens
ttgaataaggagccgagctttgtaagtttcccagggatcacagcgtacctcttcatgtgcggcttgacttggttgagatacatcctgttgggattgctttaatcactcttttcagctgtcttcctggtattattcatttttctttttctaagtaagtatgattgacttctttggtttgcaaatacattttaatttttaagtattaaaaatctccttattttcttttagatttctgccatctcatacttcattgaatctgaagaatattctccttaatattaaatgtggaatcataaatgtttaatatttatagaagatcaggccataaactgttacactgtttttaataatggcaaaggttagctggaaacaaatggctaaatatgtctttaaagtaaatgttttcactttccaggtggcatgtgttaggaaacaaaagattagaaaatataaccaagccaccctctgtgcttcttcccctccccttcctgcctactttctctttttaggtttaatagactctggcagagccatacagcagtaacgactgtgtggctttgcctcattttctgtctgaattaggacatttctttgaaagtagtgtgtgtgtgttggtgttggaggtagcaccatatgtccttgttttgtttctgagttttccagcagagttagctgaaggctaagctgagccccccttttcttaactcttatgtaaaaatgggtggttacttttacaagagcaccatggtttcctaatatgccagttctggtaaaggaattaaatgggtaatgcaacattttctaagtacgtctaaggagatgcaggctgagaccaccacaccagtgtttgatgactacatcagcatcgggtggtggtggggcttgtcctgcatgccacgatgctctgcattttattacacgatgatgtttcttgcagccatcatgcaccagcaccagtggagatgtgtgcaggcatgtcttcccatacaaagcatgtgtcctgtatgggcttatgccccagcacacagagctccaccccacagctaccgaggagctggctgagaggcgagaatatgagcacctccggggtagttggggtttcacccttggatggacagggagggagaatacttgaggt

SEQ ID NO: 14208 - DNA, 1026 bp, Homo sapiens
tttccaaagttgggtatatcttacacattacactggatatggtagtctgtcattgattggtatttcttgcaattgatggggtctcagaggtgagcaggtctgatacagtgtatgtttaaagtcagtcatttgtaatatccttacagaggattttaagatgtgtggtatgtttaaaccaagtattttcacttggggcctttacttcatatgaggtcccactttcagatgcaactcaacattaggtttaaaaaagacacagggaagagaaagctgatggtatgacgcctacctcctgaagcataaactcttagattacagcccgtgtctccacaaggcattctgagcatatttgttttttttgtctgtggatcaaagggcagatatcaaatgatataaattttaccttggggtatcactatttattctattctctactctttgccagtctgtgaggaaaacctctttagcaataaaaattggatggaaatgaataatagattgtgtagatattgatcagtttgatattttgcaaaaatgtttgaactcaataaaaccatatgccatgagttaataggtatctaggagactaggtcttctacatttggagagttctttcagcaagaaaattccttgttatttggtatttatattttctcataagacttactgtgtttctggattcatgttatgggctagaggggaaaaaagtcaaaatacgaacaagaattttggttgcataaagagtgaaggtggctatcaacatggaagtgccccctataggaatacgtctctgacctactcttctatcccaaatgtcctctggtattcagaaaaggcatgtggcctcaggcttctgtcctgcccaccacattacctctgatgtcatggtggtggggagggaggaggttcgccgatgtgtcagcattattcatttgaactatgcaggtaacgtgagtttgtagaacagggttaggttaattcagtgtagacaaatttcatctgtggccccagagtatttgaaagatt

SEQ ID NO: 14209 - DNA, 1561 bp, Homo sapiens
ggggacaggctgaatttcaagtatagacacctacattttgactagtaattctaccacagttgagggacaagactgatttgggaagatcttattcctgagtgtagatttttcctaaagtatttccccttttcggattaattgactgtgttagttcaactcatttaggaagcagtcttgattgcttatgtgtgctgagtgtacaaaaatgatggggacgctgacacatgggacacgcaggtactgcctgaggacaggaaaggatagctcagcctagaatctccagtggaggttcagaaggaagcttgggctgaaacaaaacacattgtcaattcaatttttccttgtctaggcaagtttgtgatggggctagccttctggctaggattgacctattttactcatagctaccaatatcatattccacgtcaagtagctgtggaagaattgaagagctgatggattattctcaacatgttctgtttttgccaattataactgaagtggaagaacttgctcggttagaactttaacagcagctaggaccctgtcagctgcttaatgaagagcagtaatacaggcaaagtgcttgtcacaagaggagaaaataaacttgtcttcagtttcttttgtgacatgttgggataatgcagctgtaattttacccattgtaaattaatatttctctctctttttttttttttaccttatggccttaaaaccttaaagtttttcatgtctctgtcattacaagatttcctaactgtcttcaacatgtcttcatactttagtactatataaacttttatcagaccactttaatctccccaaacagtcccgaaggactaaacagtcttttctaatgagaaaaacctaccggctatgaaaaaaatcctttaattgatcatgtacttatttaacagtcatttgttgaatgtgtgcactgtgcaaagacagcagagttgaagatgatacgctttctggcccctgaaagcccccatcctgcttgtgtgtctgtgggtttgggggtggggacaggtgggatctcgggggctggctgagaggtaagtgaataatcagtgacaaggtatgtgaaaatggaataataatacctgttagctggaggcaggcagggaaagtagaggccagatcttgattatcttaggtgttctcatggctttttcttgtacatttatatcggttttatctgcctcgaggtgtcatgaaggcccggagcctgcttggctgccttctagtgccagaatactccttgggtccaagtctggtcacagcaccatggtttgggtaggctgttttccattttagttctaatatttttcttaatgatgcccggtgggttttgttgtctgttttgatcacaacagtaaactaggctgatgttttcaaggaacagtctgctctgattccttgatccatttcctgtgtcataactaagattgccctgctctattgtggctgcttttgagtgcagccaatgtgtgtgagcacgagagagggccagacctttccccagaactttgttaaaatatactgtcttatttat

SEQ ID NO: 14210 - DNA, 1020 bp, Homo sapiens
agagaatacctatataattggccagcctacccctttgaatattcagtatctagacctatcctcctaaacatattttaacttccacacaacaaaaactactttcttttcgtctaacagaatataaacattctcacacaaatgaagatgttctcaccagctccctaaaatgcagtgtcacaaagtctcattagtgtatccatctctgggaggtagtcacattacctgttgctgggctttgttaatttctccttaaatttaattaaagttctgcttgaatgttgtgttatccagagttaaattgtagaggtaagtttcaacaatgtttgtataaataatgcaagaagaaggagaagaaatttgttctcgttccctccctccctctccaaaagcaagaaggaaatatgcatatctgccacttttcagtagttgagatttgtatctttcttctcctgttacctgttccttgtttcttttgcactcagccaggacttcaactgattaggtttctgtacctgaaggtctgaattctcagtggtcctgcctttttttggattgctgtggttttccattaacttttgctgttggagatagaagtactaagagctgccctgatgaaggaagccgtggtccttcctgactctttgggaggcagcatcccagggtcctctcacccccactggcagtgtatcctcctcactggcctcttggctaagtggcttgaggagcctagaatgactcagtggcagtctcaccttccagttcactggaaacattgctgcctccctttaatagctcccttaaaatcaggacctctgtactagcagggatgaaaaccaaaaatttttagagtgggttattagggtaatagtgagaggggccactcctacttcttctattgatttctggaccaatgtcttcttactttggggagacaggtgagtcaaagcatgtgctgtgttgtgtgagacagaactccatctttcagaatgttgccttacaactgttgtcttcagtaggctg

SEQ ID NO: 14211 - DNA, 1598 bp, Homo sapiens
agagtttcccatgttaaccatattggtcccatggtaatcatactggtttcagtatttgtttcctagggttgccgtaacaaattatcacaaacctggtggctgaaaacagcagaaatttattctgtcacacttctgagagaccaaaagtctgaagcctggcagggccattctctctctggggacttaaggagagaatttttctttgcctcctccagattctggaggtggttcttggctggtggccatgtcaccccagtcgctgcatctgtcttcacgtggccttctctgcgtctgtgtcttctccgcttctgtctcttattagcatagttgtcatttgagttagggttcacctgggtaattcaggatgatcttatttcaagatccttcattatatctgcaaagattcttttttcaaataagtcacattcacaaattctggtggttaggatgtggacatacctttttggggaacaccatctaacctaccacagtctccatctgtatcctgatgagtaggaagtgtacttcaggaaccctgtggcctgcactagctgtccacctctggggattgatggttttagacaatgtagttcattcttagcttgtggtaaaactttttttttttttttgagacagtcttactttgtttcccaggctggaatgtcatagcctgatcatagctcactgcagcctcgacctccagggctcaagcaattctctgcctcaacttcctaagtagctgggaccacaggcacatgccatcacatatggctattttttctattttttgtagagaaagggtttctctatgttgcccaggctggtcttgaacacctgggctcaagcaatccacctgccttggcctcccaaagtactgggactacaggtgtgagccactgtgcttggccagtagaacattttaaaaatacaggagagtgtaaagaaatcaggggaaaaaaatacatctgcttgtcttatttctacccactgtcctgcttgaacttcttcatgcccccagtattcctttcataggtgctctggccacagatgtccagtggccccatacacagtagctccacactgttgactgatgactcttagacacctctggataaaaggttctgcagggcccaccttgggtattagtagaatgactgggaatcagaaaaccaactcttcaaatatttatgtaggctgccaaaccagttttcattttgtttgcttttagtggaataaagccatcttttgttacattgctgacttagggaatagtctcattaaccatgctttggggggtcctggatggagcaggagtcaggaaggggttggtcaaatacatcctattatgatttgtgtcctccctccctcctaatttctccaccctctgttgtcgtggactcctgtaggatgggacagatcttgtctctgtgtatcctctcccgtgtctggcgcacagtggaagtgcttcataaatgtttggtgaatgacattttgaattctgggggatccatgaatgatttatgctgtcactaaatctggtataatgtttggattgagttttaaagtagaatgctttatttatacaatcaccatgtaca

SEQ ID NO: 14212 - DNA, 1059 bp, Homo sapiens
gtggttgcttgaggctgatgcttcaagattagggccaggcgcagtagctcctgcctgtaatcccagcactttgggaggccgaggtgggtggatcgcctgaagtcaggagttcaagaccggcctggctaacatggtgaaaccccgtctctactaaaaattaaaaaaaaaattagctgggcatagtggtgtgcacctgtagtcccagctactcaggaggctgaggcaggagaatggcttgaaggtgggaggcagaggttacagagagccaggatggcaccactgcactccagcctaggcgactgggcgagactccgtctcaaaaaaaaaaaaaaaaaaaggattagaaccactgattctcagaaaaagtttgactttcattattttcagacaacacctaaggagtgaaaataaatgagactaagaagatgttcttaggccccagaatgtttaaaagtagaaagacaatttccttattctaacctggggaccctgatggtaacagacgtgcttatgtgctgcgatggcagctgatactcctcagcctgtggttctctgccccatccagagagagcctgaatctatacacagaaaaggctgtgtttctgaggaaataaaaaatatgtacttttaaaattttctaaataggccctacttctagggtcagctggcgtgtatttcaattagcacattatcttgggaaactttaccatgaggaaaagtttactcataggcttggccatttttatttatttgacccccatgaatagtccaacatagccaccaaaaattgcacagatgtcagtggctgtttggccgtgttttaaataaatattttgtcttttaatcatcagagataggagattaaacctggactcgtccaactttggctctcttcacgctcatccttatgggagaggaagtgtcaagatgggctttcctttggagcataacctaaacaggaaccttttaaaaacctatccaaagctacactttgtaccttaaacgcaggcatgaagtatgagacatttctggtgatgtcttcaggaggattaagaggtc

SEQ ID NO: 14213 - DNA, 1058 bp, Homo sapiens
aagaccagcctgggcaacatggtgaaaccctgtctctacaaaaaaattgtagaaaattagctgaacgctgtggcgcacacctgtggtcccagctatgtgggtgggaggcaggagaatcacttgagcctagaggttgaggctgcagcgagccatgattgtgcttttgcactccagcctgggtaacagagcaagaccctgtttaaaaaaaaaaatttcagctgttacatcagtagcctttaacacactccctcagtccagatttgtctttttcttttcttttcttttcctttttttgtagctgggactacaggcgtttgccaccatgcccagctagagttgtctttttctaagatgtccttactccatggccacaccatgcctcccgatgacaaggctgaccacactgcccctgtccaaggagcagccttcagcattgcctgctacctccttttggccagatattctgaggttggaaggtgaggggtgataaggtatgtggattcagaagtactgtaaacatactcagatgaacagtattaccatttaagaattttcatttcacagttgggtttcatctccaaaattcttgagtaatgagagaattgagtaagggtagtcattgatgattctgttgggtccagaaaacagagtgattgattgaagtctgtacaatgccaaaacatatttttaactattcattttctttccattcttagccatacagaaaataaccaaacaaaaaattaaacacgaactccacagtcagacttattcagctgtttattattattatattcattatttgtacttagctatgattattcagcttattaagctttgctgtttattagtagcagagcttaatgtcagggatttgaatttcgctttttggtgtgaagtctttacctaacaaagtgggaagtcccgagcagtggtcagtgatggaataataaaggtacaagtatattagtgcttacagttacaaagagaactgtagagaatgagaaatagtggcactgtgaggatgggagtgttgcatgtgagctgtccccatttgt

SEQ ID NO: 14214 - DNA, 1045 bp, Homo sapiens
tagcatcaatagagtggagagacagccaatggaatgggaggatatatttgcaaattgtacatctgataagggattaatatccaaaacatataaaaaactcaactcaaagtgagaaaacaactcagttaaaaaatgggcaaagagcctgggcaacatagtgagaccctggtctctacttaaaaaaaaaaaaaaagaaggctggtgtggtggcatgtgtctatagtcccagttacttaggagtctgacgtaggaggaccacttgagcccaggagttcgaggctgcagtgaaccatgattgcaccactgcgttgctctccagcctgggtgacacagtgagaccctgtgtctacccccacaaacctccccaaaaaaaagggcaatagccatttttcaaaagaagacatacaagtggccaacaggtatatggaaaaatgctcaacatcaataatcatcagggaaatgcaaattaaaaccacagtgagataccacctcacaccatggaacccttggatacggagtgtggtctgtactttgaaatcatttaggatagcagaatattttgtggaatctagggagatggggagctgaggtcagggagaagtaagctgtgtgctggcatttgtttaccaggagatccttccatcctactccatggccaggcagtgagtagtgggccaggggtgagggtctctgtggaagcacaggatgctgacattagacagggcacactcctacctttgctgcatatccactgccccttgcagggccttcatgtttccctaggggctgtggagctgtgcccatcatccccactagaagcccccagctctgatagtcaagcatttccatggggaaaattggtcgtgctgagagctaatgacttatggttattaaggatgttttgaatctttaaacaggaatggtacttggctgaatatcagtttggcttctgttgctcattgcatgtcttctttattttcaaaaagccaactgatttctctttcatatgtggtgtttcctgtggttctggtgtttttgtgaacaa

SEQ ID NO: 14215 - DNA, 1033 bp, Homo sapiens
taacccatttggtattgagaaagcaggaaagcaagttttcctgttacgagcagtgaacaaaaagcagaaaagcaggcagcggatggcgatatcctgttgtagaaggcttgcgggagcgaatgcagacaagtgcccctcattctttccgtgtctttaagaaaagccaggagatgagaaggaaattggttactttgcaggccacatccaaatggttttcctcttatttatggtgcttatcaaggaggtcataagtgtatgttttgtgatttaaaaacttgtcagaccagagatctataacacatgacaaattagaaaaacgaaatagattggtgggttttttggttggttggtttcccatgaggtcattcgaagtttgcttgggagggggcaatgaactgtaaaagtaaatgtaaactttatacaagttttatttatttttaagtttaaaatcacttaaagatggcacaattcctactgagttagatttataagaagttggcttgtcagatgctcttaggggacctttctttggtacattttacaatgaactagggatgggcatggtggctcatgcctgcaattccagcattttcagagaccaaggtgggaggaccacttgggctcaggagttcgagaccagcctaagcaacatagcgagagcccgtctctacaaaacataaaaaaattagccaggcatggtggcatgtgactgtgattccagctaattgggaggttgaggtgggaggatcacttgagcttaggagttagaggctgcggtgagctgtgatggcgccattgtacttcagtctgggcagcagagtgagaccgtgtctcaaaaaaaaaacaaaaccaaaaacaaaaaacaaaaagctttttcctctcttattacatgagcaatacatgtttattataggaaaattagaaaacatttacagacaaccaaacagtaccggaatgggatagaaaggcatggaggtggaaaatgagagtgatgtggtgagaaggaaaaggaaggtcgcctgggagcagtggg

SEQ ID NO: 14216 - DNA, 1065 bp, Homo sapiens
ctggcgtatattctaccagctacttaagtccccttggactgttgcttaatgtctctgaacttcaaggttcctgctctgttaaataagaggcatactcggtttttctagagtcccttattccaccaatgggcttctatttgaagctgtttttttttatttatttatttatttatttatttatttattattattatttttttgagatggagtcttgctcttttcacccaggctggagtgcagtggcatgatcttggctcactgcaacctccgcttcccgggttcaagtggttctcctgcctcagcctcctgagtagctgagattataggcgcccaccaccacacccggctaattttttgtatttttagtagagacggggttttgccaatttggccaggctggttttgaactcctcacctcaggtgatccgcccacctcggcctcccaaagtgctaggattacaggggtgagccactgcgcccggccttatttattattcttttagagaccatcttaatctgtcacccaggctggagtgtagtggcatgatcatggcttgctgcagcctttgaactcccgggtacaagcaatcctcttacctcagcctccagagtagctgggattacaggcatgcaccaccacgcctagctaatttttgtatttttttttagagatggggttttgccctgttgcctaggctggtcttgaactgggctcaagcaatcccaaactcctgggattacaggtgcgagccagcatacccagccctaagctgcttttataaaagtagtggaggtgctactaggaacatttttaactgtaggaaaagtaatttataatgtttggtaatgaaggaagaatcctcacaatttcagaattagctttccataatttagaatagtcaggaaggtagcatgttcaaaacgtacgcgaactcagaagaaaagctagaaagaattccctgagcagggttgagttatgattacttttagagctcctgaaaggattttacctcaggtctttcagatgtattaaagatggcatcataatgacctagatctaagagg

SEQ ID NO: 14217 - DNA, 1316 bp, Homo sapiens
caggttcagaatcccatggtctgtgcatctgtccttagatggaaataattactctgtgtctgataacttgggtcagcactaatacaatgcccacaacataaatgctcaataaatattcttatctagctaataaagcagttctgcagatggatttaaaaaaaattaaactatgtgtgggtttagtagctcttcccacacttcaagtattgatgagtggatggtcatgagatcagaaacaacaaaatgaaatagttcagtggatgataaaggctgccattaaaaacaagctttaaaatgtaaacataatgtgggcttatccatttttcattgttcaatagcttcatttttcatgtgttcaggttcatggactttcatgaatgattttgtattaatttgtttgaaaagcttgaaaataagcatacaaaaagtagagagaatagtataatgaaccttcatatttcatcatccagattgaataattattgagattttgccaaacctgcttcatatgtctcttcttcctattatttttcatgtgtgattgtgagtcccaggccttatatcatttcacctctatataactagtatatgttacttaaaaatagggtctattcttacataactgtgtcataataaaattaacaacttgttagtatgctcttcacatttcccagattatattaaaaaatatttgattgttagtttgttctaataaggacctaaaaaagctttgtaggccttgtcaaacatggttagctctttcatgagccttagaattctttttttttttttctgagatggagtcttgttctgtcacccaggctggagtgcagtggcgtgatctcggctcactgcaacctccgcctcccagattcaggtgattctctggcctcagcctccggagtagctgggattacaggtgtgttctaccatgcccagctgatttttgtgtttttagtagagatgaggtttcatcatgttggctaggctggtctcaaactcctgagctcaggtgatctgcctgcctcggcctcccaaagtgctgggattacaggcgtgaaccaccacacccagacagaattctttataatggagagaaccctccatggggtcaggacttctgggttttaatcttagaggtttagtagtttagagcatgggttgtaaacctggttttatgcctcaccagctgtacaatcttaggtatataacttaaccttgttggggctcagtttcttcatctgtagattggagataataattatgctttccttgtattgttgttggaaggattaattgagctatgtgggtgaagc

SEQ ID NO: 14218 - DNA, 1047 bp, Homo sapiens
caaagagtctatttgggattataaagtaagaatagatttcattatttcttgcagaatgtctgagaaatcctttgagagtgtgtggtagtaggataatgaagtagataaaccggctattctggttcctgtagcagtagccattcctaaccctataagtaggggtattagttgtatggctctgcgctgactgacttgagctttgaggggtactgataaggtctaatttcctggggcagtgttaatgttgggacttagactaaggtgcagatgcttgtccagttagtggggaggcagatataggtcgatgttccacataagaagaatatgccttgtctgggtagaaagaactttaccctggcttttaaaggaatgggatacactgttttttctttactacttccatctctctttctcgttgacttctttgtctcttcctctctttctgactctgactttctgtgtctgtccctctttctctctgactccttctctttgtctctctgtttctgtctctctgtctctctttctgactttctttctctctttcattcttgctggtctttccctacctctgccagccgcttatgctgctgttctcccctctccttcccattttgatggctttgtcagtgtaagactgccacctccttgggtttttccgctgcgtgcaataactctataatttcctcgtggtatttgatgggggttcccccagaggttaggaactccctctctttccgtattgcagcatgggcatgtaggattagatgagcatacttgctatctgtatacacatttattctttatccctttcccagttctaaggctcaggtaagtgccactagttccgctaactgggcactggtccctgggggaagaggcttgctttcaagtgtggttacttcactaactatggcgtgacctgcccttcgtatcccattctccacaaatgaacttccatcggtatataggttaaggtcaggattagttaaggggacttctcagtccccttttctgggagacttctaagtcttagaaggacttaga

SEQ ID NO: 14219 - DNA, 1042 bp, Homo sapiens
tccccgcagaccgcccctctgctgacctctcacacagccggagggggtggagaaggggagcgcaggagctccggcaaatcacgagccagaaacccgatgccccgccccctaacttgcggaaaggggagggtgagtggtcggccagatccgccggatccgggatccgggagtcgcgctaggacctggagggctagtcggcgggctgcgcgtccggccgctagctgagctggaggccaccggccagagccgaccccaggagtgagagagacaggggcgtgcgtgagttccggcggcctgcaccgggcaaaccccgtaccttcccagcatcggctcagcaacccacgtgcatccaggccggtcaatgtcattgagtcacctccgcgccttggccaccctggagtcccgagaatccgaagttccagacaaatgcccaaactacattcctgcatgttcgaaagcgtaaattgcaaagcacaaatccaggtaaggtttttaacgactgtaataacacataaaaagttctaggtctggaaatcagagatccgagctcaagtcctacctctggcacttaatatgtgtgtgtgaaagaaattagccacaactagagtcagtctttgttgctcgcaagcagaaacccttgttagtacaactactggccaggcgcagtggctcacgcctgtaatcccagcactctgggaggccgaggcgggaggataacctgaggtcaggagttggagaccagcctggacaacatgccgaaaccccgtctctactaaaaaatacaaaaattagctgggcgtggtggcgcactcctgtaatcccagttactcgggaggaggctgaggcaggagaattgcttgaaccctggaggtggaggttgcagtgagccggatcatgccactacactccagcctgggtgacagagcaaactccgtttcgaaaaataaaataaaaattagtacaactattaagggccgggccgtgtgctagagcctcagattccctcttacttgagagtttacaagaaccttaatggagtata

SEQ ID NO: 14220 - DNA, 1104 bp, Homo sapiens
aatcaatgaaaacagagtctacatcatcagaaaattctagaatctgagggataaaaggaagcccttaagagcctccagggaagagctcgagtcacacacacaggggacctggatcacagcacactgacttctctgcaagaactcggaaagttagaagacaatgaagaaatgtctttaaagttctgagggaaatgatttctagaatcctctacgcagccatgttattaaccaaaagtgggagagaatacacttcagcaaaatgtggccaacatcccagccagaggacgggacaggaatgagggtggcctggatggcagcgacacagagagcccagactagagctggcagggaggaccttccagcggatggtcaggacccgggttctggccatgctctcagaaactgcgaggctgaattacaatcctagaaactaagcgaaatgcaaaacaaacaaaaaaaacaaacttgaagcaatttttaatttcaaggaaaacataaagttgtccaagaaaggaaatgtaatcatagtatgctctgtgtcttagccaagagccgtgtttgcatggttctaatgccgaaatagatctgggtctgacccaaaactatgatgagtctgttgggaggatggcgggatgtggtaggagagccaagggtcaggcttctacagtgatgacagcagcggcacacgctacatgtcagcagatcacacaggaccacgtgtgttggtacccaccgcggtctctgaggcaggctgctactgtgacttcagtttacagttgaggaagctgaggcacagagaggttatatgatctgcctaaagtcacacagttaaagtctgtgctttagaaccactatgctcacccactttttgagtagaagggcaagatatgatttaagacatcaagaagtagcagcgtaagtaacaatatggagataaatgctgaacacaacagttaaaagccttaaaagtgttgcctccagggagtggaaaggggtaggaaacttcatttttcttacaaagcaatctattgacattttggacacatgccattttaaaaaactgcatcagggaaagccaggcaggcacctggcagtggagagctg

SEQ ID NO: 14221 - DNA, 1036 bp, Homo sapiens
gtgtgtgtgtgtgtgtgtgtgtgtgtgtgtagagtataatcggctcggatttaattcattcagcgcatccagtttccttagaagggccagtccctccagctcaatgcctttttctggaagttttggcctcagaattcaggctgtccggccagcacacagtggccggccgtgcgttcacgttcaggactcacaggaatgtggcagatggacccactctgtgcaggggctgtagaagctcgctcagggacacatgccgaattgccttccccgctcccttcttccttgtagttgagtcttaacttcgctctcagccattttaattgaatttaacttggggtaattatacaagcactgaaaggatttgaatgctttgggaacaagataatttatacaaaaaaacttaatcaggcttaattttgaattctatgcttttatctttaaaaatgtttatttttttcaaatgtgtgaaaatggcattgtgtgtatgtgctcatgtgtgttggggatgaggtctcatctccttgggtgcactgacgtaagcaatggacttttctagagttgctttcctttcttttatctgccacctctggctatatgatctccaggtagttagcatctttttggagggtttaaactggttttaataatattcttagcgaaaggtgatgctgaaggcaaacctgttattactaccaaaacgagtcctgccttacagagcccactggaggcggagtctggctgggccctgacccagctccctgccgctggcacaagagaccagctagctatgatacaacttgttgcccagttttcaatggccagttgggttccttttagctcctgatttcatgtttctgggcagtgggatatagggccctgcctggcagtgccaaccagcagcgagccctggattagaatggcgctgtgctggtttgaagtggacagacgagcaggtagggccacatgggtggctgttgatttatttatttattgagacggagtttcactcgttgcccaggctggagtgcaatggcac

SEQ ID NO: 14222 - DNA, 1048 bp, Homo sapiens
tgtctataaaattaatgttgggagagtagttttttcaaagctagcctggctttaaaatgtggttctgttattgcattaaaaagatagcaaagtgatagccacacttacaaatctcaattgcatgaccagaacagccccaaagtttgcccactctattaccttctcatgatgaaactcagattgtccttctttgtgttaagctgagaagggtgagattggatcaagagaatgaggctatggttgcgaagagttctcctagtaaattaatcgtaggtactttggaagcttgccattgaacttacctccttttccttccttcttacagagtagaccttccccttccagcctggtcttctgctttatatcctcttatgccttggctaaaatgcatttataatcatttattccctagaattcatttcttgcatttgtatgtctccatagttaagatgtttagagcatagcattgttgatgtttagaatgctcacagaaatgttttttcaccaaagctgttctctaccaactctgaagcttctcttcacaaaagccaaaaagcgtccacagatgctcttctgcccatatagaaagttaattttactaacaaaatcactgtcatgatcagaggctaatcatcctaatgattaggtttactgtaactatcattttagggtcagctcttgatatcagaggccttttttctaaatggacccaaacaagctattacttccccaaatggtgtaaggaaatatttaaaataaacagctgaacttctgcatagtcagggctctgggcagtgcctagcatccatcacccccacctcccatacccagccttgcttcctggaaatttcatggcagcactaagacattgcatgtactcttctttttgcttctttatgtaataatgttactataggcagatgtatcttatctagtgctatgaagagccctaggagtaactggcagtaaatggataatcatcagggagtgtgattacaataaatagagttttcagtacaaacaatattgtttcatacaattgactttt

SEQ ID NO: 14223 - DNA, 2094 bp, Homo sapiens
tgcagtcatagttcactgcagcctccgatgcctgggctcaagccatcctcccatcttagcctcccgagtagctaagattacagtcatgcgccaccactcccagctgacttttaaaatttttttgtagagacagagtctcactgtgttgcctggttgatctcacctggcctgaagcgatgctcccaccttggcctcccaaagtgctgggatagcaagcgcaagccaccatgcccagcacggattggtggcttaatggccacagaactgcttttctcagaaagctacagttttattatttaaattccattattcattttggtgagaatatcttgactcttccacttgtgtaaagcagaagacatataaagtgttaattcagaaaccatgttgaaaaatgttggtcagccaggaagaagaaaaacacgagccgtgttgtatgtggaggccccggtgtctgggtgtaattctcgttccttctgtgaggtgaggcagatgaagccatttcgtggttctgctgagcatggtcttggcagtgtttttgggagcatcacactgtgccccttttgttaacttgctagccctccctttttcttttcctggttaatgaaaggcactcctccgttcattggcactgtgcctacagtaatgtgaaacaggctgttactggattttagtgatgttagagactgttttccagatgcttccttgcagtgtggagttgccttttttgttccttgagatgatgatcttctttgagacagtggagttagggggaattttagacacaatacatcttttccataaatcattatgaggaagaattgacctttctttctgtagcacaccctgctgtggaggctccacttaatcaaatatttagaacctcgttggtgttcatttcctgttcaaagggaggaaaagatcctctgccgaagcccttcacagctgaccgggtacttctgtaagagtgtagaagaaggtaggcttccaggcttgtcactgagtcaacgaagggagcaggtgcctcacatgaccttcacagaatctctaacctgctcttggggagtggtcagtgtgctcctggcttctgaagccgatgcccatggaagcaaatgtcacccttaacagtggacatcagtgaccagctttgcatctgtcacctcttttcaagcctttccctttgagtcagcaagcacttaagtcgcaggtgctaagtcgcatggtggctgtggacctttgttgctctttggggccacccatcatttgacccatttctgtttggggcattcttaggtgctcagaagatgatttgattagggagctggtacagacgggctgtcccatcaggtgcgcccacctgttggaatcaggaactggtcacgcgaggtgggggcccagaggcagccaggcagtctctgccaggtgcccggcgcatgatttgtggttttgctcctgccacgtggccctgccctggctttccaggccacaggagggtctgtgagctgcaaactcccctttgaagaattccctttttgtttaaattaatcagagtttggttactgcgatgaagaatcttgatggacaacccggggaagtgatcagcatgttgtaatttctagtccctaaaacactcctgtttaattatgctctaaagagaaagttaatctgtcatttttcttacttactccaccacagtgccttgtttgcctctcttctcattagacacaatttaagccatctactttcatcttttgaatgtaaaacaatgcatttttaaacatctgtagtatagtaccaaattatctcagcagtaagagcggtacagtgttttttttaatatttagtgacttttgtctggaaaaattaaggttttttttctgatttcatagtctgcttagctcatgatcaaaaatggaaacttaaaaaaatatgtttatccatacttaactgggacattttggtaagttaccttatttaatagatgtgagaggttaatagtgatcttatttagctgtgtggtccacttatttgacacgtattaagcaccttctgtatacagccagcaaacccagatgtggcccagtcctcatggag

SEQ ID NO: 14224 - DNA, 1003 bp, Homo sapiens
gagtaaaaccatacccaacaaggaggtaaatgagtggatgatttttgaaacccaccccccaaatccctccaaaaaggcagcctgaattacatgtactctttgaaaggcatcagtgttaaaagatgcagtttgggaagccgggacagaagacagggcagacgtggggaagggtgttccactctgcagaaggtcctggagaaggggagaggtaaacagaagtaaagagggactccaagagacgtcggcactgggagagaaaaagagagcataggaaagtatagcatgaattctggaagccacagtccacctttgtagtatcttagttcagccttgttccagtttatgatgttaaacctgagcttccctgaaactcaatttgtagaaatataaatatacactcttaaataaatccatttgattgtcattcctcacaaagatatcatatggcatttaagttcgtcgtgtccaagcatgtttgcagccaaatggaaaactcgctgcatggaccaaatgtggtatttgtgttttgagcttttctgttttaatctgctaggcgacataaccaattttcctgccattgtctctctttacaaatgctactacttagtatgattctgtagttaattttttttaaatttttcatggtttttaaaaatttttaattctagcgttaggcatgtgtaaacaaattttattgtttaaatatgcaagtaatagtaaaccattaaaaatgtctgagatgaaaagagacttgtctttgggaataaaatgacataaagttttccttgaatttttttctggtttagtttttttgttgttaagttttgtttttgttttttctgttaactcaaaagttttagctcatagagcaatttatggcgggcaagagaggtatacttggtaggcctttgctgccatctactggcatttcatgtaattacttattgcttccattctaaaactaattttgtgtaacgtatataatagtattataggttccccc

SEQ ID NO: 14225 - DNA, 1068 bp, Homo sapiens
gctatgacctcaaactatgaaattactacaagaaaacactggggaaaatctccaggacattggactgggcaaagattttatgagcaatacccccataagcaccggcaaccaaagcaaaaatggacaaatgggattacatcaagttacaaagcttctgcacagcaaaagatacaattaacaaagtgaagagacaacacacagaattagagaaaatatttgcaaactacccctctgacaaaggattaataaccagaatatataaggacctgaaacaactctataggaaaaatctaataatctgatcaaaaaatgggcaaaagatttgaatagacatttctcaaaagaagacatacaaatgacacaaacaggcatatgaaaaggtgttcaacatcattgatcatcagagaaatgcaaatgaaaactacaatgagacatcatatcaccccagttaaaatggtttatattcaaaagtcaggcaataataaatgctggtgaggatgcgaagaaaagggaacccttctacactgttggtgggaaggtaaattagtacaatcactatggagaacagtttgaacattcctcaaaaaactaaaaattgagctgctgtaatttagcaatcccactgctgggcatatacccaaaagaaaggaaataagtatatctaagagaaatcttcactcccatgtttgctgcagcactgtttgcaataagatttggaagcaacctaagtgtccatcaacagacgaatagataaagaaaatacagtacatatgcgtaatggagcactattcaaccatagtaaagaacaagatccagtcatttgtaacaacatggatggaactggagatcattatgttaagcgaaataagccaggcacagaaagacaaacatcacatgttctcacttatttgtgggatcacaaaatcaagataatcaaactcatggacatagagagtagagattggttgccagaggctgagatgggtactggggggacggggggaggcagggatggttaatgggaacaaaaaaaatagaaagaatagataagacctactatttgctagc

SEQ ID NO: 14226 - DNA, 1046 bp, Homo sapiens
acaagaaatagctgggaatggtactgtgcacctgtgatcccagctacttgggaggctgaggcacaagaatcgttggagccgggaggtgagggaggttgcagtgagccgagatcatgccactgcattctagcctgggtcacagagtgaaactccatcgaaggaaggaaggaaggaaggagagagagagagagagagagagagagagagagagagagaggaagagaggaagagaggaagaaagagaaagaaagaaagaaaaaaagagagaaagaaagaaaaaagaaaggaaagaaaaagagaaagagaaagaaaagaaagaaagagaaagaaagaaagaaaaagaaagaaagagaaaaagaaaaactgagactgggtatcttatttcttttattacatttttgggtcctatatttgtatcatacagaatgagttctgtatatttttcagatggaaaagaaatattgacttaaaaggtacctctcaaatcttaatgtgtacaataaactggagatcgtgttaatgtagattattttttcagaagatctggaagaaagcctcagtttctgaatttttaacaagctcaccagtaatgtcaatgtttttggccaaagaagaatattttgtcaaaaattcagtaagtggaagagcctgtgtttctttttctagtttttctggcttgtaaacaaagatgagagttttcatttaccaaagacagatatatgcaaagaaaacctaagaaagaagggcagctgccagattaaatgtgatggtttatgcacatcagctgcataaagatacctaataattaagagaaaaataattaactctgtagtgcgacagtctgtcagagagctctttaaccaagtgaatcataaacattaactgcactaggacaaatttttatgatgtgctgatgcacacagaaggacgcagcatcactgctgtgatattgccccctcaaaagtacattatagtctaaatttaaccataaagagacatcagttttatgcgaagctcaagatacacgtatctttcatgttctgtaa

SEQ ID NO: 14227 - DNA, 1102 bp, Homo sapiens
gcctaaatgcggagtttttaatgctatctatttgtttgtagtggaaggagttgaatttggtgtagtccatcttgccacaaccaggactcacatccatagctatttttttttctatttttgtctaaggtccttgaggacacgtatgagaaaggtaaagaggatattgtgttatattcatctttttatccttactacctagtatcctaacacagaataaataattagtaactatttattgaaggcatggttgagaacatattctatttagacagataatattaacatgatgacaaattgataaagaagatgaaataaaaaagaaacagagaaaagtaagttgctaaaagcaggaaaggagaaatggctaaaaaatagaaaaacaaagtttaagcagaaagaagcagtgaattagttcatatacggagtaagaaaattgaagcaagtggtgagtaagggagttgactgtgtgggtgagggaagagacaaatgcatggaagaaaatctgtaggtagttggatttatttttttagtgtatgtaggctgtagaatatgcctagattgttctatgagtgaatatgaaaatggaaaaagatattgtgtgggttggagacaatcaatatggagatgaagaacagggaaatcttctggataagaaagcagctgtgtagtactgcagtgggtacagaggctggcttcaaattaccgttttattaaaaccaagtcagaatgtgagagttataaaacttgtaaatgcagctagaagatcaggcattatgctggcaaacgaaagctcatattggcacataaatgatcgcagaaattgagaacagatacacgaatgtcttctgaactcatgaccctagagttgcttcagtaagtattctttgctagttccacgctgtatttggtaccaagaaaagaatgatactgaaaaaatgcatgaaaacatgccttgtgatctaaatattagctccagctcattactttatcctaaaaatgaagttcaccatgaaaaatttcataaatgttgacagaatgcttagttacctgagacatagccattatggtgaaatggctgcatttttctctttcccatatgtgt

SEQ ID NO: 14228 - DNA, 1015 bp, Homo sapiens
ccaacaagtttctcatctccatctgacaccacctcagcctggacttcattgtccatatcacaatcagcattttggtcaaagccattccacaagtctctaggaagttccagactttcccatgtctttctgtcttctaagccctccaagtctctaggaagttccaaacttttccacattttcctgtcttcttctgagccctccaaactgttctagcctctgcctgttacccagttccaaagtcacttccacattctttgggtatctttacagcagcacctcactctctgcagtaccaatttactgtattagtccattctcacgctgctaataaaagacatacccacaactgggtaatttataagggaaagaggtttaattgactcacagttccacagggctgggaggcctcaggaaatttacaatcatggtggaaggggaagtgaatacatccttcttcacatgccagctggaagaagtgctgaacaaagggagaaaagccccttataaaaccatcagatcttgtgagaactcactcgctatcttgagaacagcagcatgggggtaactgcccccgtgattcaattacctcccactggatccatcccatgacacatggggattacgggaactacaattcaagattgttcccagaccaaactgagagtcaggctactatttctcgtggcccaataagaagatgcagatgaactggggaggaagagagtttttatttctgtaaccagctacagggagaaggcctggaaattatcaccagaccaactgaaaattacaaagttttccagagcctatataccttccaagctatatgtctatatttaagtatgcattcatctaaacacataagtgattaacttcttttaatctgtaactaaggtctgagtcttgaagacctttctctggagcctcagtaaatgtacttaatctaaatgagtccaggtgctggggtgattacccttatcttgtctcctactaaatcacgaaggtttagggattt

SEQ ID NO: 14229 - DNA, 1025 bp, Homo sapiens
catcaccccaacctctcctttctgtgcattcatgcaagagtttcttgtaagccatcagaagttacttttaggatgggggagaggggcgagaaggggaaaaatgggaaatagtctgattttaatgaaatcaaatgtatgtatcatcagttggctacgttttggttctatgctaaactgtgaaaaatcagatgaattgataaaagagttccctgcaaccaattgaaaagtgttctgtgcgtctgttttgtgtctggtgcagaatatgacaatctaccaactgtccctttgtttgaagttggtttagctttggaaagttactgtaaatgccttgcttgtatgatcgtccctggtcacccgactttggaatttgcaccatcatgtttcagtgaagatgctgtaaataggttcagattttactgtctatggatttggggtgttacagtagccttattcacctttttaataaaaatacacatgaaaacaagaaagaaatggcttttcttacccagattgtgtacatagagcaatgttggttttttataaagtctaagcaagatgttttgtataaaatctgaattttgcaatgtatttagctacagcttgtttaacggcagtgtcattcccctttgcactgtaatgaggaaaaaatggtataaaaggttgccaaattgctgcatatttgtgccgtaattatgtaccatgaatatttatttaaaatttcgttgtccaatttgtaagtaacacagtattatgcctgagttataaatatttttttctttctttgttttattttaatagcctgtcataggttttaaatctgctttagtttcacattgcagttagccccagaaaatgaaatccgtgaagtcacattccacatctgtttcaaactgaatttgttcttaaaaaaataaaatatttttttcctatggaaaaagtgccttcaaagtacttttcttcttttcttttcatttttctttcttttttgtttgttattttaatttgccttcctttactctatttcc

SEQ ID NO: 14230 - DNA, 1026 bp, Homo sapiens
tcgctgttatcaaatagcgatgtgcaggaagaaaagcccctcttcattccggggaacaaagacgggtattgttgggaaaggaacaggcttggagggaagggagaaagtaggccgctgatgatatattcgggcaggactgttgtggtactggcaataagatacacagctccgagctgtaggagagtcggtctgctttggatgattttttaagcagactcagctgctatacttatcacattttattaaacacagggaaagcatttaggagaatagcagagagccaaatctgacctaaaagttgaaaagccaaaggtcaaacaggctgtaattccatcatcatcgttgttattaaagaatccttatctataaaaggtaggtcagatccccctccccccaggttcctccttcccctcccgattgagccttacgacactttggtttatgcggtgctgtccgggtgccagggctgcagggtcggtactgatggaggctgcagcgcccggtgctctgtgtcaaggtgaagcacatacggcagacctcttagagtccttaagacggaagtaaattatgatgtccagggggagaaggaagataggacgtatttataataggtatatagaacacaagggatataaaatgaaagatttttactaatatatattttaaggttgcacacagtacacaccagaagatgtgaaattcatttgtggcaattaagtggtcccaatgctcagcgcttaaaaaaacaaattggacagctacttctgggaaaaacaacatcattccaaaaagaacaataatgagagcaaatgcaaaaataaccaagtcctccgaaggcatctcacggaaccgtagactaggaagtacgagccccacagagcaggaagccgatgtgactgcatcatatatttaacaatgacaagatgttccggcgtttatttctgcgttgggttttcccttgccttatgggctgaagtgttctctagaatccagcaggtcacactgggggcttcaggtgacgattta

SEQ ID NO: 14231 - DNA, 1073 bp, Homo sapiens
cctcttgtgcttccagtttgacaaagcagaagtcatcagcagtttctccctctgcagacgcagttctcaattctatttacaagtaactgctctactgtgcctgtttttctcttgctgatactcatttaattgtttttcttttggatctgaatctttgactgtcttttccccctcaagattaaaataaatacatctgtattcctcccctttctttctgtgcactgcccttcagatctcattttgtcatttttcagcttagtgttgaaacttttagcaacaaaaagtcagttacttactttgagtaagtaactcaaagtaagttaactttgagtttgagtgcacttttgcgtgtaggttcatttatgtgcttgtgaatttaaaaacattgggattccacctgaatgaagtaaaccaaacattttaaactatcagccagatagagacatcagcctttcacttctttctatatgcagacatatcctaattttttagaaaaatcaaataggaaaattctcaacaattaattgaagattatagctctgctctgaaatggtccagaaataggatctgctcatagaaactcatagtttgaagcctctgggaggaaaggatactttaaaatttagtcacatatttggaggagggaaaagggaaagagcagaatgaagaactgaaaaaaatcacacaccggggcctgtcgtgaggtgggggactgggggagggatagcattaggagatatacctaatgtaaatgacgagttaacaggcgcagcccaccaacatggcacacgtatacatatgtaacaaacctgcacgttgtgcacatgtaccctagaacttaaagtataataaaaaaaaattttaatagccccattaaataattaaaaagattttttttagattcacagaagtgtacaaaatttttaggtttttttttttttaagctgtctgctgaatagtttcttaatggtctacaatgtttgtatctacaaacagatactgtctgcttcttactacccttccaagacaagtattattatggcaattattgcccagtttcccgggaaaaattt

SEQ ID NO: 14232 - DNA, 1044 bp, Homo sapiens
taacacatatgtagagacagcagagtatacgtacacacatgttgcatacatagcaacagcagagaagctcatgaactataaaggatggactgtatgcttgtatcagacattttggtactgacgctttgtcatatattgtgtaacatataaccagcttgcaatcatctgcccccaaagttgaactaagaaaatcctacagggtactaggaaaggaaggccattgggaaaaggtggttatagtggcaatttgttagctcttatgaattttctttttctttttagacatactcttaattccattttttcaataaatctatactattttgtgtttttatgttagcaagtactttaagcccctcaatagaaagttgctacatcatatagtgattaaaaataaaaatctctcaaacatacaagtagaggtggtatgagacttcaaattcccttagccaagtacaagtgcagcagttttgttggctggctggctgcatagaaggactgatggattggcagaccctcaagctggagtgtaattgatctcattacagaggagccaggctgggtgacagttgtgctttgcaagtggttttttgcattggtgaagtagcccattttgttgttcctgatgttaaacaggggatgaaggtattcttttattggcacaaacgcgggaaattgctctggattcttagaggatagaacatgtcccctggacggaataaggttcatgtgtagggcaaatttagataggggcaccttattggggttactactggtctctagatggtcaaagcaaacaacatgtccatctaagctgtgatgtccatctaagctgtgtgtgtccatgagagtgacgcattttctcctctgcagtgttgttatattctaaactgtcagcagacattaattcggtcgctggtgaagtcccaccgcctagagatgaactctgcctccgatggatgttttccacttcagtgccactcgtctcgcaattactgggtcattaatatcattgcatgcaattagtgacagtagaaagagcta

SEQ ID NO: 14233 - DNA, 1005 bp, Homo sapiens
catttttcccaatttccatgttaccagccttgccaggactttttctcagttccctgttacacaatgaaaatagtgtctctttattgataattttagtagcatcctaatgtggtataaatcgtcttccagagaagaaaatgtgtcagggttgcgttatcactgaggctagctgggaaagtagatcagcccattagtctgataattcgaagcgttgtttctgttatttctgaacatcatgtgaactccttttctgggtgtattaaaggttttcccagtgtgtgtcagtgagactcctgattgaatttaatatgaataaagataaattctttacatttaaggattaaagtctcagcttctgcttaacttgagattgcactgagaaactcctggctctcgggtatagcggagtcacgacctggggatgtctgtcccatatggctctgtgtgtaagaagaaaaagctgctgtggacggagactctgttcacattaaatgacatcacctaagccatcatgacagcaagaattatttaggaattgctcagaataaaactgccttcattatttcataaaatgtatcttggtatctttagcaccttatttatggctttttaaaggttcactgggatttataaataattggacaatgctagagacctagtacaagaatgaaagaggacaggcttctttcttaataacctttaaacattcatcaggaagataaaactttaaagcaaaataaaacacatgaaaatagccaagatgcacagaccagacaagcaaatactactttaacttatttgtatagttcttaagagtcacatttgttcctgaagtttcaaaatctcgggctgagtgtttgatcacttagggaagtgttgtggccttcacatactcttgtctcactttgaagtctagaaacacaggtcttagagcaatttttatcactgtgagaaagctgaaacttagtgtgagtagcttagtacaattcagttggccatcaaatg

SEQ ID NO: 14234 - DNA, 1027 bp, Homo sapiens
ggcacatgctttagagtttggctatgtgagtccaatcccagtttagccatttattagctgggtagctttaggagcagtagccttagtgtctctcagttgtcccatctctataatagggacaataacataatagtgctgaataaaagagtaacaaaattttggtcaacatttaatgtatttaaagagctaagctccgtgattggcacaatgaaccaatcaatcaaacaccagttgttattaataaaagtcagttgaatatgtactgtgtgcctggccgtggttcaatttgcctttgcatacaaggaaaaaattaaaatactctgttaataaagactatagcataatactttcaccttaaacttcttgatgttaatttattttgtttacctgccaaacttctactcattccttatgactttctgctacatgaaacaccctttgtaattcttttgtcctattaaattaagttctctctcctctgctttcctgcttttggtgctttctaataacacttttaaccctggactttctcattcagctgtgcaactgtggactgagaggaggctctttgaattcattttgtatattctagtagagagtactgtgagcagttgggttgttgaatgaatacattaattcaacctggagggatgggcagtattgcattttttacattgatattacatgatatttagaaaactgcttaactggtggacgttgttttattaacagcattttgtgtatagcactcactatgtgccagctgctattctaactgcctgacaaatactcctgaaaccttcatggtaaccatatgagggaagcacttttaatatatccataataccaacggggagactgtggccaaattggttaattaacttagccaaagtcatattgaactaataagtggatttaaacccagctagtctggggccagggtccctcttttaatcttctgcctcctgcttatgctgttgcatggagtagtctttatcatataactaaattaagcatgcatttgctt

SEQ ID NO: 14235 - DNA, 1417 bp, Homo sapiens
tggtacaatgaagttagagataaaaataggtatagaacaaaatctgtcatctcaacatgtgatttgtggaaattaatttccacttccaaaatgtgtaaatgcttttccataatttgttcatttattttcattgaaaatgaaagacagaaaatgtagatgtaattaataaagggttctcttttaattttcttaattcttttttctctaccaaactatgtgaccttcgtcagattttatgacacatgccattgtgtgtaagttgtcacctcataactaaaatattttgaaggcatgtaattcataggaagtccttgtttttacccccttttttgcatttgcattaaaaatttttttgtagatacataatagataacacctgttgcaggggtacatatgataatttttaatacatttctataattaatttttacttttaactttcaggccgaagaacagttgagaattgttgaagaacaaagaaagattcatgaggaaaggatgaaactagaacaagaacgacaacgtcaacaaaaagaagaacaaaaaattatcctgggcaaggggaagtccaggccaaaactgtccttctcattaaaaacccaggattaaattgcaaactctgaactttttacaaagaaaaatggaaaaactttgtatggtagcttcatgttgaagtggttttttgtttttgtttttgtttttttaatttgtaaaatctggaaagttagcttgttctaataggggctatgctctgcaattccctttttttttttttttttccttccactaagtcaaatccttatcagatcattgttgtattctaaggagtgacgtatttttcacctgtttggattctatattagtggtctgaggaagagcagatcacattgtaaaactatggatggtctgataaggcttttactgaccccactgacttcagagttatactctgtttgctacatcataatgctggttttgctgactttttgtttttttatatatttataaaaaaagaaaaagttggtgattgcattgggaaattcccagggtattactggacctatgtggtgtattgttaaaccagtgtccttgtgatactgttgctcttgatgttcctgatacaggtaaggaaacagttggtcaactctgatacaaagtatatatacagttcagtattgtctctgttcattttgtttttatttcattgacaaaatcaaaccagcattccccattgtgtaaataaatgattttgctgaataaagtaaagtcttaaattcatatgttgaagcaattttttttaatgttatgttaagtcttaaagagggtggttcactttttgatggtcaaccatttagaagtcttagaactatatttcctcttgtttatacttttaacatagggtttatatgtacattaa

SEQ ID NO: 14236 - DNA, 1052 bp, Homo sapiens
gcatttctataagttgaaatggtacaatacttaggaaaaataaggcaccaaatgtaaatgtcaaatattttaatttgaaatgaagttttgggtaagtcaggtaaggattttcagagagcgagaggttttttcctgattgttaagataaaaagctggttgaagaccttatgttaatgtatttgggacagtaatttaaaaaataaatttctggacatgagtgagtgtattgacattgtgaaggatgggtttgtaggacacaaattggaaacacgaagccactgaaggccagtcaaaagatggggccttgaatcaccaaagtagcagttcttagaaactgtgagggagaactaataaacttggtgagtgaagaggtatgaaaaagccgggacgcaggggaaagtctgttgtaggaaccagaaaagacactcctgatgtaatcattcctaataaactcatgccaggtatccctaagcatttaaggaaaacttagtgcacaaaatagtgaatgaccaagacagaagaactgtaaaaagagagaatgtaggatacagaagattaaaagagccacatctagataatacctttatttgtgaaattttagaacagaaagtataaagaaaattccaaaggcatctgattttccttggcaaaattatacagcagtctctccagagtgctcaggcagtgctttttgtacataatattgcatacaaagctcaatctcagtcacttcctccttttgaaacagttgtcttcacttcaggtaacatggaatccatggagatattatctaaggttgaagtttcaaaaatgatttaagattatatataaatgtcacaagaggggaattaagaataaaagggggtaaagggagtaggtggtgataggaatttagatggtagctaatgatatcctgtaatgatggtttggcatattagaaaccctaaggaggtaactgtgagaataaatatgttgtcacagggatgaaggggatccttgcgttttacccttctgttatttaacattgtacatggaatacctcagaaaaattt

SEQ ID NO: 14237 - DNA, 3724 bp, Homo sapiens
cccatttctagaggagcttttaattgaaaattaacaaaaggaagaaaagacatagtaaggaactataaagctaaagaacttcagttcaaaacttaagttggtcatattttcagtaaaaactacgcactattagtccagcaatctgaatctcttcaatctgtatttattctctctttgcttagcgggaaatcaattcagccaatctgagttgcctgctacataatttctccttctctgtagctcagccccagacgaagtgattggcaaatgagcaaatccatatgttttaacaacttgtcctctgattataaagtcaataacagaataggttttctgtccggatttattgttcctaaattagaactaatgaattaggctctttgtatatacctgttctcctgtatttagaatatgataaaggaaaaaaagattttatactcatttgaatttctgtatcagttaacatcttggtatctgtcatttcctcaaatgtgacatggaaatgaattctgaaaaaatcactgaataatatcaggctcaatggcttgatagacttaaaactagttttgtttaaatttatagttttaaaagtaaatacctaacttgtttttttcactttgtttgctagtcgacagcaagaaatagaagaaaaactcatcgaggaagaaacagcacgaagagtagaagaattggtagcaaaaagggtggaggaagaactggagaaaaggaaggatgaaattgaacgagaagttctccgaagggtggaggaagccaaacgcatcatggaaaagcagttgctcgaagaactcgagcgacagagacaagctgagcttgccgcacaaaaagctagagaggtaacgctcggtcgtttggaaagtagagacagtccatggcaaaactttcagtgttgggttctgcctcctgctcagttcagaaagagatggaatacagactatctaattcctttctcgtctaaacttaacattgctgcgaaagttaattttttagcctattcagaagtgctgactgataacttaaaagttggaagcttttataaaacatattcaaggatactttttgatttaatggaactggctatttgagaagtgtttgaaacttttgccatggctgcaggacttacattcttttttgggaggacggtggggagacagggagtggtaaagggaaaaggttaaaaatccacctgtggttgtatattcttctattctgtcactctgttacctagactgtgagaggcttttgccttcagtcagattaaaaagagcagggcctaacattgagtgatagcacctgctttgataaataggttttctcactcttctttttttccttcttttatccctcactccctcccctaaaccctgcttcagcacaatggactaattctagcattctgatcataaggccctccattttcctaatgtgtttcaaggaatctttttaggaaaaatatccagattattcatccactttttttagtatctactaacaactcctttttttctctagagagttatgaaggaacaggttgtccttgtctggagtcaagctaaacacatgatttgttttatcagcagctggagcagaagttgaaaatgtctttctgtgagacagtaatttgctactgaagctttatggcttgtttgcactgattactccaggatccaaaaacttggtgaaagtcactgaaacactcaaggcaaattactttacagccctgagtgtctgtcaccatagtttgcataatgaatatgaatcccattggtgtgtgatgtaggaaatcctgtagttgtattttcttgaactgaaatatttgactcaaaataattaagactcattgtcatttttcatcttggcattattgtggacaagttgacatattaaatctctttgctttctggtaagcttagcttttaaaatgcattttcccttgtcctgtctttaactagatatacatgcttatatttatagtgggtttcacagactataaaattgaatgtatgaaatttttatttatatcagtgcttttaataatgaagatatttttggagtaatggtgctgtcttgtagcgagttattaatcatagtaagatttttttctcttcatttgctttttttgtttcatattaacaattttttttttacacggacacaaccctctgacagtctttccaaatattaaaatcatttgaatatgtatgctgtgatctgaacactgctcaagccatcaagcagtcttcatacagtttgcattataaaatctcattaaattctccaagaaaaaataagttgaagaattttatttcctgaccatgcatcccctggatttctgagtttcagttcagattgtagatgacaatataagctgccttccgaaattgtcaacatctgaatgttaagtccattttccccatggaagaagcccgtagttccatgaagtatggattaccatttgtatttttcactaacagtaaatgtatttttcttattaattgtttgccttaggaatgatgaattacattttttgttccttcttaccataaacatctgcattcctcagctcagccttccttgtatgttgtttctttataaatggttgagctgctgatgcaggtattgccaagctaacagtacaaatcattttaaagaggaagctggcgcgtatggcagccgaggagcacactctgcaggacactggacaagacagtaaatattcaacttttaatgctgattaaaggagtataggtaaagaatacgtaggtatacataattggtgagacaaatattcactttatttatattttatatattatttttttaatttggtaaatactatccagttttgtagttgtccttgttgatttgtgtgatattaaagtattagtaataattgccaggaaactatcattagggagggtttagttggttgctgtttggactgggagggatgatttaaatttagtgctagaaaccaattttagtgactgcacagtttatcatttgtcagacagaaggtagctataaagctaccctgtaagtcatatcaaaaaagttcagaggaagattagtaaatatttatcaataaaaataaacattttgtttttctaatatcttaacatatcctcccctttaggaggaagaacgtgcaaaacgtgaggagctagagcgaatactggaagagaataaccgaaaaattgcagaagcacaagccaaactggtaagtgtaaagcatacatgaaaagtgttttgtattttgctttatttccttttttcggattttgtggattgatttttgtgccctataatttgacttattttggggggattctcaggactaactttaaaggctttttgaggcaaggataggaacaattgagatttttccttccaatctggacagaactccaaaatttgcagtgattttaaaaaacaagttttctggggaaattattttgttctctatccccagttttttctttcctaacctcattcacattctcctatgcctaaaaaactaatagcaacaacaaaagcttgggggtatatttaaaccaactataatatgcagcattttactttgtattagttggcttgttaccaggagtagatagtatttatttgatagtaagtgcaccggagtaatttcctattcctagtttataatcttaagaaatacagagtcttcggtaattatataatatag

SEQ ID NO: 14238 - DNA, 1026 bp, Homo sapiens
actgatgtagaaattcagagtttgaggtactgcagataatttgtgcaaaaaaaaaaaaaaaaaagaagaaaagaaaagaaaaggaaagacctgaatgaatgaatagacgggtaaccagttaaggatagatgacattcattttctttgaagccaatcatcattacttctgaccttctttagtaacctcactgcaatatggaaaggataatttggtagagcaaaaggggaagtttggcagaatatttaaaatagataacaaattccaatgtattgtgaaaaatatttaaaatatttttaaaagctaatgatcttcttctagcatattctttaagcttttatgcttcatagctagttattttacatgtttgtagcttactaggatcaggcaaaaatgctatcatcagatttttaaaaaaacaaacaatgcttgtcccttaattagctggtaagcagtttcattttatgtaaacaagctactttattggacatctaaaattaatatattcagaagatatggcatttgtttttgctctaggctcctagattatgaaaaatatgatagattcattcattcactcatttattcatccatcacatgggtggtgctatgagggttaaggactataatacagtcagagaacaaaaggaggaaaaacaaaaccccatataatccttaattccagggagcttacagtctgatgccttacattatcttctttgcatatacactccataaacaaatagcaaataatatggacttgtcaagagtgattccaattttttaaaaagtctaatttggcagacgataaatgaaagagcatgagatcacatgtttaggaatggcaaaaattaacatttgatcaagacctattttgagtacgaatggggctagaaaagctataaaacaatccagccaatgatagactctaccttctgcgaaatatccttaaaaccacaaatgtgcctgagtggtgacctgatcatcaatgtggtctatgattaacaaggcaacggatacttcagatc

SEQ ID NO: 14239 - DNA, 1023 bp, Homo sapiens
tggtctcgatctcctgacctcgtgttccacccgccttggcctcccgagtgtgtgtgtatttcttgacacattacaataaaagcctgatctattaaatttgcccaaacttcaatgcaaaaatattgaaatggttttgaatacagtatgggagatatttgggtggacagcagatgggttttactgtaagatgtgctccctttgatggttcaggaactcttcacagaattaggtaacagtatttgacctgtgtgaatctatgaaaatatttataaatatgtcttctttctcattttactcctaaggtatgtacggttaacatccatgtggctataatctattcaacagtaattcatttagtctgctccatattgccttctgttaaataacttaagaagtcattattaaaatataaaaataagcctgattattaaggtagaaacttaagcagtaagtgggtttaacttcagtttgaattatatctatcgggctaggcctcctttcaaatgtgtgatcactctgacagtcattgtctttctccaaaaattctgagagcctttgattttgttttatttctttgttttaattacattttctgaagtgtagcctttgggaaactggctgtcttcatggttaaaataaaagataaagtttggccccctcctttcaatattctgaagtcagatatccttccctttaacttgtagaaatggaagtaactttagtcttatagctcattttagagagcaaaaaatgagactcagacataaattaattgtacaagatctcaatgattttactggtaaattgagaaaaatactgtttcttttcattatcaaattagtcactaaaacattctagcaaacattcattttgtgcttactacgtcctcaacactggaggtaaaaaacaatgaaaaagacactatccttttcccacagagcctaccatttagtgagagaaggagataatcaagttataatgaagcccagaagaatattgtaataaaaattgtggaggagaagc

SEQ ID NO: 14240 - DNA, 1570 bp, Homo sapiens
tttatccatgttgtagaacatgacaggacttccctttttaaaggcagaatatgttgcattgcatgcgtatacaccatattttcttcattcatctgtggatgtacatttaggtggcgtctgcctcttggatattgcgtataatgctgtagtgaacatgggtatgcacatatctcttcgagatcctgtttttaattcttttggatatatacccagaagtgggattgctggatcatatgggagttctatctttaattttgagggcctttcttgctgttttccataatagctatgccaatttacaatctgcccccccgcccccaacaaagtacgcaatgtttcccgtttctcctcatatgcaccaatgtgtgttattttctgttctgttttgtgttatgctgcccatcctagtgggtatggggtgatagctcattgtggttttgacttgcatttccatggtgattagtgatgttgagcgtcttttcctatgcatgttggccatctgtttgtattctctggagaaatgtctattcagattcttaatttatatgttccttgggttgattttcgttgttactatttgtgttgttgagttgcaagatctttttgtaagttctggatattaaccctccacccaataaagggttggaaatattttttctcaatccataggtgtaagttttaagattgatgtagtcctgttgtctatttttatattttgctgtctgtgctttcagagttacagttaataaatcattgtccattctaatatcatgaggctcttttactatgttttcttctaagagttttatagtttcaggtattacatgtaggcacttaatccattttgacttagttttgtatatggtgtaagataagggttcttgatcatccagttttcccagtacaattttttgaagagactcttctttccatattgtgtagactttgcatgcttgtcaaagatcacttggccatatatacaagagtttattcctgggctctcgattgtgttcttttggtctatgtctttgtctttatgccaataccatacccttttaattactcttaatttgcaatgtgtttcaaaatcagaaagtgtgaggcctccagcttttctcttctttgtcaagattgttttggccattcagggtccttccagattccatatgaattttagaatttttttctgtttctgtaaaaaatgcaattgagattttgatagaaattgcattgaatctatagattgctttgagtcgtataaacattttaatatataagtcttccaatgcaagaacaaaggatggtttttcatttactgatgtctttaacttctttcagcaatgtttttgaagttgtcagtgtacaagtcttgtgtgtgtgtatgtgtgtgtgtgtgtgtagctgctattataactgagattgttcttcatttttaggttgtttgttgttagcacatagaaacacaactgatttctgagagttcatttggtattcttcaactttaccgaatttgtttttattagttctaacaatttttttggtagaatctttagggatttttatgtgtaag

SEQ ID NO: 14241 - DNA, 1069 bp, Homo sapiens
tctctgcaagctccgcctcccaggttcatgccattctcctgcctcagcctcccgagtagctggtactacaggcgcccgccactacgcccggctaattttttgtatttttagtagagacggggtctcaccgtgttagccaggatggtctcgatctcctgacctcgtgatccgcccgcctcagcctcccaaagtgctgggattacagacgtgaaccaccgctcccggcccactaaaatgtatgtattcttaaatccccatcttttaacaaaatcttttatcttttccttcaaaatagaatatttttagttgttgtttatttctggaatataccttctcaagaaggaaaccaccccatgtcctttgcactgaaaaagagtgtgggggccggggagaatttcagggaaggagatcgctctgatgtctcaaaactgctttgacttagtactcgggtgactctgtgctacacaaatatagacacatgttttatatttccttggttaaagcgttcaagtcatacttctttctctgtccttatacaagagtttctcaagacaatttgtatataaagccttatgatttcttgttcttgtaatcactatcacataaataatcagatcttgaaaaatacgcaatataaaggaaacgttatttcaagtgtgcaaaaattaacatttctgaactaggaacattagaaatactagtgctttttaaaaattgttgttttagtagatatatttagttaaggattcagaaatgccacaaataatgaaataacaaattagtactaatgctagttgatactataactataaaagatgctattacttttcccgtatcatagaaaaaaaaaggagccatatcagcccattaaggaaaacttcttggcttgtgtagaactttcttttcttcgaactcaataacagttaataaattaccagttaagcctgtgcctctggaagagagcatttactcaactgtgtctcgacatgtctggcatctccatgtcatagtgatttaacagtgagacttttcaatctcagccttaagtgtaaatccatgtgatctgccc

SEQ ID NO: 14242 - DNA, 1050 bp, Homo sapiens
tagtatatgtaattcatgggcatgtcagcctaacttagcagtaccatgtgggtgcagtgagtttgaaaagcatttcaagatccttgtcaagattctttggcattttgtgcatgcagttttaccttaacatcaggaacacacagaacaaaggttgagtcctggagcatctctaagtaattatttttcctcctctcatcatttctcagacctggagagaagggaaatataatgggcaggaagaagggattcagctcccattgctgcagaggatgagcaagagaagtaggctcttatgcatggactctggaatggcaacttcaggaatagtccttgcagcttccctgctgggctggctggctcagtgctcagtgccagtcaactgagctgcatgccagagttccaaccagaccttggatccctagtcccaggtgttagaccttccaccaagggtagtgctctatcctccaaatatgcctccaggccatcttgcttcctttggcctctgccatgatcttaagtaattttgtactatttaaatgtatattacacatgcaaacatataaacacgtaaacacacacgtctagtctgattaatactaatcagccaagtattattgatacttttctactttgtaatcttcattcagaagtcacaaaaaaatccgcagagctcctgatgtgagagttgagcagtatagactgctgagaaccccatctctactgcagggtgagagaggactgtgcttattctcctgataagctataactcaacgagaatagcactacagccctacagttctttcagtaagtgctaataatgtgctttttcagaatattttccatgagtacttggccttgcctaaaaggcttgtttccatgacaagctgtagtctactcaggggcagaatgatcatttgctgtcatggctgtcctgataatcagtcagtagccactcagtcccccggagtgctttaaatatcagaatgggatgttgagatgctttcctgattgtaaagagctttcactgtatatgttcttggtagcacagct

SEQ ID NO: 14243 - DNA, 1044 bp, Homo sapiens
gggcttttctctttagaaacgcacttagtttatgatgaattactaacaggaagaacatatctaaattttcacccacaactgagttgtggttttgcatattgcttcaacccatagctccaaacttcacctttggcgagggaggattcttttctcaaaatttaatagcagcttagactttgttcaaatcaactttctttcgtaatgttgtaagtagaaaaattaggagcaaaatacgactttcatttgctagagaagacgtggtttgtctaacagcgacaatctaaaagcaaatacttctttctcactgaatgaggaagaatgaggagctttgtgactgacaagtgaaaggatgatatatttgatgtgttccatttatatgtaaatgctaaggaacatagacaagtataccaagtaaagttttatttatttacctagaataccaaagttgcatgtaaatgcactgttatgtacgaatcataagaggttgcaaggaaggagatggatagatggtttgaaaggaggtagatacatagaaccaacaatgctacatttatatgagtagtagatgataaatatcaagtatctctcccatgcttttggtttgaagttagccagtattctccaccagtaaatcagaatgtgttcattttacaagtgactgtcattgctctccttccttctgtttttcttctccttccctttcttgcttttgcttcataaatcttcatattttattctcaagtacatggttgtcatgatttgtagcagcagaggtaggtatgcagctggctattatgtttcaaaatagaaatgccagtatccctatcacctcccccatcacgtttacattgattataaggaatattgacaccaggggcggtggctcctgcctgttaatctcaaccctttagtaggctgagtggggcggattgcttgttctcaggagttcaagactagcctgggcaatgtggcaaaactccatctctagataaaatagacagattagccaggcatggtggtgtgcacctatagtcccagctactt

SEQ ID NO: 14244 - DNA, 1044 bp, Homo sapiens
ggggggtttcaccatgttagccaggctggtctcaaactcctgacctcaggtaatccacccacctcagcctcccaaagtgctgggattacaggcgtgagccaccgtgcccggctaatctcttttcttttaaagatgtgaataatccagactgcaagcatttcaaaaatatggttatattattaggacacaaaaataatctattcatattaagcacctaataacaagactgaagaattgacctttgactgtctaatgattcacttaagccattatatggaaggttcttcaaatagtgtaaaaggatggaggattgtaattagctgaaattttattaatttgaagcataacatacatagtttgttaaaagaccaagaagccaccatagacaattagcaatggaatatttatcacaaaacttcctcaaaagcagtgaagttagaggagctagaggtaaaggtgttttttggttttgttttgtttttgaaaatacttgcttagagatctgagaatccagaatttaacaatacaccactgtctctccatcctaacatttcctattgttctgttgcttggcaccttctctagggctgtttcctgattctgggaggccctgtcctcagaattttagggctggaggagaacctacaaataatacagtcacatacactgctcaaattatagatagaattgaaatccagagaacaactttttacagatatgttaatgaatccacatttcctgatttcccatacagaaggcagcatagatcgcctcaaagctcccaaatgctgggtctagattgcaagtcttccagtcctggttaagttgtttacagcagcagtgcaacctcgggcatgaggcttatcgtttctaaatctcagttttattatctctaaaatgggacaataatatccctgacctcacagagctgttgcagggcttaacttgggttaatagttatgaaaggcttgaaatagggccctgctcatgggaaacaccacttgctagccagaggcagctctgttttattaaaattgctctact

SEQ ID NO: 14245 - DNA, 1049 bp, Homo sapiens
ttttctgttccaatgtggatagcccttcattcttagctcttttctgataaagatctattattgaaacgatttggttacacatcagtttttaaaaactagattatgaacttcccaagggcaagaaactgagccttccttatcattatatcaagcaacaagcacagtttctgatttgatgtaaggcattaacaatggtatctgcttttttggaatgccttttcctcttgtttttccttgctaatataaatattctacatcttctgttctctactgaatactctttaatctgtggatgttgtctgctctccacaaacacctgtccttatttttgaacctctgtaacaaggcttttgtcatatatcataagtatcttatcctcaaatacttaatattataatacctgtacatcggtttcatctttcactctcatgcttctcagtttagaagcttattggaggcaaaaacaaagcaaaacaacagcaacaaaactttctcttactcaatatacctgtatctcctacatagtaaatttcaaaatttgatatgcatgctttttatttggtccagcaacatcctttccttcctctctattctgtaccctctcccagatattggcaatttacttaacaggttacatagaataatgccctctgggcccatagaattgtgtagaaacacaaaccttggagtctaacagacatagcttggaaccttaaatccatttctttaatctatgtgtgattcttattagattaactctaactgtaaacctaattgttagtaaaatagagttggataataattcctatgtcaaaaaacatttaggaatattaaataaaataatttatataaaatcacaaagcactgtatctggtattagtagatacgcagagatgaaagtactgttcttttcctcttcaagattcagaccatacatcttctgacctcttccctcaatccgtcggaactatctctgcttttatgtgtctgcccatcctatgcacatccatgtgtgtccgggttccccaagaccaccctcaggctccatg

SEQ ID NO: 14246 - DNA, 1034 bp, Homo sapiens
gtgccaaaatcggacagattttaatttgatatttatcatttctacttgtaatagaaatgtcatcaggattcagttacttctatgtcaacatggaattatgtaatctgctctcaaaattcaaaagactaccaacatgtattaaaatgtcgatcaagaattcatatatacatttcaagaatatgttgaattaacagatgaaaaaaactccttagaaaaagtggtcaaatatttcaagtgaagtttggtggggaagtaaaatctttaagaaattactatgcatcattgtcagttaagtgcaatataaaatggacatacataaatgaaaaagccagaataaataaagttgacagagaaatttaaaagaagcaagaagccgttttccacacccataccctggttgcacattgaccacacactccaaaatagggaggaaaaccgagacaacaccctgaaagaaaacaaaaccagaaacagcactttacaagaaattctccagaatcttataatacaaagacattttctacaactcagatctcctttccagattagcctaatttctttttatttcaagaaatgtgcttctgaattatcaaataaactctctcaatctctgcttctgcctgaagttgaatggatgaaacaactaaaaatctgaagattttataagatttccatatgctgtagaccacaaggacgaaggcagttgttgtcctacctggaagcaggcagtgccttgactcatttgctccagaccctgtctctgacatgcttggcagacattctccccagatgagtcactcctgagacctgcatttgagtggatcttccatgtcctgcaaccctgatttccacctcagccattcttacccttattaccttatccatgtcattattgaacttgctccctgctatagactttgcatgtgtgtggacctccaaaattcctattttgaaatctaatcactgatatgcaatagaattaagtggtgaggacttttgagaggtgactgggtcattgatatggtttggcagtg

SEQ ID NO: 14247 - DNA, 1032 bp, Homo sapiens
aattattaacgatcgtagttattaataatcttatattattattttgtgtgtatacataagtatacatgtatatgtgtattatattataataatatgactatataaaatcattatctgactccaaaacatttcaacagttcaaacagaattatgttaatattttttcatgtcttcatcgtatgtcatggactgcatgtaaaacaattcatttaagcattggccattaagggacactttggtttttccagctccctcagttttgcaaataatgttccaacaaacatttttgtacatgtatgtatgtgtatttgtgtgactatttctgaaggacagctttctagaagtgaaacgttgacctcagttaacctttgactttattggtagtggaccaaaagtgagcaatgcaaagaaaacttcgtgacttccctggatttacagtatatcatatgaacaaatgtgtctgactgtctgtagccaagtagacttttgctctactatctgcatgcatagatgagacttatgttctgcctgaaagataaaagaatgttcaaccatgaacttttgaggataggtgtcctaaagcattgaatgtttggatcctttctctgctacctcactaaagtgtcaaataaggaaggaagtaaatttaaaatgaatagtttaagaacaaccatatgcaaataagtaaagttagggaccattagacctttccagacaagattttattattctagcatttttaaatttttttgacaattactgtgagattcaattataaatattgatttattacctaagagggatgtcataaacttatcttgattaaaaagatacatagttggtcgggcgtggtggctcatgcctgtaatctcagcactttgggaggccgagtcgggcagatcatgaggtcaggagatcgagaccatcctggctaacacggtgaaaccccgtctctactaaaaatacaaaaaattagccgggcgtggtggcaggcacctgtagtcccacctactcgggaggctgaggcaggag

SEQ ID NO: 14248 - DNA, 1097 bp, Homo sapiens
ctgtatgaacacaaaatgctatacgcagaattgaagagtgctttccacatgtgttcaatgaatgatagccgagttcaaatataatgttcggatgacaaaccttccaatgatggggcctgtagtgttgtttccctttcacatttcagctcttctggcctcttctctcaaatgtgagtgcccttcttggttctctaatgagaacctcttgttctattttcctgggtggtagcaagtttagatattgtaccctgctggccacttgacacttagcagatgacgtgctctgatttgtgtttcaggaaaatgtgacagcctcattaaaagaaccagaaagctttcaaactggtatgaaattagggaccctgaaagaaggaaagcatatgaccaatatttgcctaataacttcttagagaatatgtcttatacttgtgagtatacaaaagaacccaggcacagacattatacacttcatttcaaaaatgtctaccttctgttaacaaaaaaaacttccatggtaggatctgtctctacccatatacgtacttggatagtgcctcccataactattaaatctcttgttcttgactgtgtactatgaaaaatctcaagcctgcagatacattgattgaataacacaataaacacctacatttaacattctgctacattttctctctctctctgtatgtatgtatgtgtatttttctctaacccattttaaagtatgttgaagacattattacatttctctctcaaataatctagcatatttttgttaagtattagttctagtaaaccatacgagtatcaatatgagaaagatcagaacttgacagcaatttgtgaacaaatgacatagaaatccagcttattccaacaacagtgtggggcaggagctaaaaactaacacaattcttaaaagtacagtttctggatgatagtatgaaatatagttctatcttgtgtttggaccacatcaaaagtattttgtttagtatttggctgtaacattccagtttatacccttgaaaagggaaatttagtccttgttccattgacaatgttagggatttgagttactataataacttatatgc

SEQ ID NO: 14249 - DNA, 1020 bp, Homo sapiens
tatattgaaatattgggcatattttttatttatttcaattaccatcctattgttaataagctatcataaatgatgactttctcattcttttttggccttctgtactgtgctatagtgatctggtggacaaagaacaagactttacatttagaaaatttacatttaatgctgacttttccatttacttgctgttaaacggtgaataaaacatttaatcttcaaaatcgtgaaaattatgataataataccaatagtaactattccttagaatttttatgtgaatcttacaaaattttatatatttgctttaaaatagtattctttatctctaaagcttttttaactattatatttatgtagcatttatatttaatgctattaatttaaaatttaatgttatattaatttatatttaatgcagattgctgacattttgaatactagttttaatgctatagtatagtaatgtcacaagtgtaagagattaaatctcagattccaacttgaagctctgattcctctctctgtaaatcttattcacatctaataagagtcagtggttcaaagctcttagaaccaaaattatacagtttaagaaattattcctattctaaaataatctgaagtctattttgtctagtgatctcttcctcaaaaggcctacagttttgtatgcaggttaaaaaataaaaaatactctttatagattgctgtaacatatagaaatcagatttattaaaatcataagtattatagatggaaatctgattatatgaaaaccaaacatacatttcattttaccaaatctaatgtgctgtcaattttgagactacaaaagagaagaacacaattaaaatgtgacaagccattgactttattatacttctagttttcagatataagacatgaggaataaagttgtctttgaatcacggaaatttgggacttttaatgagatttatatgcactttacctagcttagcttaaagcattcattttgctggtcatacaacattaatt

SEQ ID NO: 14250 - DNA, 1044 bp, Homo sapiens
ccttgatacaaagcacagtagttaacccataggtaaagcaaacagactgcaagactcatggttccaatgcacttgaatctcattgctcagttatgcagcaatgaatgatccatcagtttggaccacaaatcatggtcgtgaacatcagggcctggggacaaacagcacaggcaaccatggatagaccgttctatgccatatctactcgagatgaaaagcagtgttgatttcagctctcatcttttcatcgtccatttgggttttgcccttttattctgttgcttttttctgtttatcaacaaagtcagcaagtgcctggttccatccaagccatctctatttggagctattaatgtgaataattacacaactaacccttctgtctacctgccttttggtgttagctacccaaattattgaattaatttgtcctcttatgactatcaaaaagtgattcttttggtaattttcgcctaccggtttcagcatggcaagaagacaagtgttggtcctgtatgaatatttttattatatgtcacaatcttctgtttttatcagtagttctaacaattgagtctcaaatcatatcaattttcagaaccacatttatgaagtagaaataaattttagtgtactgaaatcaaatcattagacctatgtatagacaaccaaagtgttaaataatgaaaacaatgtcttctgcacagaccatcgttttctctaatggatatatgtgtgtgactgtgtgtgtgcatgtatatgtgtgtgtatatatataattttgagagatggagtcccactctttctcccagcctggagtccaatggtgcaattatagttcattacagcctcgaacacttggggctcaagccatcctctcacctcggcctcctgagtagctggaactgcaggtatgcaccaccacgcattgctattttttgtttgtttgtttttattttttttacagacatgatttcaccacgttgcccaggctggtcttgaactcctggactcaagtgatcctcctgccttactctccctggg

SEQ ID NO: 14251 - DNA, 1084 bp, Homo sapiens
aggtagtttacaattctaataaagaaattgagaaagaacagtttagcttgtttgcccatttctggtaatatatattaccagaattaaaatatacatatatttccattctaaaacagtgatgtttcaaaaatatatgtaattttatgagtttttttcataacctacacataacattgaacaaagatgtagacagttcatccctctcaagtctccttgcctcttcaaaggtcatcagacacttttggagaagcagcatgtaggtttctggtttttactctagtaattttctttattcttatcctcaatgaacatcagattagtgagggacacccttcttgtctcaaactctgaaagtatgatcttatggcagatcagtattttaacacattttctatggctgacaacaatgataaccatcttgtctacaaaggctatcttcttcctatgtgtgatttcaaaaaaatgatgctttatgttttgaggaaactgaacagtaaccacaactttaattatgaaaacctcaacaccactggaaatcaaatcacaccctgtgttagtagtattgtctacagggtatacaagacacttagaaggtttttccagggaggggtttggcgtatagaatgtatagtctgtatggaatttgtgaacattcatatgtgtactttctgccaagtatgcagataaactagcagagtctatttggcattggacaagatatcaaaaatcaactattttcattttatgcttttgtggtttcattaaaatcttcatagaaatcaagatgatgacttaaactccatttctaaatcaaagtacctaagagctaagaacatttttcacatttttgttgacattgttgttgctgtaatttggcgcatctctttatgtaccacaaaaagcacaattgtttgtagtatctgatgaaatcagctctacactatataggccaacacatctgttgtcaaaattttcccttttgttcaaactagaaatatcttacttgcaacttctgatgcaggaaatgtgacttaacttagtttcattgagcaatcaagagaatgatatgatgatgtatccattt

SEQ ID NO: 14252 - DNA, 1067 bp, Homo sapiens
gaaatgagagttgcagcaaagtaaagttaggcattgctatattctgaatgcatttgcctgggttggaaatatgatcccccacgctgtggtgttggaggtggggtcttttagggggtgtttgtgtcgtgagggtggagcctcaggaatagattaatgtcccgattaaaggcacatactggagtgagttctccttcttttgctgttctgccatgtgaggccatgacctttctcctcttccagaagacacagtgtccaaggcactgtctttttttttaaattttattattattatactttaagttttagggtacatgtgcacaatgtgcaggttagttacatatgtatacatgtgccatgctggtgtgctgcacccattacctcatcatttagcattaggtatatctcctaaagctatccctccccactccccccaccccacaacagtcctcagagtgtgatgttccccttcctgtgtccatgtgttttcattgttcagttcccacctatgagtgagaatatgcggtttggttttttgttcttgcaatagtttgctgagaatgatgatttccaatttcatccatgtccctacaaaggacatgaactcatcattttttatggctgcatagtattccatggtgtatatgtgccacattttcttaatccagtgtatcattgttggccatttgggttggttccaagtctttgctattgtgaatagtgccacaataaacatacgtgtgcatgtgtctttatagcagcatgatttatagtcctttgggtatatacccagtaatgggatggctgggtcaaatggtatttctagttctagatccctgaggaatcgccacactgacttccacaatggttgaactagtttacagtcccaccaacagtgtaaaagtgttcctatttctccacatcctctccagcacctgttatttcctgactttttaatgattgccattctaactgatgtgagatggtgtctcattgtggttttgatttgcatttctctgatggcaaggcactatcttaaaagcagagaccaaactctaacctgccaacac

SEQ ID NO: 14253 - DNA, 1035 bp, Homo sapiens
ccttatgatatccagtaccatttcctggataattttcagaatgacctcattagttcttctccttaatcctctgacatccatctccctttgcaactgccaactggtttatccattcatatagtaacaattaccaaatggtagtttcagatgagaaaccaatgatagatccagttagacatactgagcttaggagttcacactcctaaatttcttcaacatgtcatttttgcagaacttcctttcaaagaatctggaggggccaggcacggtggctcacacctgtaatcccagaacttggggaggccgaggcaggtggatcacctgaggtcaggagttggagaccagcctgcaacatggagaaaccctgtctctactaaaaatacaaaaaagaaaaaaaagaaaaattagtcgagcatggtgtcacatacctgtaatctcagctactcgggacgcaaaggcaggagaatctcttgaactcaggaggcggaggttgcagtgagtcgagatcacaccactgcagtacagtctgggctacagaacaagactgtctcaaaaaaaaaaaaatctggatatttcaaatctcctagggaaatgaaaattatttaatatcattcaccagacaaatatgaactgaaggaaagtttatcttaaactgaatctagtaggtggcctgtagagaagaaaccacatatatacagataaattctggaaaagatagaagacaaatatttatcagtgaaactttagggatggatgaatttctttaaaggatgcacaaaaagattagacacctaaaactatattggagagaaacactgtaagaagtggtataagatgagccgtctatatggagagattgagaaagggtccaagaaattaaaggaaaaataagtatttgtgtttgtttcagtggcgtaggggagaggatacgaaatacgagaaaaatatccaatagcattaagagggaacataaggcccagctctgggaaatgaggtttttctttgtggtcaacagataaatccattattttctcc

SEQ ID NO: 14254 - DNA, 1020 bp, Homo sapiens
aaagacaaaactatgaagatgagaacagattattgaccatcaacttcaggattgaggagattgtgtgacagtaagtggattgtatgagggagtttttgggggtgacgggactcttcttaatcctgatggtggtagttacagaaatctccatgtgttaaaattcatagaactatacacactaagaaagtcaaatttactgtatgttaatttaaaatgcaataaaaaataggggttcatatagtttcttgaaatgtttgagatttgccggattttctacaggttaatcttgccaaaaccccatgttgaaaacaaggacagaactggtgggctaaacttggaagcttggaagctctctatgtctcctgggatatttttttttctctctctctctctgagaacaagttcctcagctgttatactgagatgtttaaattcacagcttttaagctgcagctgctgaactatggctctagaaatcatctgaaactgagaatgcgtaaatattatatatacagtaatttagctgagagtcaacatttcctttcttaacccaaggttttgagttcctgaaattgccaaggtcgagtaaacttttgagccatccatcttattcgttttccctaagttttcctattgagttactatctctgtaccaagggtacaaatgattaggctgcaaagtgctttgaggctttgggaggcaaaatgtttcaagtgctaattattattatgcagtattctaattctgctttaaaaatcatcccatctaccttgctttctgttatacttccccttatcctcttcctgctgcttggttgatcatcctgctctaacttttttctgtggatccgtttcgtaccatcctttaaatgttgacattgtattaacatagaaacctagaaatgtcatcttccttcacatacttttttatttgaaaaattacattaattttaatgacttctcgaataatcaaagaagtagctctcaaacctctacttctgctctggcctctttattgat

SEQ ID NO: 14255 - DNA, 1023 bp, Homo sapiens
tgtcatggagtagttcaggggtctcctgcttcagagtcactgttagtgttttgtctgaaatacagtcagcatcagcactgtacttgcttaacccagatccctgagagagatgcctgaggtctgcatgttttaacaaattcctcagctaaaatgtaggaaatactggcttatttgtatattataaaattaacattccaggcttaatacttaagtaatatgttgatctgttcagcaaaccactgtgtcacacatttacctatgtaataaacctgcacattctgcatatgtacacctgaacttaataaaagatggaagaaaacaaaaaataacattagtatttcatattaacttttgtccttattgctcctcttttccccatctctctccttttgttctttttttaactgaattacaaatagtttttcttagaggaaaatgttaatatgcatcaaaataaatataaacatattttagcaattttaaaattgtttttaattggaagatgaggcaaaaattctgaagtaaacatgtttgtggctctaaaaagatcatactttccagagtcatctgaagggcttgtgaaaatacatctctgggcaccacggcagagtttctgatttcataggtctggggagggcccagaacctacgtatctcacacacatttccaagtgatgctgatgccactgggccaatgaccacatttttatatcattaccctggatttccctctcacgttccatttctctctgctctcttcagtctccctctcccttttacaggtaattttcctctttgcaggatatttggtcccctggttctccccaagtcataatagatctttttgtctctccccctccccatttcccattaatgttaactctatattttcaaacagtttgtagaactgattttacctatgttcaatgacaaagacactcccttagaagtattgagcttttcctgagaccttaacggaagacatgatcctggatggtgtcatgttaggcatcacagaccctca

SEQ ID NO: 14256 - DNA, 1047 bp, Homo sapiens
gttttagagttgggtacatatgtgtatatatgtgggtatatatgtgtatatatacacatatacatgtataaatgtgtgtgtatatatacatgtataaatgtgtgtgtatatatacatgtatgtatgtgtgtgtgtatatatatacgtgtatatacgcgtatatatatacccacacatctatatgcagaccgttcccaatttatggttcaacttacactgtttcaactgtgtgatgagtttatgaaaggatcagatactttattgacagaatacttcttacttgtgatgggtttattgggatgcaactcagtcaaggagcatatgtgtatatatggcagatttttttctaggaagatatctaataagtgaatacctattatggctgaattgtaactgcctctttatataaaaagaacaggacagacgtggatccttttctctgtgagtgagcctgaatagtatcttaagttaattacaattgaattcatgacatgtggtttttttgttttgttttatggttgttgtaattttatataaagtgggctaaatgaaatcataacatattatgtagcattagttttaagtttccatgctaaacataccctaatttatattttttccttataccttaatttacatttaagtttagttttagtgatagcccttttaaatgtaaatatctttttcaaaagataatcatttggctcttaagttaatattcaggtagtctgttaagtagcttttgttcagaatgcaagtagagtgatttcaactaatatatctgtctgaatgaattaagggtctttagtaaacagatataagaaacatgacaatagtgtttgcgaaggtgatagaacagtgattattataaactgtgaggagaaaagttgtgacaaatggacaaaagaacatttatataattatcaagaaatataaactattttgatgccatggtttctaatgttttggaaacatgacttaaaatgataaatgatagtgtctttttagttgactaaacttacaatatgttaatagattttctaagaa

SEQ ID NO: 14257 - DNA, 1030 bp, Homo sapiens
tttatatgggattaggctccaccctaggaactgcatcttaacttgactgcatctatagagacctatttccaaataagatcacctttatatgtactaagggttaggacgtcggcatatcttttgagggggcaacttagcccataacgcagaacaaaactgtgtgtgttccttagagaattcagcacagtgtgtcactgtatgtttatttttgtgactgtgttgtcgcacagtcatgagcctgtcttctgcagaggacggtgatctccattctgttcacctgtagctccagctcctcacatggtgattgacacagaattgatgttccaaatattttatgaatgaatctcttttctacttctctagtcatgtgctgaatgctccccactttttttctccttcaaggcagggatgaaagtcctgtcacaaagcattagttggtgtcaataataggcttctccctggatctgaaaagaaacttaaaaagctgctacactgagatgattatagaaccaagggtcctgtgaagggtcatggctatcgagtgcccgtggtggcattttggccagttaaatcaggatatggactgtggggttctaaacttgtctaagtttagcagcaaaaatggtttagatggaactagaattctgacttcagaaattgctcatgcttctattttgtctctgagatataattttgtttattctagtgaaagagttgggcaaaattgcagtttttctttatttttaatagttaacacatctattttcaattatggcttgagtcatttgaaataaagtagtctctgaactgggaatatatggcatattaaaatatcacaaatgccaagctttcctaactcaatgatattgcaaagtcaaaatggtattttctttcggtatcctagagagtgtctgtgtttgaggccacttagctaaaagcatgcatcagcccacctctttatgtgagtgaaagagatagcttatttagaatgaatttcataatttagattgctctgcatatggcatgctat

SEQ ID NO: 14258 - DNA, 1048 bp, Homo sapiens
ttttcataacaaaactatgatacaggtattatctccacttgcaaatgagcagcctaagatggtaagagaagtcaggtgactccataatggtcacacagctaatagttgagttgggtttagaatactaggcttgccaatgtttatctgtaaattattctcccatatttcctccaataccataaaatggcatttattatattaggcactcaagtatactgagtgctgcaggaagtgctacttagatgtataatgcagtatacacacacagcttggtagtcgtatatcacaatatttgtattatttcctaaaaggtaattttactgatatactacatcagtggaatttgtttactttttaaatttaggcatagatggaaagctagccgggagagagacagagagagagggcgggagagagagagaaaccacaaaataattaagcttgccttatagagaaatattgatttgtattagcaatggttcaggttttagctcgagctcttttgccccctggaagtgcaaagaaaaaggccaatgtagaacttgaatctacaaatgaatgcagtatttaggagagctgatcctagtttaaaatgaaataactcagcccattatattctggacatatcacccatgaggtcaattaagaggaaacatgtgagaggatttctgggcaaacctgtgctgggaaagcctagcctggaaaaccttagcagggtgtgtttgtgcttcgtattgattcctcctgccttgaggacaaatgcagtaggtgtgtgttattataagagcactaagttcaagtggcagctttccctcttttcatgaggcctgtctgcagagcagcaggatggaataaatcgcaatgggctttgttggcacactggccccagggtgcaagaggccaagtgggtgttggcaggtttatcgggttgttggctataactgctgggaagaatgaaggcccagcggtttcaggtgatctgccgaggaccctggggaaagctgaaaaaatgttctccaatgcttgacccagagcccagaacactcca

SEQ ID NO: 14259 - DNA, 1075 bp, Homo sapiens
gcagccataaaaaagaatgagattatgccttttgtgggagcatggatagagctggaggccgtggtccttagcaaactaacacaggaagaaaaaaccaaataccacttgttctcacttataagtgggagctaaatgatgagaactcatgaacacaagggaacaacagaccctgggggctactcgaggatggagggtgggaggagggagagaagcagaaaaaataactattggatattgggtttcatacctgggtgatgaaataatctgtacaataaatgcctgtgacacgagttcacctatataacaaacctgcacgtgcactcctgaacctaaaatttaaaaaaaataggaaggggctttctagacaagcatgggccatctcctatttattttttcctaatagagtgttcactattccttaattacttgtgctactactgctggtcttgcagtcgcaacccttctctttaaattttttaaacactgttttgttctaccaataatctcatcagattatagactatatgaatacatttcaatttaagagaagtgggtaattaccactctgttaaatgccgtgttgtcctgggtgaagttgctctaatgtggccccaagtgcttaggatgatatagatgcaaggacagtgtgtgtgagccaggagcataggcctgtgttctaaactggcttcaccatgtgctgcatgtatcataacggcaaattgtgccttggtaacctcatctgtaaaatggggataatggtagttgccacctcataaaactgtagtgaggattaattaaactaatccatgaaaagtactttacagagtccttagccaatgagaaacattcaataattattaaccatgttattattcaacaattgtttaaaaatttggtaaccaacagatgatatttattatagactcttaagttccaaagtaattgaaatttaacattattctagtaaataatgtcaaattaaagaatctgggattttataacaaaattcaatttttctggatttcagtttcaatagaacagtttctttcaggaaaacacctgaacaactttttca

SEQ ID NO: 14260 - DNA, 1562 bp, Homo sapiens
tgaattctgcagagaccaaaaccttccctccatgggaggaagggcaatatttatcatgcttcagtggtggctggagaggtcgagaaacttgcacagacacaacataaaactgcgggtagcaaatgtgaatggtgagccactgtcagaagcaattacaaagggagattacattgcaaactctgacattaaaacctgtgtaaataatacatccaatctgatgggggccagggcctgctttggcaactccctgccagttcttgggtctgggcttccgttctctctcagcctctctgggcctctgataaggggaaggctccctgggtccccgggctgcacaggttcttgaggactggttgcactgcctggcctgggtctttccttggccagcggcaccctgtgttttgtgcagaactgactaactctgcattaaccttcttcaccctctttttgaagtagcagattctctgactcaggcctcacaaactctctcactaaaggagtattttccttctagctttttccccccggacttctggcctttgactgtggaacgggacagaaggaaagacatagttctatactctgaatttctctacagaaatctgaaaatggagcttcctgcaaagagaagcctggggctccatcagctgcatcttgtggcacagcctcgagttcggctccgggctcagctcagagtgcgtctgccatacatcaggaaccctacgtagtgtcaggagcttgctgtcatgtcacccacttacccatacagctgcatgagctcacaggattatctgcatttgcagatgtgggactaaggctctcagggctggatagctccatggcatgtagccatgaagtaagcggggacagtgagaatctgactgatgactctctggctgtgtcagtgcatggatatgctcttttaaagacgatgtggactttgccaggcacttacttaactaaagtagaattggggataggataagtactaacatgaaccctgagaggcaaagtagggatggaggaagcgcaattgctcctctgggctctgagatactcgcgtcttggattcttaaagttgaagcagagacagaagaggctctgtttggcataacttaagtgacttaactaattatttgctgtagtatatccataaggtatctataaattaatgaagcttaattaacttaatttaaatgccaaatgaatattttgattggtgagattttattgatatgacaattcaactaggacattaagagaagcaaattacattaatttgtaaatacactttagatcataaaaatctatagtaaatcataatgctaacttcagaagcaattgaaagggttttattcgaagataaaattacacatgtaaatactctcttataattcctggaacatattatatacagtataaacatttgcctaaaatgtagctatattcttagcacagtgcaattttaatgagtctaatacggaacgggtcaggtaacatgtatataagtctactaaactgtcatggggtgaattatggatagttgctcaagacataacaaa

SEQ ID NO: 14261 - DNA, 1029 bp, Homo sapiens
tagtcccatccagtctacattgcagaagacccatcctcattttcctccttttctggaatccactattgactttagcttcttcagcagattcctttgccaattccaaatgcacattcctggaaacctgtgaattcgattatctctgtttgaaaattctacgggcgtttcaaagtcaatgtttccaaaccagcttgtcttccctgactgtcttcttagccctaatcccaaaaaacttggtgatttccctggttaaatggcccttctcttgcttaatgatttctccttccttcctttctatggagggaagccttgggaagatctccgcctccttccttgggctacctgccttcctcggccggtggatccccctttagtccaagctggttccatctctgccatgtctctcctttatatctcaccaatagcgatatatttcacgttgttatctttttcctaggataaaaattctgtgttaattttagtttttaatttgagtttaccattaatgaacatcaaagaataatggacttttaaactcggactgggaatgagtgtgtgtgagtgtacattcaaatagcaaccctaaagcttttgctgttgttgcaaaggtttgatgctgatgctgaatagatagttcgttacatggccttgacagcgcttataaggacgcagaggagaaatgtctatcctgatgagtagttgttcctccccagaacacctaaggatgcacagggacaccgtatacaacctctgcagaccgcatgcctcctcagcctgagctggttcccttccttactttgagtctaggaagctcagatagaaacaaatgagatattattggttttttacttttctcttgatttaatcttatttctcttgcatttattccctttctcattatttcttcctttattctaacattgtagtctactctttttatttttgctagctgccttaacttgttttgttttgttgttgttattgtcatgaggcaaaatacataagcgagcaatgaaagattcactcctt

SEQ ID NO: 14262 - DNA, 1178 bp, Homo sapiens
tatagtccttaatcttttttacttttttttttttttttgagataaggtctcgctctgccacccagactggagtgcagtggcacgatggcagctcactggagccttgacttcctggtctcaagggacgctctggcatgagtctcccaaagtgatgggattacaagtgtgggccactgctcctggccatgccccttaattttaaaaatttcttatttggggtcatttttgtcttttctctcaggaacttttgaattcctatatcttttgttgtatgacactcttattttataatggttgtttatgtctgttttttttttttgtcttttacttatgctaggtttttttttttttttttttgcagatatcaccccttgtttcctacttctttgtgtttatacagcagctttgtttcctgctttcacctccttcctgcccatgtttcaagtggggaaatttttgtgctgagtggccgcacgtggtcccagtagtagaggcaaccttaattctttgcctttcaagctttgtgtcagcctcacctgtatgggggaatttgggctgaggtccctaatggctcttagaccggagggtgaagagactgtattgctgctagctgaactgtagattggaaaagtgacccaaagagaagccctgtcctattgccaccaacactcttccagcttgagagaagaataaactttcagctgatttagagccagtgggcctttcttggacagagggaggaaggtgtatggaggctttgaccatagcagtttgtagtgtttaagtggcatccatactttatatgtggagcgtttgtctgagttactcagaagaatatcagcgtccagcctccaagaataaaactccaagaactaggggcctggactctaggtttggtctttattacactggggatgagcaagaacaaccagggtgaactaggaaaggtgcacccacttaaaacgacctacgtgttgaaaggctgtggtttgatgtttgctttactccaggacaggtgggaagacagggagaccttggaagaatgactggcaactgctgctcttttgtccagtttcccaatatgagggaataagatttttggtaaatcaatctgtgtctctcactttcatgcacacatatacaaacaaaaaaataaagttagaatcattggattatat

SEQ ID NO: 14263 - DNA, 1021 bp, Homo sapiens
gcatagcatgggtgacgagggcaagttgtttatatggagccttcttggctttccatttcctaggcagtgtgctgccagccttagtattttgtggtaatttttgctcttcaggatgtatagaagaaccaggtcagggactctctgctaaaattgtagaaaggggctcatgggatggtgccctggagagacaagagcctttctggaatgggctctggttctagttcctctttgaccagattgactttgggcaactcactccatagctttgcacctaaatctttttaaatgcaaattgagtggatcctaccaaatggacttgaagtccctttgtctaagattctgttctgtttttttcccctgaactctaccagttttgataaggtgaaaaattcaccaaagttctaaggctctcttctattaccaaatgacccatttatctaagtctgtgttatcatcctaattttccagtgttagtggaaaatggaatttcacggtgggccttgtgcacttaggtcttgattatgcccttgctcctcgtacggtgaaaatagttagactcgcttcctaagcctcaggaaatatattatggcatgcatccaggagttttgttggctgaggatagtagtcataatgcgcaagatatttcaactgtaagaataattattggtcactttactatctctaagttgtcaaaaacttctcatgtgcctaccctagattgtatatactttcttttccaaatctctgttttacatggagtcaagtttccatttgtaatttaaagataacatctttgctaaggaaaggctgttcattgatatgcagattgagaaatcagcgtgtcctttagggatttcaagctgtggaatcaaccaaaagtctgcagaataataggacccttgagccttttatgattgtaagactttgatctgctaccaacaggtcactcaattttatctttgagcctcacttaatgtgaaaaagtgaagcctgatctccagtaagtgcttttaatgcagaa

SEQ ID NO: 14264 - DNA, 1436 bp, Homo sapiens
tatttattatttttatattaaagataactcattttaatatgtactatggaacacaggtaaaaataaataagattcatatcacaatgatacaacaatctagttgataggtaatatataagattttcatttatggaaagcatcaaggcaatatataatgagtatgaattaaatgccagaatgattgcctgggctgaggttgttgtggtagaggatataaaagaagttttgagacagaattcaaaacatttgttccattcaagtaagtataagagaggaaagcatcctaggccaatgaaaacatcacaagaaaggatgaaaaattactctattagaatgttgaatgaattgaaatttgacacacatcaaaaggactagtccaaaatgagtaaatttatttcaacacggcaagactaatgtcaaaccacttagaaaaattgtccatgagggagagaacagggtactgtgctagggtagaaacaaccagaaaaaaataaaagttgatggatttaggacttatttgtaaagaaaaggtggaagaacatgtcaacaaacggaatgacaacagcaaataagtggagactatcagagattcaaatgttaagttccagtgactggagattggatacacaatgagtaaaacgaggaggcaagaattgggaagaggagatagcaccaatcaattttagacctgtagaatttcaggtcttggtgaaaccccacaggagatacttttagatgaatggaatctcaaagggttttaagctggaaatttgcatctaaagggaaaaattagaactgctacttgatgatgaaaggatggaggctaccaatgaaagggtagcctaagaaggtgggcaaggataggagcccactcaagcgatgaaggaagaggaagaaccagaacgtacacagggaggtgaaaatggaacttgaagagatccgggatgaagcagcatttaagaagcttatgggcttgggtgggagagtttcaagaacggggtggtctttacaacatacaggtcacagaaaacttgagggagagaaaatgtaacaaaaaatagatcttccaaatcagctaataaggagatcttcccagtagaggcaagaacacttaggatcattctttaaatcacagagctaataaattcagtgagggttaatatgtagatcgcttttcaaaagaattatgaacacacctttcctggatcacagattacctagttttggggttttctactgacttgataatttgggggtattgcagatatctagctttctctcccaaacctatgttcctttcttcctggttttgcatgctagtctccaagaacatgtatcagccccttgttgctcctaggtgtggccacctgaccagtttccaaccaactttagaggaacaggcagatctgtgagatttgcatataccttgcttgaaa

SEQ ID NO: 14265 - DNA, 2055 bp, Homo sapiens
tcttaaaatcacaatagccattgtaatagtcttgttctgatggatcactcctgctacattatatcattggccacacatccaaaagacataaaaatatttaaaatatgaaagcagaggtcatgcctcttttaccaaatcatatttcataacttaaaagtgatctgaacaaaaatatcttagaataaaaatttaacttgtttgacaatgtaaaaatgttgataacattatttgaacatttatttagaccctgaagtggagaagcgtatcattaaactcattcttgcaaaaatacatatgcattgtaaatcttaaaatttataaattatatatttatataacattatgtttcataaatagcataatgttatatgtctatatgtcttatctatcaaattcagaatctttatttccttctgactctctaaaagagacagagaaaagagggaggaaattgtaatgaaatctttcaagaagtgttcctgtaaatgatgaaactagtcctactcctatatgcattgctgagatatttcaagccataaatgatgaaaggatgattccaaaagcttccagagaggggggaaaaggtgatataccaggaatcagaggtcagaatggctttggatttctcaacagcaaaacccaggtgagaaagcagtgtatggagcagtgtgtggatgtgcacgcgtagactcattttaggctacacattgattacacatgaaagtttcaaactgaattatacaggattttctttttatttaagggagtcataatgaacgtattattcttagaattctttgatcttaaatatgaactccacattttaagtatgcacatttgcttaaaagtacaagaaatatttcatgtatatattttcaaaattactttgaatctttccttacattaaattttaagaaaagaaacaatttgtaaccataggttgaagttgaaacaatcttctttaaattctgaccccatagccagtcatgcctcctgccccaaattcaactggcactgcaccgtgcttgatttttgacatttcctgattttctcttgctcctggatagtttgcaagggttatcttttggaactggaatgttctcagcctttgggactagatgcaagtgttatctgcctgtgaatcccttcctgcttctctgacaatgcagtggcacttctgtaacacgtgtatttctggcgtcactgtcatgtttgttaccctctgtggtatttgtgtgtttcttcacacagtagtgttatattatggacaaagcagggcccatgccttatccaggcttctgccctatgcctttcttaatgtctacttcggagtcattaaggactttgaaaaatgaatctattttaaaggatttatgtcatttatggtaatttaggcaccatgagtcaacaaaattatctttctcattatttttgaaattttatatatagtgtagataatgtgtttcatatccagagattttggctaagcaacctacagcactggagagttcaacaagaatgtagaatgaaacacagaattcctagaagcaagcctataattctggagtaaatgagtcacatgaaaagtaaatgtccaaaggcatcttttgtgggaatgatcaccataggctgaaattgcgaggaactagaacaattattattatggatttgtgtaagacgataggtgagaacagtcaccaaaaatgggagactattttaatgaactgtatgtgaattgatgagggtctgatatggtgtcagaatagaaaaatagatacaatttgcttatgaagaaaaatagatgcaatttgctagttgtaatagatgccatttgcttatgagctgtacagggctcaaggacctgcttgcaaggatatatccattatccagacatgtattggaatatacactcattttgttttattaaaacttagttccaaccagaactagattgatgtttccttcttcataatttggatccttctctctttacacaattttcttgtagtacacaaggttttatgtgtcagtttttaattaaattagcaagaccat

SEQ ID NO: 14266 - DNA, 1047 bp, Homo sapiens
gaatcattcacaaagttttctttcatactttgtttctttcagcatgaagcaattctaaaactccaagtgagtgaagaaaatttaaatggctttcttctttttatgaaagtagtgggaagggctgtacaatcaaacagacctaaatccagttacatttcactcagttggaggcaaagtcaaccccataataaaaattaaagaaaatgactctgaattactccttatgttgcatctggcatttaattgatgtgtataataaagtaagtaaaaatcttctaatcaaattttacatttgcatactgacattttatctaaaagataggtttggatgtactgaaatctttcagtcagtctctgaagaagtctcaatgctgaatgatggaagcctattatgtgcagaatacgtattaaacttggtcactcaaatgaagactgttactcatatgtcactgcatttactaaagctgcgggagggaagaggtctctggaatatttccatccatactcgatcttatactcatttccattttatgctcatttgactgtttctttttattacttggcatcacgaaactattgagttatcttaatgggaattctattgttactctcatctttattacttccattaggcatttggatcactggttggtctcttttctctttactgtttctcagttttacatttacatgttatttctatcagtaagttttataacagtctttataaactctgtgctagagtttctaatagaatgcttacaaacaatcctacctatcctatgacttctatgtttaatccatcaactacagctaatgtagggggatttcaggtgtctgtaagacaaaggcatatctcagaaggaagtgtggagggtgggggatgatgattgagcaggagagtcatcaaaactgtacatgagaaaggtgcttggcctcttctcagttaccactgcgacatgacacacaggctcaacgtcttcctcataaggcaatgtaaactgatacccacttactccaacagaagtcagcttagagaaattcaca

SEQ ID NO: 14267 - DNA, 1090 bp, Homo sapiens
tcactatttttatcgtttcctgttttcataaacactattgggtggagtatttgttttaggtttctttgaaggacagtaaatgtacaatgccttgataatatgccacactgattactttagcagaaaaaatacatacaggcatgcgaacctgcacacagggacacaggggattgggggaaagagacaaaagagagaagataagagggaaggagagacacagggagagattggtaatattgattgtgcaaactaattgactacatagttcactgttcaaattgatgtaaagcatttatttatgtgttattcataaatcaattcatctttgttgagtgcctaattttcacataataaggtaaaggagagagtgttaataggggaattgatgtagtaaaattttgcactattgctgtcatgctggaagctacggatgacaacgcagacttgggatttggagattatgtagactacagcccactttctgctcaatttccatgaattgaagagtggacagaagggcttgttagagtgtcagttttgagggatttggatttgaagaaaaggagatgaatgaatggatcgttatctagaaggttgacataatgtcatgcttttgataaaggaggttttatttagctgtaaatttgtcatgttatctgtgggcctaaagctcggtattctacagtttctacttcctgccatggactcccctaaatattgttaggaagattaaatatatttgaaaagaccttctatggcacctgatccaagacaatctctaaacaaatacaagtttccgtttctgtttttttttttttcctgttgaaaacattccagaagcagtcctgagttggtcattgatcataattgatatttttctagatatgcagtgatagcattaaacggttgttttattattactcgaggattcatggtatcatgagctgtgtgatgtcaagcaaatgatgtatgtgccccaaacacatcgtttgactcctaggatctcagtgttggaatttattgaatggtgtgaaagacaaaatttggggagatagacttaggtctctcagcagttttaaagtcctgtgtg

SEQ ID NO: 14268 - DNA, 1053 bp, Homo sapiens
ttatagtggaattatttataatcctttgggtatatacccagtaatgggattgctgggccaaatggtatttctgattctagatccttgaggaatcgccacactgtctttcacaatggctgaactagaaaattcccttttcttatgaggaggcacttgagtttctttagaggctgtagcttcctgagattgacagagaccttaatattgcaagattcccactactttgtatttgttgaggtgccttctcccacagatcattcctcctccactgaagataattttctctccattgccctcgaagactgataccttccccttccacatacacagctgggttttggcagtttccaccccacaacctttaatattactctttttttgttttggtatgtcagtgaccagtggctaaatataccaattggagccccagcaatatccaaaacctaggcagaaaagtcagagggtacactatgccagtaaggggcaaatttcagaaaatggtgttagagagatcacatgatcatctattgagcaggacgcttgaactctttctgttaaaataggctgcattacttgagccttgattttgcagttatttggaattgttctgagttttcacttttccatcactcatggtcacagatgatgcatgtgacagctatattaggcagggcatgtttataaaatctttgcatttatcttcttaaaaagcaattatctggaaaatatagcaattagaaagtatgcattagaaataagcccattcttgcttatataaaaatgaaatcagctatgcaactgcaattatttagtactagtttggcttgttatgaaatgaagcatgtgtagatggtgggccatgaaaagcataagcttccaggcaatattagaaaaatgttcctcagcattctataccactgtgtttctagtgccatcagtagaacatatgagatactctcttttaacaattttaatatactaaaatttatggacaagagaagagatgccctgaacccattcttattatttaaattgttttgtaaaagaattgtg

SEQ ID NO: 14269 - DNA, 1026 bp, Homo sapiens
atgtgggagatgaaatactacataggagaacctactgtagacattctttaaatcttgtacagaaagcataatttgaattatgtttcttaatttacctcctgtacctatgcaggagggtcatgtgtgtacgtgtgcgagtacacatttgtgtgtgtgtgtatgtgcattatttgtagaagccataaagcattaaggtaatacacctgctgctttatgctaatgtctttgataacatagacttcttcaaggattgactgaaaaatctgtttattcaccttatctacaaaagcactgctgatattttctgagggcatgtatgaaacgtaacaccctctatgcaaaatatcatttaaggtctgtctcaatttgaatatatcgaaatgtctcaagcaaatagaaaactgaagcaggggaaatagagttgcatacctagaagttccaatcatcattgtgtttttaagtgacttgaaatgacttcaaaaagttcagttccttaaaataacaggcatgatatctttctctaaataagtataacattgagcatactgccaacatgggaaaaaaatagaaatgaacacgaatgaaaattgtcttttctttttccatatattatactttaagttctgggatacatgtgcagaatgggcaggtttgttatatatgtatacatgttccatatggtgtgctgcacccatcaacccatcatctacattaggtatttctcataatgctatcctccccctagtcccccacccccctcaacagggccccggtgtgtgatgttcctctccctgtatccatgtgttctcgttgttcaactcccacttatgagtgagaacatgcagtgtttggttttctgttcctgtgttagtttgctgagagtgatggtttccaacttcatccacgtttctgcaaaggacatgaactcatacatttttgtggctacatagcattccatggtgtatatatgccacattttctttatccaatctatcattgatgagcatttgggttgtttccaattca

SEQ ID NO: 14270 - DNA, 1003 bp, Homo sapiens
gaattaaaccttttatagaatcaaactaagtgttaaatttttaagcactccttaattatttaaaggcaaactcaaatgcaattggaaatttgttgtgtaacatttaaggaaaataggaaaatattaataagccatgtcaccatgatataaatacctgcattattgattatcattgttttttatttgatctgcctgaagtatttgagacagagaaacaactttacgttatccctttaaaagatgggaaaactatcttagggaggttgagtgactgggccaaggaccccaaagtaggggtggcagagacactctggagagatctcagatgttattttagtcgagtgtgccttacattataacaggcaatgttttctctctaaatagcttattctcagccgctttctaaccacagtgcttacaaagacttccctcttatgatctgagtatatagatttttagattcaattttcctggtttcatagatggttagaactgaataatctgtagatcttcttggccaaacctgtcatttattacataagatcattaaagccgtaggagtttaaaactcactgaaaaacatagatcttctgattgaaaagctgaagttagaacataggtgtattggatgcagttcagagacctttctatacaattaaatcatgagctttatttttaggaaattgtccaagtcatattgaatttgaagaaaaaatgttcaaggaaacaatgggaaatttgtcgcattaaaacaaaaaaggatagggaagtgggagagagaaatagaaggaaaaggaaggaagggagggagcctcagtaatttctctccgattgggtaaaactgatattgggtttaagtaacagcattttttttttagctaagaatatgtctatatgaagaaacatactctatttccacctttttcctaccaatagtgatttttttttattgtgtgtgtgtgtgttttgttttgtattcatctctgaatccccaaaacactac

SEQ ID NO: 14271 - DNA, 1031 bp, Homo sapiens
ccggcccagcacaggtgtcccactcttgctgagtgcgtggaacccacggcagcatcgttagcttaacctcacctgccttccttccagcagagtcactctccatctctgcgggctgggtctgatcctgcttcaaaggatgccgttcacctcttccttcactggcgaagtagcctcatccttagccttggggatgaattctatttttttcggagtcaacacaatcatatgttttttctcttcaattttcaagttgcttaattatattcgacatatagtaagtgccctgcaaccgttgcttacacttctagaattagctgtatgtcaccaagtgtggcttcccccaaccacccaatcaggaagctactcgtatgtattttagggttttggacatggcaaaactcccctttaagtaacaaagtctgtgctggtaatatattgctgtgtaacaagccaccctagaacctaatggcttaaaaacaatatttattttatcataagtctgcatattgggcagatctctgtaggctcagttcatttctcctccaacttgcaatagggggcctggaattatctgtagattctttcattcatgtatttgatcattgacactggctgttggctggatctgtagtgagtgcttttggcttaacattatcatgtgccttctccacgtgtcctgggtttctcacaatattatgtctggatcccaacggcatgattcccacaagagagctgggagaagctgttttacctctaatgacctaatctcaggtgccacgtaacgttacttccaacacattctgttcatcaaaataagacattaaagttgtttcatacttagagggagagaaattacaccttaccttttaatgggagaaatgtcaagaattagtagaaatgttttaaaataatgagatggaaattaagaaaatggcagagtttcacatagaggtgcttgtagtccagcatttcagtgtagacagtgaagtccatgacagaacgctcatccttctgtagaggaagattagggg

SEQ ID NO: 14272 - DNA, 1026 bp, Homo sapiens
atggaagagaagtcccaaaatctgcagcaggcaagaaagtcaatgaatatttccagctggagtctcaaggcctaagaaccaggagggccagtgccagtccaaatgctggcagccttgaagtccatgaagtgccagtatacccgcctgtgtttaaaagtcaggaaggagcaatgtcctacctcattcagggaggaggagctctctctgactctgcctttctgttctattgagatcttcaactgatcgcacaaggcccacccacagcagggagggccagctgttctactcattctcccgataccagtgctagtctcatccagaaacactagcgtagacacacccagaacaatgtgggaccaagagtctgggcaatccatggcccaggcaagccgacgtataaaatgaagaatcacacccccaatcacatttaaatgtatattgcagtattggtaactatatgcacatagttatacaacagatctctagaacgtttttgtcttgcgtggctgaagcttcatacctactgaacagcaaccctgcttttttcctcttcccctcccctggcaaatttctgttttctctgagtttaataacttctgattgttcatataattggaatcatgcattattgttttctttccttccttccttcctctctccctcccaccctctcccctccccactcctcctcccctcccccctccccttcctccctccccctcccctctctcccccccactcccctctctcccccccactcccctctctccctccttctctgcctcctctttctttctctctctctttccctgtctctctcctctcctctcctcttctcttctcttctttcttcttcgtgccttccttccttttttgtctttcctttctttcttctgagacagagtctggctgtgtcatccaggctggagtgcagtggtgcaatcttagctcactgtaaccccgaactcctgggctcaggcaatcctccaaacccagcctcccaagtaactgagcttataggtgtat

SEQ ID NO: 14273 - DNA, 1069 bp, Homo sapiens
tgtatgtgtctttttatttatgtttaccatgcaaaattatgagggagttatagatctaggtgactgacaccattataataaagtttggatgagaactcatgacattcttaagagcatgtcgtgggaaacagtggtaacctctcacacaagttcttgacatactagagtactgtagatattgttggttaaagcaggtttgtttaatagctccacaattttatatggtgctgtaaatgtctgtcccagattgacatggtttcatataaatgtatttttctcactttgatagaaaactccgtagatgggatcaaataccttatttctactgctatgcctagttaccataatagttcctgagaactgttccttaaagggttcattgtctacagaaagcgaaataaataaatacataaataaataaaaaataaattaatctgagctggatctgaaatggaatggttttcattggttaagagcagtgtgttcattgacgaattattaaatttcccatctgagcagaatgatttgcaagcccctggggtgaaatcaacattgtggtactgtacagtatatttttctcttttcagtagcttacctctctgttaagcaggcaaaatttagcagagacagattatcaatggaacagagtaatgcttctttttttcttttcttttctctctgtttttttttttttgttgttgttgttgtttgtttgtttgtttttttgagacagttttgctgttgttgcccaggctggggtgcaacggtgcgatctcggctcactgcaacctctgcctcccaggttcaagcgattctcctcctgcctcagcctcttgagtagctgggattacagacatgcgccactatgcctggctaattttctaattttgtgtttttttagtagagacggggtttctccatgttgttcaggctggtcttgaactcctgaccttagatgatctgcccgccttggcctcccaaagtgctgggattacaggcatgagccaccgtacccagccatgattcttagaaaaactgttttgtgctttggaggctgagacaggagaat

SEQ ID NO: 14274 - DNA, 1027 bp, Homo sapiens
aactgtgtcttaagaggaattatcagacttgaagcctaatgcatcaaaagcatagtttagttggaattagaaaattgccaaaaatctcagtctcagttttcagatatatgattccatgccatagagaacaatatgatacattctttataggtatttaaaagtagatctcaaagattttgtttggtcatgtctgcctgaataagtatgtgtacagtgggtgagaacagaatgatgtattagtgattactgctatattagtattactcctacaaatagcatcttggacttaattgtcaaataaatgaagatgtgttttgactattagtataaatatgcatatttcatagtgtcaacttggccttcaattatatgtccagaaatttttcttctttagtgcacattagtcttatgaaatttaattcagctccaggcacaacactgtgtggttgtaagagtacaagacgtggataagaaagtaggaaatacaacttcttctaagtaaagttttatgtactggagaacagactgtaagtacactgttagttataataacatacaaaaaggcattccctaagagagatgaaatttaatgggggagcaggtaggtaagaaaaagattcacgaagaaagagcagattaacatcacttcttaattcctggttaaatatgtttgtcacagaactactctgatgtctagatgccatgattattaaaaattgcccaggtttttaaaataaattattttgaagtataaacatgaataaaatttgtaaaaagttatgccatttggcattctatgtgaaagttaaccagggttttgtttgtttgttttagattttttgtttttagtaagatttgggaattggcggcattgcttaagacaatggtttctttaacgtgaaacatatttcatgaaatgtaaaaacagtaaagtattgctcacgcttatctgtgacacgaaaggagaagtaatgggtacagtatcttgagtggaaacctactaactaataattttgccagtggcctc

SEQ ID NO: 14275 - DNA, 1047 bp, Homo sapiens
tgtactggaaaaaagtatagaggctaccaagtatattataaaattaagactgatttaaataatactataattttgtactttaaagtctatttccctttaccatacaaaattgtacaagaagagttaaaaagtaagaagcatctgttgcttcaaaaagcaatcagaaagctgaacaaatggactatgatatagaagaagctagaattagaaatagtgaaaagggtttatcttttagcattttttccttgaaaataaatggttaaatgttagtcttcttgatcagtgtctagatggggcacccacaaatcaatcttttaaaaccatacaatgaagaaatgttccatattgtgagttctatagtattggtaccagacaattccaaacgatttgtgtttgttttaaagctttcaatgaatggatgctcgagcaaactcagctatattttatttcagtttatatcttgtttggcggctttggttttgatcaagttattctgggtaatggattcaataattcggccgtgtgatgtagtgacagcttctgcttcttcgctgtgcaggagggatgtgattcacctgcttcatgcttcttttggtgcagattccaagtgcactgatgagggcaggctggtgcaaaagtaatcatggtttttgccattacttctagtggcaaaagccgcaattacttttgcaccaacctaataggtagcttcccctatttattttcccttccataaaatacttttctcacttctgtaaaatgcttttctttacagctcacttatgtgatttttcttactaaacatcccccaattttattgaggtttaggatttaataactgaataagctatagaagaccaaattatacttgcaaatttgggataggcttctattccctattcaagccaatcaattaactgtgcaactagtaggttgtgctttgataggaactattgctaataactgcaactaacgttaagtaacagtcatgtgcggcttatggggctaagtgtcgtccatgcatggctatgtttgatttttcaaaca

SEQ ID NO: 14276 - DNA, 1044 bp, Homo sapiens
atgaatcatactttccttacctaggttactcagtgggagttctccactcccataaacaaacaggtctagtaatatgttttgctaaacaaaaaaataatctactcctggaaataaatgataccactttcatggaaggtagaagcagtctgccaatgttcatcttaaataatatctcccaatgttcatcttaaattatatatatatatatatataaatctttatatagatagggatatatactccaagtgctttcatatataggttcattgctatgtttgatttccataaacactctagcaggaacagatgatgtcgtttttagatgtcacttatgaggaaagttgaactcaggaagatgacttacggtcattaaggcactgtatggtacagagttgttaaaaccaaatctgttgagttttcatctttgcactcaccatggtgacgtttctaaggctaatttgactctctaagtcaagaatcacaagctaaaatgccagtgaacattagacaagtaaggaaaatggatgaggtagacagagaatgggatggtcctttggatcccatgtaacatgtgtaggtttataagacttctagatcattactcagtttcttctcaaaaacttgcattttagcatcccacatgcgactctttattggattatttgtggctggttcagccctcccatttgcatacttttggttccaacatgggttggaagataaaatgatctgcagaaagaggggcttcagtcgaatgcacaggctgcactggacacactagcacgtggcagtcaggtacagtactttttggcaaaaaggataatgaatctgccacagcagtgttcgttgactgagagcttaattgttcactaaaggaagaaaataagattttaaagcctgtttacacagggatcttcaggtagcagcattttaggggggttagaatataacacagagaaggcttttctttttggaaggaagtaccttgaaatagtagtagatttatgttgtggtttggttatggtttgagttgtaagtatagga

SEQ ID NO: 14277 - DNA, 1077 bp, Homo sapiens
aaaatagttcacttaacataatcacctccagttgcatccatgttgctgtaaataagatgatttcatttatttataaccaagtagatatttcattgtgtgtcaataccatattttagttatccatttatccattgatggacataggttgatttcatattttggctattgggagtgcagacatctctgacatactgatttcctttattttgtgtgtataccaagcagtgagactgctggatgccgactttttaaagataagttgtatgccttgtaatcttttatatcttgccatagggcctcatactggtctcaagatctaagagaaacacaatgaatgttgctatcttctctctttggggtcttttattattattgttcctaggtctcacacagagtgatataacacaaataccaaatatatttcttggattattattattcttagaaaaaatactcatgcaaatgaaatcttgagataaaagtaatcttataaaattatttatgcaaatattgtcccctggctgatatatttccatggagtgatggatgaaagtcatctctgaagaacacttggtctatagattgtttcatatttattaatcccaaatcttatatagtaaaactgatgtgaaattaaaggttatgagaatgctgctgagaaagttggctaaaatagtttggatgccattttactgtatcttaaaaatgttatgttaaaataaaataaaaccaaataagcttataaatttaggaacgttttattttaaattctaaaattccctgccttgactttatagtgctaacaaatttgctctacagcataaacaggcatgttctcatcagtttagctgtacactgtgttatatagggcaggttataatttttattttgttcctctgactaatgccgtagtacttagtggttgagacatagaatttgtttataacctttaacactgtgtaaagttgttttcttcttttttttggcagaagtttcttttaattataattttaaatgatttccttttcactcaccaaagcaatgctgtaaaaacaagaaggcaagttaaataataaa

SEQ ID NO: 14278 - DNA, 1034 bp, Homo sapiens
tggcaactacttcctcctacctttcatagttgttggaagcagagcgtctcagcttttactgtgcataaaaattgcctggggattgtattaagatacagattctaatccagtgggtcggggagatgctgcctttccaacgtgctcccaggccagttgatgctgctggtctgaggaccttacctggtctcagcactgggtttgtcattcttcactgcacattgcagtcacctggaaagctatatatagaagctaccgatgccaaatctcatccctgagatatctggatttaatgggtgtggtatgagatttgggtttggggtttgctgaagttttccagggggttgtaatatacagaaacgcttgagaagtaccatgtggtgttgaaacctggttcataaatccccctagattcttgatctcgcttgctcctgctgagttggcccccagccacggttcaggttgtgaggcctgatacaagatctgccatccaggaacctgtcaaattgagacttagagactccgactattcaattcaaggccttacaatagtaatatcttgcctatggtggtaactaagccatcatttttgcccattgttgctattattgatgttactattatttttatctccaaatctctatttgttttttccaactaaaattatgactcatgtttatttttttaaatgaatgtataatagtggcacaagtgatattttgataaatgcatacaatgtgtaattattaaataatgatagtggacttatccatcacctcaattatctttttttgggttgggaacattcaaattcttaacctttagctattttgaaataagcaacaaattattgcaaactgttgtctctctactgtgctgttgaatactagaacttactccttgtatcgaatggtattttcatacccattaacgatttgtcttcatcctcctccatctgacccttcctagcctctgggagccaccactctatcctcttcctccatgagatctacttttttagcttccacatatgagtg

SEQ ID NO: 14279 - DNA, 1053 bp, Homo sapiens
actctcagtgctgactggtcagtgctagaagggctgttaccaagagcagggaagcccgtttttgtgaggcaagtttgctgcatcctgttttccccatagtgtgatttgctgattgctgatgcagggtaagaaaccaagaactcccagaactcaggttgagagtggctaccaagagtcagaacgagcatctgaacttactgcaacctcttggagtttgggagcaaaaacctggaattgaattttgctatgatactcgggaatgagaaattaaaatcccagagaggagaaaagcacaaggaaataaagtcaatacatggtgccggttttgccttcagttatttgctgattaagctgctcagggcagaagtctaagaaaccaggcacagaacagctggagagtaaaacagggatttttttttttttttttttttttttgtctcccagtatttgcatggtggtagagacagagaaatttgagttcataacttgcagaggagaatttgtagaaaactacccaggctctctgttgtcaaaacaggacaagaaaagagataaaaattgtattaagtggataggataaacaggttgtaaatactaatatagcatacctaaacccaaaacaattgggtgagttaaactgattaaaatcagtaaaacatataaatagtaacagcattccatttggcaattagtaccaaattggataaaatcttcacagattctggggatgaaaaggtgaacatctttgaaggtggggacattattctggctaccagggtcatcaaaaacatgcacactgaaaaacactttgatacttctatatccttcagattggttaaaatgaaaaggacaatactaagtgttggtgaggatgtggagcaactgtaactgcttgtggtgttgtcagcaatcactttgaagaacagtttggcagtgcctattaaagccaaatatatacatccttaagactcagcaacttgactcctaggtacattaatgaaaatgctcacatgtatttatagcagcattatttataatagtctaaaactggaa

SEQ ID NO: 14280 - DNA, 1072 bp, Homo sapiens
aaatctgtaaaatgtaactcattgattaaaaaacaatactacttgtttttatcatttgtagctttttgtaatacacataattttgaaacaaattactcttttctataatcttcaggtaaaaattagggtagctttttaaaatttgttaagctcagttttaaaaaataaatgcctaggtagatcagttttgaaataacatatattcccccatttcaaatatgtgaagaagctcaatggcttaaaatttggaaaatgtaatatttaactcagttgtttgcattatgtaatgtttactatacacccataatataaatattccttaattatatttaaagtaattcctttttacatttttctcctctatttatttatgacaaattgaactcagatattagtaacttgttcaggccatacaagttgtcaccggaggacattactaattctaaagtacataccttttttaatacaaaagtttattaattttaagcagcatcttatgttattaaggtttcatgggattgttatgtttgcaattctgcctttgtagaaacaatctatatgtccatcagtaggggaaggtttaagttttttttttttttcgataaaacatagtacaccatgcaagaatttaaaaggaatgaactggagctgcaagtgtcaacatgatgaggttcttttttgatttagtagaatatttttagtgaaaatgcatcttgtctgtatggtaaaaaaggacaaaattttgaaaactaactctttactgagggcatagagtgagggaagagacaggatttattcatgttcttgtatttttccagggaacatcctcatcttatgcttcctttgcatttaattccattttcgttttgttttctttaccaacattttggtgattgctcatattattatatataaattacctcaatctgcacagtgattcactgattacatataatatcatgtatttaaccagtctctttaggatatttccaaacttttgatttataaataaagctacaataagcattctagtatgtaagtctttacccaatgagtggtaatatctgtaaat

SEQ ID NO: 14281 - DNA, 1012 bp, Homo sapiens
aaaatacctctctgctaagaacagcagaggcttgattatatttattggtgttagatgactagggactaaaataaatgattcctcagtgtaaaagtaggcagataattctattacctaattttctctttcaacagtcaggaaactttcagtgaatttggtccctgtagggtaactcccaatttccttctccccctacgataaaacaaacagaatatgagagaattcgtttgttattggactaacatgaaaatacacaacttaatatacaaatttaatgtgtttaatctaatttaatgtggtaaaataaagcatagattgtttttccttcgaatgtcatgttcttacaaatacttaaaaatgttcatttttgttcatggtagtctaaaactaaaagcaacacataaagataccaggagtgttttaccatcttttctgccattgtttatgaatgaagtgtccttcaacccccgtgtatctttgttgaaacatttttggcagaagttatgaaaaataaataatagcaacttagaacatagaagagactgtggataaattcagattccagcaatttgaggcaccaaatggcacaatgcttctaatcattgatgtttccatattgtgaaaagagataatctaaaagtaattccaaggagaaaggcctttactgataacataaggatgattagtttgttggcacaggggcaggcagaataaaatggaagtaaaatctcactcctggaatgttgcagttgaaacagcccatgcctatatccgaacaatgcctaatgagttagatgatgaaatttgggagttctgagctgacgagtcttaggattttgagttcatgctgtaatggtttgagatttgggggatattaggatgggattggattcattttacatgtgggatgggcaccatcctttggggctagggaggctgacttctgtgtgcaaaataatgccactcaaagatgtccaatcatgaatttccaaaagttgtaaatatgttgaat

SEQ ID NO: 14282 - DNA, 1032 bp, Homo sapiens
tggcattttgtgacttctttctgtttcctaattttaaaaaaatctttaaagaacatcaagttttattcagttaataatgtgccaaagactgcattgatatggttaaattcccaggaccctctgttctttagatatggactaaatggctggcatcatcacttacaaaggtgtcttgaccttgatggagctcatgttgaaaaataaagtttatctttttcatttttatcttttaattttatttttcataaactttttgaagtcccctcatattattcggtgtccctttgtatatttttcttttatttccaatatttttgaaagcatttaagacaacttacaagacacaaacatgtcaagatgagataaaatatgaaaaataatataaaagaacaacatatttcatagtaaagcatccaattatagtttactcagaattgagagcagaaatggagagggggaaatatattttctgtagaattaccatgccatgaaatactatatatttattagacaggactgacaaatttgtctttaagcttcattgtagcaaaagctaatatggaaactggttaggtacaatacttacagtgcctgtattgtaaaaaacaaaaacaaaactattgcctaagagtaagaactatcatgatactgacaatgtaagtcttctgttgtctattgtctaatgcctttagagacattctcaacactcctgaaacaaacacaatgataaatctcattggctgcttgttaaagctccctttaaatattacatgtagagtatcagtgctaagtataaggaaaaaataaaccttgagtatagatgtggcttctacagaatatcagtgctaaatagaagaaaaaaattaatcttgagtacagacatttcttctacagtaagaaaattggaatgacctaactagtcaaatgtttcccttacaatgatattagggagttcaaagctaatttttttatcctcttatagtaaccattatatgtttgcttttaagtaccatattgtctgttggaaatttt

SEQ ID NO: 14283 - DNA, 1022 bp, Homo sapiens
ttgacttgtattttaaaattatatgaagtaaaactttttagtgggggtggtgttgataggatctcctcttataggaggatttggtgacttgaaggatataaatattttcaggacatatcagcatttaatttttagtgtgtttatgggtattggggttctcataaaatttatattgactctccaactttaaaatgtcgtttatggtaattacatacaaggttaaatacaattaaattgttgggtatctgtttattaattgagggtgcatttattgagcaattaaattaggtggaaggagaattgggatcaagatgaaactataaaaatctaaaaaatgcacgagtataattatttgaaatagtgtaattgtttctatgaggggtcttcaaaaagttcgtggaaaatgcatattatgtaaaaagctatgcatggttcaaaattgtttttcactaaaagaaactcatattaacttgctctaacatacctgaacaggatctagtctgaggcactgagaatgataagacatcagtttgaaaagaaccacatgaatctgctgaaattgaagcacgaactaataccaaatttatggcgaatcttggatcaaaacgtgaaattattgatactttacaaaaaaattatgggggcaatgcttcaaataaatcagcagtttaacaatggataactcattttaagaaggaatgagatgatgtggaagatgagcctgcagtggcaggccatccacatcaatttgtgaagataaaattaatctcgtttgtcctaattgaagaggaccacaattaacagtcaaaacaatagtcaaggccatagccatctcaataggttcagcttacacagttctggctgaaaaattaaagttgagcaaactttccaccccgtgggtgccaaaacggtggcacctatattagctgcagacaaaaagagaactttgaagggaaatgttaaacaagtgtaataaagatccccaaatatttctttgaagcattgtcacaggagatgaaaca

SEQ ID NO: 14284 - DNA, 1516 bp, Homo sapiens
agaaattacagtaaaaaacacctttgctatcaacaggaagctactcacattttaatatatattcttccaggcataggacagtcttctgaacaagaaatgttgcatcaacctaacctgtcctgcttcactactgtactgtgtgtgcacatttttcatgtaattatttgtcattggttgttttatttttgtgggttttctggtcttgtatattaccatatttaatttattctccaaaataaagtcttttgttcacctatatgtggcaaatatttactttttaacttttaaagtatgtttttatataaaagttttaactttatgtaacgttcatcagtcttttgtgtagttgtttctacctttgatattagattccaaaggcctttcccatgcagcttatataaaactatgtacattgattttcttccaatcatttttacattactaatttaatgcagtgtaagagactatgcttatgagctatagatctgactctttttcattcttaaatgattatccagttgtcccagccccaactttgaataatccatctttccttctgcttttaaatatatttttgttatatgaaaaactcccctgtgtaattctttctgtttttatcatctgtattctttatcatggatctttctgcccatttatttactggtgccaatattttaattatgagttcacaagatatattattatcttaagaaagtaccacttccatgttcctcaaattttcttcactattttaagtacttattattcattgttttaaataataattttataaaatgtgagtgaaaattttatttacttttgttctactccattaaaatttgagttgaacatacaacattttcgattgataaggaagttgcacatctgagagattcaatgactgattcaaagtgacagaattaaaaatcaacagagctgggaaatgatcctaggtgtattgtccataagagaactcgaaaggatggagaagaggctagacaatggaatctcaagacccaaaaatgtcttgactggctgtgtagttgaaaatctcacttccaaattttaactctaccagcactgggtattactcttaagcaagtataggagaccttgcttaacaataattttcagaaaacgtcttagggtttttaggctgtaatctcaatatgagcagcactgtgccataaatgctcctcagaccgtaacaaggaataccatcagtggttgtgaagaatattgaacagatctgggccctgtaatctagaagagctggtaagaaattatacgtggcccatgggatattacaatgatagtaaagagtctcaaaacaaaacaaccaggctatgtctggcctctgtggatgtaacaccttccatgtctcaggagagatgttggacatttacatactttagttcatttactattatagcctcgagaaaagatagtcttatcactgatttccataagaaagggggactgaactctagcccatctttctgagaggtctcactta

SEQ ID NO: 14285 - DNA, 1032 bp, Homo sapiens
tgccggccatacgctgagcacacagttcatccctcccgttcaccatgtcctcctgtctgtggagttcattggaaggaaaaagaaagcttgtaaagtgcaagctaaaagtaaatacttcaaagaaggtcactgacttcgcaaatagtctagccaggataatttttccttttgacacacaaaagggatagactttaagatttctgtacttgtttatggcctggttattaagaaatccaaaaataaataaattaactgaaaagattttgggccatggctttatatagaagttttttcaaaatataccatggcagaaatatgctatggacgtttaaaggtttcagaataagaagctgcctctctaaactcaagtatgtatattctagaaaattcaactcaagcttccttcaaccatctgaattacaggtctctactattttgttttgtttgcttgtgtttgctttcattatctcacaatctgcattttaattatttacagtataatcgcagactatagatacattgacagaataatatgattgaaaaaacaataggtggatgataaaaaattttaaagcaatattttgatcatactttatgttttttgtctttcatttctcacttgacagtttattatatctctacatgttctcataagaagtgattttaatgtatgtgatattccattatgtgaatttaccatgacatattttattctcctgtttctgaacattaaatttagttttgatttttaggtattataaataataatgtgctcagcataattgattatacattctatgcccaattctaattattcctgggacagaattttaggaggagagttacaaaactgtctaaccttattaaggctcctgatatttctgtttttctcaattgtgtttatacacatttacacatctgtggcttcagaagtactattggctgggcacggtggctcatgcctgtaatcccagcactttgggaggctgaggcagatcacttgaggtaaggagttcgggaccagcctggcca

SEQ ID NO: 14286 - DNA, 1020 bp, Homo sapiens
tgcttcgacatgaaccctggaatggcacagagatacactgtctttgacaccccctgtgggttttcccctgaaaaatctttcctatatagaaaaaaagaagtcttgttttattttattggaaaactgctttagaattttcattcctcaccctttttttctttttcctgttaagttctaaaaacaattgaaaagggctttgccatgcacatctgacacattttatactgttcaaaacatagttatatatttttctatagctggtatttctgtgattatttaaagctcatccaatttaacagaaatgtcatataatttgaatttagtaacgttaagcttgtcagtactcagagtaaaatcctaccatatgtccgtgtaaaaggtttttaaacttacagtaacatcaggtgggaaaaattgttgggaacacaaactctggggtctgcttcctaggtttgacacttggggccacatgtaatatctctctagccttggggaagttaatgaactattctgagcctccaccttcatagccataaagtgcacataataacagtgcctgtgtcattagatttaagtgaaaatgataagagaatgtggttaagacatttagcacacatttaccacatataaggcaatgcataattgttagtcactattataattaataatagtagtagtgtttagaatttttttagttaatattgttgtactttatttttaaaatgttaaagttctatgccagtattctgttgaggaatgttattgttttgaaaattaaatatatttttgcctaatttttggttttgggatttcaggcatttttcccagtgctgttccaaagacatctctgcactgatggagatgctctgtgtccatggcagccatgtgctacatgtggctactgagcacttgacatatggctagtgcaattgacaatctgaatttctaattttatttcactttttagtataaatgttgtgtgggtgatacttatacagagtatttcatctgagaaactga

SEQ ID NO: 14287 - DNA, 1034 bp, Homo sapiens
tgctgaaaactgcatcttatttatgcttttgataaaggtgtgcttaattgtgtcagccttgttacaagaatatgttagaggagcacagatatcataagcaaggatacgtgctataatagagagagttctcatctagaaccgaggagaatggtattatttgctcattctctctacctgtgttattttattctccaaaagccccaaataaaattcctgtgtttaaattaattaatcattttgggctttgaacaagcacaaaaattaaattaggtaggtgtctaagtaggaaggaataagcaaaatcatttgggtataaaaccatgaatctgcctttaaagggatgtattaacctgttgaaaaaaatacatgacaggggagtcactgaatgttttcttgtgtcacagtgactataaccttacggtcgacttatgtttgtttgttttaatgcatattggtttctacaaagctaaatttatgttataaaaattattctactttacacatctaaagtaatgatcactgtctgtcaactctctggagcactagtttttctctgactttgagacataggataggtgcttttctgattttaattccttctattttaaatatagttataggttctatatcatatctgagaaaactgaggcttagagggtaaggaacttcctcaacgttcaagttagttgaggagtagaacctataatcagaactgacatcaggccaggtgtggtggttcacgtccatcatcccagcgtgttgggaggccaaggtggatggatcatttgaagccaggagtttgagaccagcctggccaacatggtgaaaccccgtctctgctaaaaatactaaaattaaccaggcatgttggagcatgcctgtagtctcagctactcaggaggctgaggcaggagaattgcttgaacctgggaggcagaggttacagtgaacctagattgtgctacagcattctagcctgggcaacacagcaagactctgtctcaaaaaaaaaaaaagaactgacttcaaaataa

SEQ ID NO: 14288 - DNA, 1062 bp, Homo sapiens
aaggcataattgtttttgttttgtcctcagcagagataggtagctaattcaccctgttttttatgttataatcctggctttggaacaaatcatagggataattttattactttctcactgtgcttcttcctaagccagtattttgtttatgtctaataataatcttgtgatcaatgacaaatcggtattgttttctatttatgcatcactgtgtaagcatggtaaaacttggactattatatacatatatatatatatatgtataaaatctttagacttagcatatgaaccttttgcagctcattgcattagacgatataatttgccaatatatctaaaagcaagtgcatacatctgtgtgcacgctgtctcacaagtactttgctggttctaactgcagtaaatgattttcatttctttcaattcaagtttgtttttaaaactctcagtaatgactgcatcctgcactgagaattcattgtggcaaagcacatctgtactgcacatttgtgagggaggcgggacatgtagaagttaatagtatcaacttcttcgttggacaaagctacatttgggtcttgttcccaccaatttacagtgtcttgagattacatctgtctgtcttgggaagtacctctgtacttaagagtacctctgttttcttgtatatcaaagggagtaatatatgtactttttaatatgcctgatataaagttgaaatgagagaatgtatttaaagtctggcacatcgtgtggacaaggaggcctagaatttggaagaacatatttccataagttatataggccaggcatgacactaataatagaaagactgattgaaattctgtttgcataatagtgagacaaacaggtaatgaagtaaacagacagggagcattctttcccctttcccacactctctcccaatgtaacctgtgaaatagtgagctagagaaattgagacgcagggcatctcaattctaaggtaaagtttagaaatgaaaacatgatgaatatatcatattctacacactgaaaggtggggttccctgtcctcttatt

SEQ ID NO: 14289 - DNA, 1085 bp, Homo sapiens
ctgtgaattgcccccttttgaaataaaacagatacagaaaaattactgataaatatatagcacatatgtatgtgctggttactttcagctccattttatcattcttttgccttcatactacatggtttactaagtaaaacagagactgagttgccaaattgaggtaagagtataatagcacaatgttaagaacaccagtttgtaaaatccactcttaaatctattaatgtgacctcagatgatgatataatctctttatccctcagttacctcatctatggaatgtagataatgacagtgtccaccatacaatgctattgtgaggattgtaggaaatcattcatgtaaggcacttggcacagcacctggcatgtagtacacaagccagaaatatgagccatatcattacatgttgatatcattatattcagtaaaaaatatcagagcccttaaaacaggatagaggggaagtgtaatgaattcagaatggaacaatgcccaagtatatgattgtgttctgaaagactaaaaaccatttgtttgtgttcatttcctgcagaggataatccgtatgtgaaatgttctacttactgaagggagagggggcttagaagaacataattaaactaaaagatccatttaagagagctacttccgaagaaaatttgctgctgctttgccgtagcccctgatgtgtggacgtggttctgacctgtggatgtgggtcaggaaggcgttctctggagctgcaggcagggacacctcagctctgaatgtcctgttctggagccaaggagaagggctcgctccccagtgtcaggttaacatgctggacacagtccacctccagacaggtggaaaggaaacctggtggaccctcagactcagtgtctattttccttgtgggttagcgaagtcagcttctgtctttgataatacacaagagaaagtcttttgaatttagggaatcaaaccactgcagctgttatgaggcaacaatttgaaaagcttttgtagactgtctactgaaagacagctctgtaccttttcatacacgcctttcacactgcgtgacatttcactgc

SEQ ID NO: 14290 - DNA, 1050 bp, Homo sapiens
taaacactttcaattttgtttcttcccttgctacgaatagtaactcattgttaatatccacatttggaatagcactactgtttatggtataacctggttaatttttcaaataattcaaaatatgaaactcaggtgtggaaaacgtaggtggagcatgatgtcatggatacggcacctaattttttagaatttctgtgcaggaaaaacaatgacacaaacacatctgtatcaaactcataggaaataaactcttaagtgtcaaaacagagcacaaacaaaagaggaaatgctctgttcagattaaaaagtttcccaattttatctttctttttttttttttaataaagcctcactctgtcacccaggctagagtgcggtggtgcaatctcggctcactgcaacctcccaagtagctgggactacaggcatgcaccaccatacctggctagcgtttatatttttgtagagatagggttttaccatgttgcccaggctggtctcgaactcctgagctcaaagccatctgcccacctcgtcctcccaaagtactgggattataggcgtgagccactgcgcctggcctggtttcctaatgttttgagaaaggggtgccttagggggatttcatagtgtcaagtctcatggtgtgaagccaggaagcagaggccaacaagtgatctgaaggacagcagcgctgcagcttgtgaattctaagcattatacaaatgcacttatgtgtcatattcaaccataaatggaatctttgtcatgaaaaagattctttatatcaacatatgtcatcacaaaagagcttctttctttgataacatacaagtgaaagtttttgaattttgattttctattcattatatggtgaagtcaactgaaatcagagagttgaagtagcttgtggcaggcctcactggcagtgaaagctaaaagcaggactcacatccgaggcttctcatgagcccctttcttctcctctgttatttcttttccttcatctattttcattcttcttatttaatcgtttaataacacttctct

SEQ ID NO: 14291 - DNA, 1127 bp, Homo sapiens
taatttcaacttgttcaagcttgaatagctacaagtagctattggctgccatattagaaagcgcagggcctggttcagagtaggggtgaaataagtatttgttgagtaagtccattgaaacccagagttggatctacatcacactggcttcaaagactgtgttctttcaactacatggggcagctattcaccagtttcacacaactctttgtttggtgctcatttaaagctctaaatactcctctcaagaactgccttttcctcatctagtccacaaaatccacctattattttttctccttgctcaagccaagctgagatgattttctccccaggaaaaatatctgaggacacagttcgctaggataatcataggtgtggtagccactaggtaggtggggaggaagtgggatgagagtcttcttcctttaatgaggcaggttctgtgggaactggtttggtgcagttgctgactgtgatggtatgacgaggattctgacttttagggactactccccgtaagtccatgacaatcttatccggaactgcataaagcattataactgagcttctgagacagagcaatagggtcataacagagagaaagaacatcaaggtcagaaatctagagtgggaaagactctagaaggggtcaggcagggagacagtgccatcaaggacacatgtttacagcagcagggctctcgcctcgggatgagggatacgcattcgctgaagagacacctggtttccaatctggttccttgccagaatgtaggaaccaaaagccaaagccagttttatcagctggaacaacagcaggtggagggctgggtctaattgagagtgagtaagcttagtgagcagcactgtggaccagcgagttggggatctgaaaaaagaaagagctaaaaattacttggcgaagaaaaaagaaaagttgaagcagatctagatacattatatcccaatcatctctgtgccctgattgtggctgcttcagtaactaagatcaggaaaggataaacagaggctaagattggaaatttgggatggggagaaagagaaggaagccacggagggtgctgccttactttccccactcctggctttcagaaggtaaaaac

SEQ ID NO: 14292 - DNA, 1928 bp, Homo sapiens
ttgaagcagacaaactgaggagaaaaatcatttcgtaaatgaacgattatattctgggttttatcaagatattttacaacattaaaaagaaataagataaaaatcaggattatgtatttttcttctagaaggtgatttcttttttaatcatttttttttgtattaggtaaaactttagcaatatgagttaacattgtgaagcaggcatgaatttcaaagtaggaacaataaaagtgaagaattaaaaaagagcaaaatttgaaaccttgacaaaagcagatcttaaaagggaaaagcaactgatgcagaagtgtttggaaattgagggtaaaaaaatagtcttcagtttattcattaaaaaaatggaacaagcttcctattttcatctttaatcttctgtgtgttctttgtaagcagtattacgtctttgcaaattaattttcatctttctcctgtgaaaagatgaatcccttattttaacttaaattatttaggttaaaatttaacttggaacataactttatcaatgtagaaatcaaatatttgcatgaaaaaattaaagaatattgttaaatataacaatatataagaatatttgggctctttgtacagtttctcatgttaaaattagataaacaggatgaaatgatttatctaactagaaaaaattaggtaaaagttgtaagctagacaacagtttcactccgtgatttatccaaccttctttaacctgagttggaccttttattttcttccttctccacaagtctacttcgtttgcatgtgcgctgtaagaggtcgttaagaaagtttatcgggccctattgccctcagtcatatgttgaatcaaacacttcttgtttcagtatatagtatgcactggcctgcaatattctctcctgatgactttttcttatttttattgttttccttttagcccccaagttcagtatgataatcttttgtacttggtttaaaaccctctttaaatgtcacatgctctcattcattcagcaaataattattgaataaaaatgtgtgtgtataccgtatgtgtgtgtgtgtatgaattgggtgataagactatgaagttacataaaaaaatgatgggaacacaatttagacagggtagtcaatctttgagcttgccaggtcttaagtgtataatgcaagccaggtcaaacttctaaaaatagaactcagagtgtagaccacaccaacacatctagaaattggaatctcagggcaaaagatatctagaaaagtcaggaaccacaaaagcagcaagggattctggtactgggtcatcataaacatgtatcccaggaatcgcatgctcagtttatcatcttcttggggcccaatccgctgactgaatgtgatgaatgaaggcaataattaatcaggatgtatcccaaggaatttaagatttggatgtgaattctaacgagatggcttttaagatattttttcagttttgaaaaattctgataaatacgtggaaaattctacattttctaattctgaattgtgtaatagtcatgatagcttctgtttagggcctgcaccagcattgtgctcagagccgccatgtacagcaatgccttacgcttgggacccaggtgagagggaaggtgcgcgctgaaacccatccatgtggtgacaatctgagctgactgggctgagtgctttctctgcagcatctgtgattcttatggcaactctgaagtcacatttgattacttccattttacagatggaaatgaggggtggagaggtgccctgaccccccacgagtggagatagcccaggtttgatttaaggtctctctggatccaaagcctttctccctcactgtcctaggagagatgtaggcaaccgttttcagaaggagcgtggtagtgttgctaggggcccgctagggaggc

SEQ ID NO: 14293 - DNA, 1029 bp, Homo sapiens
tctttttcttttttatttatttatttatttatttattttactttaagttctgggatacatgcgcagaacgtgcaggtttgttacatatgtatacatgtgccatggtggtttgctgcacccaccaacctgtcatccaggttttaagccccgcatgcattaggtatttgtcctaatgctgtccctcccctttcccccaaccccctgacagaccccggtgtgtggtgttcccctccctgtgtccacatgttctcattgttcaactcccacgtatgagtgagaagatgtggtgtttggttttctgttcctgtgttagtttgctgagaatgatggtttccagcttcatccatgtccctgcaatgaacataaactcattcttttttatggctgcataatattccatggtgtatatgtgccacattttctttatccagtctatcattgatggacatttgggttggttccaagtatttgctattgtaaatagtgctgcagtaaacatacatgggcatgtgtctttatagaatgatttataatcctttgggtatatacccagtaatgggattgctgggtcaaatggtatttctggttttagatccttgaggaattgccacactgtattccacaatggttgaactaatttacactcccaccaacagtgtaaaagtgtttctatttctccacatcctctccagcatctgttgtttcctgactttttgatgatcaccgttctaactggcatgagatggtatctcattgtggttttgattcttatttctctaatgaccagtgatgatgagctttttgtcttttcatatgtttgctggccacataaatgtcttcttttgagaagtgtctgttcatatcctttgcccacttttggatacagttgtttgtttttttcttgtaaatttgtttaagttcctcatagattctggatattagccctttgtcagatgggtagattgcaaaaattttctcctattctgtaggttgcctgttcactctgatgatagtttcttttgctgtgca

SEQ ID NO: 14294 - DNA, 1160 bp, Homo sapiens
gtttctatacacaaatacttaccactgttttgccgttgcctaacatattcagtacagtagcatactgtacaggtttgcaacaggctataccacaccgcctaggtatgtagtaggctgtaccatctaggttcgtgtaagtaaattgtatgatgtttacacaatgagaaaatgttccatttcccagttcatatcctccttcttaagcaatgcatgagtatctcttctgttcttatgctttcctcttccaggaaatagatataagttgtgtcctagcaacaattttttgcttcacataatatctaaagatatctaaataaattaagattcactaatgactctagtggcttttaatgccatgagatattcctactagttctttctgtcattggtttattttcattatgtagattagaaatgaataaaaattacttccttattttacactaatactaataaatgcctctgatttttagagaactgtaatagatatatgatgtgttactctctttgactatttgtataattttgttttttaaagatacatctagattaaaaactactgttgtaagctgttgaaatcttccatatggccaaaattctgtcactgcctatagaaattccaaaagaagaaaaataactaagatttaagccattctgaatacacaggggccctcacaattgttacagtgtgaatttactctcttgataatggtggtcctggagtgtccagagaagaaataggtggggtctgtttaggacaagaaaaagaaagtgcttttgcaatgtgctgctgtcactgctggagcctctcacttctgcctaggttgctaggctcagactagacagtttaagtcggcataaggcataaatgctaaaatgttaataatggattagtgatactggcacttttttttatcctactagaataacttactaacctaaagaaatgtccgatatatttacaggatttgagtgaagattcttttaatccaagtgtcccttcttttccagggtgccgatttatttcatacattctttatattaatccatgaaattagcacaatatgtttacccacaatggtgccgtcaccccaaacctcttacctttttctgaacttccttaaaatcattaacttaaaaaagtcaagtttctttttacc

SEQ ID NO: 14295 - DNA, 1419 bp, Homo sapiens
tgtatgtatttgttactatattttcctgatgaatcagtgagggtcaatatcagtaggtgagacaatttgttcaatgtatagatcaaaaactccgcagccagattttatatacacatgtatataatatataatattatatattttatatgttatatatgaatttatacatatgtaatatgtaatattttatcttaattatatatttatatattatatatgaaaatatgaaaaatatatatatttttattttgctttaagttgtgggatgcatgtgcaggacgtgcgggtttgttacacaggtatacatgtgccatggtggtttgctgcacctatcaaccatcatctaggttttaagccccgcataccttagatatttgtctcgatgctctctctccccttacccctgaccgcctgacaggccctggtgtgtgatgtttccctccctgtgtccgtgtgttctcattgttcaactcccacttatgagtggaacatgcggtgtttggttttctgtccctgtattagtttgctgagaatgatggcttccagcaaacatgctctttgattataaaactgaatttcagttttctcattgaaaattatactgaactcagctgggcgaggtggctcacacctgtaatcccagcactttgggaggcagaggcaggcggatcacgaggtcgggagtttgagaccagcctggcaagcatggtgaaaccccatctctactaaaaatacaaaaatgagctggtcatgctggcaggcacctgtagtcccacctactcgggaggctgaggcagaatcacttgaccccaggaggcagaggttgcagtgagccgagatcacaccactgcattccagcctgggtgacagagctagactccatttcaaaaataaaataaagaaaattttactgaactcttttgaaaatgtattgatttcatttctaagtgtccttttattgacccattctaagaatgaagggggaaagtttttaataatctacttttattacacaaagtgatattgtagttatttctttgtttattctcagggtattaattatttgatccaaattgactgttagaagaatgagaaagtgtctggggacaagggaacggggagaaaatgggttattttgtgaagtccaggcttaagattggaatcttatgagactaacatagttgttcaattggaccaatggatttaagatcatgagtccacagaatgcgtaaatgccacttagaacaggaagtggtgacctcttatccagaagaaacttctcataggcatgaatcaatatcaattgggggaacattctagaaagtgttttcggtcacctccttttctggcaagacataaatgaactggatatcctattaataattttaatgggcattcccaaaaatgtcacagttattc

SEQ ID NO: 14296 - DNA, 1029 bp, Homo sapiens
actcactcaggattactagaacaacatgggagtaaccgcccccatgattcaattatcccctcctgggtccttcccaggacacatggggattatgggaactacaattcaagatgacatgtgagtggggacacagccaaaccataacaaacttgaacagagagatgttcactgtaggtaggttggttggtctacaggaaatgatgttttagatgagacctctagaataagaaagaggcagcacatgaatagccggggtggtagtgatccatcaaaggacaaggcgattgcaggagctggccatgtgacccacacattttccaaaggctaaggcactggatcccgctgaatgaggggagactgacttcccatccacttctcgtgctgtttcctgagaacatggtgcaccattacttaaagaaatcacattgtaaacatatgtaatggatattgatggtatcaacttaatttttaatgtatgattgttattgttattattagccacataagaccaaagttctgtagggatgagtttgagaactgttccttacctcaagcttgtggtcatagctatccacgtccatgtctttctggaaacttgctctgtttttccttgttcattgataaactagagaataacccattttcaggtcttgggttacttttggctttaagttctctccttcagaggtcctcatgagccaaattatctcagccagtttctcattcagtcactcttaattgtaccatctgggtcctggagctgactcctggacctggctcctgagttgtgtgttggtcctacacctgtcaattccaactagacagtataccaatttctaaatgcagtgtttcagaaatgaacttagaagtgctaaaagttcccttgtattattgcaagatatttctcttcccgtttatagtaccatcattttctcagtgttaaatacctgtcatcattcaagctttctcacctgattgctcctacatacgatagtgaatgggttaaggtaagtactcagtaggcatttc

SEQ ID NO: 14297 - DNA, 1045 bp, Homo sapiens
tgtgttggctaaggaataacagcagtttcaggcaacatactagaactgctaaagacatttgtaatcatttaatccaacaatcttaagaacattttttgaaactcagctagggggtgtctataatttgactaatatcacaaggctagtgcaggaaacacaagagaccagtcccccttcttggttcttaactcttgatccagtgcttttcttctgtaatagggtcaaccttcattcttcttctgtgtcactttctacaggtgcttcaaaagttatttaaaacaataaaaatatctgggttattttgtttctattttgtttaagttttagttgcagttaaaaatttgtttatgtaccctctaggtattagtgctacagaccttcctcaccgtggactggaatatctattcgatcatgtttgctaaggaccttttattcaaattgacaatagttctaactttcgtgttgatactggttgtgaatatcagtgcagtagaatgaaaaacctgtgtggtagagtcgtacgttcaggactctcaaagtccactgtgtgacagtcacggtgagatgaatgaaatatataaataaacagatatttttggttaattctttttaacctagagtttcatgttaaggctttcactcttagacacttgaatttgtcttactgttgagagtttaattatgttataccatgccaaaaaaacctgtataaatttaaagtaagaattttttatgtttcaataaaaatatcactttcatagaaagcacatttcttaagctggcatggccagcatcttgtgtccttgtagacagaccttcttgggaaatcaaattatataattcaaggttgttttgaggtcatgtcaaagaagaggaaggagcgtaaatcacatgatttctatagattcaggtgctggactccactatagggctgcacctatctgtcttttgtcctctttctataatggttaattccaggctgagaaactgcatacatcttccaattggtcaattctttattttaatatattaatacctttggcta

SEQ ID NO: 14298 - DNA, 2882 bp, Homo sapiens
ttctattcctttctgttttttatacgtataattatagattcactattagaaaagcacaaacaggtttacgtatgtcctggcctttgtcaattatctaatgtccaattatacaatgacttacttgagtttccttcttgtgctgagcatttacttaaaaggtgatgagtttactgtgaacaaattattaagagtctgtagtctctttggaagggcttagaaataaactagattgaccttcagaaggaactttttaagatttcatatataagtgaaataatgtagtatttgtctttctgtgcccaacttatttcacttataataccctgcagattcatcttaaatgacagcatttcctccctttttaatttgctgaatagtattccattattccattacacacacacccacaccatattttgttctatccatttatctgtcaatgaatatcatgggtggtgatgaatgtggtaatttgatcatgatatttattatacaatatatgtataacaaattttcttgtataccttgtgtatatacagtctttatttgttaattaaatagtttaaaatttcaaaaaggaattctgagtctcaataaagaacgttatcttattaaaccataatactcatgtgatagccaaaatctaaatgttggctaatacaatggtgaaagacagaaaattcaatgaattggcaatctattgtagaagaaaggaaaatactattgtgtagtttttgtaatggatatatcattcaacaggtaggcaaggcatctgacatgccaatatgttactacttttaaattatttaatattttctgtttcatgtgtaccaaataaaaatgatgcaatcattcccccatatattaatgtttttctaaaacattaatataaatattaatatgtttgaaatttgatagaatactaaaaatgaatatgctttgcaatatgtaaaatttatattttattaatataagcagaggtaaaattccaagcaccttgatgacatgaatttgttttgatattattttaaattttgaatacttataatatatgtgtgtgtgcacatgtatgttgctagtagtcaatagtaaaacattggctaggcttgggtttcttgtaagtctattttagggtaagcagtcggttacagaatgtaaactgtataaatttctgtgttacattcctcatcatgatttagcatttcagacattattttacagccattattttacagtagtatcttaataggccttcaatttgtacacgttcagtgtcattcagcaggtaatatatatttgtatatatgcagcagaaaagtccattaacattaattaggtctgttttaaggaataactaatttgtttagttcagtaaattgtgcatgtatgcagtgagttgacctaactttttaactgataaaagtttttgaagaaaaatagtcaagccagttagttatttgtgtttggtccgaacaccagctgtttgacatcatgtagctataactattttacctgaatgatattctctaacactttacaaggcacaaatattcttcaaggtcagttttccattatttttaacacagaaaggtttccataagtgcagaaatgtgacttctgtttacctctaccgtgggcaaagctatgtgaaatatcattggaacacatttggatgttttgttgtgagtcttacgataatttacccactccaaaaagggtaaggcaggtcactcaactgaaacctcctatgcctacaaaatagataattttctggaaaagcagcttttcctccttagtttgcactggaggaaatgaaattgttgctttaatatgcttaatagcacattgcattccattttgtagttgaaagagattaatcaatttctggcctgttttatcattcagtcaagaggcttccaaattaaggtttccacctgtccaactttcatttgtgtacaccagaatggagtctttaagtgaagctttctatgttgtgttttattttggccgggggctgtgggggcagggttggggagggcagttggaggttagtgtactttacagagcacatgaaacattcagttatttcaactttaacgtctattagtttcatagctaaaacatttctttcaagaagtttattttccaattttggtattttattttagagattttagtgtaaagacattttatagcatctgctactcttcactagaattttggattaagtgactgtagcgtactgttacctgttactatcacatcatgacttgtgggtttgtttcatttgttgctcttctttgttttctttttttttttcatgttaataaaatccaacatcaattataatttttctattttttctttttctttctcaatcttttaaaaaactaactgcatgcttttatatgattcactttcattccaaaacacatccagatataaaatttcaggaaaattgtaatatatgtggatttaaaaatggttatgcagctcagttgaatatgagttaaacattgtttacatagcttcctgtattttctgagaaatcatttcccatggttactgtaggcaacaccaagatagacactcgctttgacagcttgaagaccgtattccgtgttctggagtcagggacgatgccctgtgtggagctggctctccagaggtgcaggggacacactgagtctctaggtccgcacgtcccagtgtggcagccactgggcaagtggcgaccatgcactgactgtgaggttagtgaggccgaggcaatgctttaaatcattgcatctaattttaatcaatgaaaatttaaaaacactttgggaggctgaggcgggtggatcatgaggtcaggagatcaagaccagcctggccaagat

SEQ ID NO: 14299 - DNA, 1051 bp, Homo sapiens
ggtatgtgaaggcattgttcttgtcagtgttagtggatggaagtatttaagtgaatttagaagacaaatgtggaaagacactttttaaacttgttaaattacaaaattatgtgatcttacagtgaaaacatggagaatcattttctccaactttcatatgaaggaccgaaatgctctctacttccttgcaggttttcattcaggttttctttaaactcatgtgctgacagttttattcaactcctcaagacagattttggaaagttatttttaaagaaaaaaaaaaccatctagtgatctacatgtttgcccaccttgccccacagcaaaaacactttcattccttccattgagatcgattcgcagataattatcatgcttctctttggaattttgctaagctaaatgtgctcagattgttcagcggttccatatatggtgtgtgtgtgtgtgtgtgtgtgtgtgtgtgtgtgtgtgtgtgttcacaatgtacaaaaatacaattcctaggtaacctggtattccctttttggcttttgaatttaatggaccactaaaatcaaatcaaatgaaaggtttgtggatttgcattaaagacatcactaccatctaactaatctcacctttactgaataagtacaaaaataaactttacttaaaagtaggaagaaagtcatatcagaatgaaagagttcctatctgacgacttatttgtatcacacctagcaaacctaagcagaatatagtccttgtttttctcttttattccccatggattagagaaaatctctttattttcagctgcccaacatttggaagcattcttctatgtgacctctgttttgtcagtacctctttttagcacgtggatgggaattgagcacagcaccctccagtgcagtctctgccgtttgtccatgttatcactcttttctcatctgcaaccaaatggaaactcccagtcctgctgcatcacagatttatttgtaccattagctttttgaacctaaaagctacactttatatggatccttgttcaactccatctttt

SEQ ID NO: 14300 - DNA, 1034 bp, Homo sapiens
gtttattttatgttaaaatgtaaagtctctgccaagatttatgtatttatgttttacatgcatttgtgtatttatgctttatatatatatatatatatagccattaaacttatttaatatttagttgtgattgattcaaatgctagtctctaccctacatccttgctcttcaaggtggtgtttgggcatcagccacattggcatcaccaggggagcttgttaaaaatctagaattcaggtgtcactctgaactactgagtcaaggtctgaattttaaaaagacaccttcccctgtagatgtgaattaacatttggttttgaaacattgccgttatctttgggatgtgagagccctgtagaaataataatttagtatttttcttaaaagtttctctcttctagcttctcttccctgccagatggagattgcatgtaggagtcacacaaacaaaatataacaaagaaacattagacacaatgtctttagtaacctaggaagcaagacctcattagatactgtgaatataccaagctctgatatcagttgaagttggttctttctctttagtgacctctgtgtcattagttatcacatctgtctttcatgtagaaatctaaaggactgccataagattgtatgtaaataaaatatgagggcaaataagcttgctgaatctgcttttcttcactcctgaagtaacagggctcctggttctggtgttcaagattttctgttatgagacaaatgatgccatttgaaattctgggttgcctccaagtctgcggtagattgtagcttttcctctgcatgtatgtacatatgtgtgtgaagcatgtgcaatcaaacatatgtagaattaattctggacagctctgactgttttgtctatcaacatatgttcattataggagttgtggcagttgagaagataaatatataacagttcctgccttctgggcctctagaatctagtatgtaaaataaattaaacagaaataattttggcatgaaaatggaaccaaagagcttctga

SEQ ID NO: 14301 - DNA, 1058 bp, Homo sapiens
tagcagacatccatcgagactttccagggctcatcaggaggggtggtgctttccttctacagatgttcctccttgtgttgtctgtcctttctcttctctttcacaataagcatcatgttgatttttaaaatcttctccttctttgatccatggaagatgaattatttcttctccttaggcgtccagagttctctttgctgtatgcatgtatacatgtgaaaatcaaacatatccctctgaaaaaaaggagaaatctaccttgatgcaataactctgtacatatttcacaaaatgtcctgagcttggacagcaaaggctggcataacttgctaaggtttgcttgaattttatgttgattgcattcactttatattcctaccttatccatgaatggctgtatattggaatgaaaactaatttggtattttggtagaattacagattattactagatagatatttcacactgttgaatgttgaatgtgacaaaaaagttatcataacctgctctggtttcacgtaccctgaagaacaaggtgctgtcttgatgggctcttcattcccagcatgacacagctggaggatgggggggacaacatttggtaagaataacagattctctgggaagagatcagcaatttcaattaactaagtcccagaaaaaaaaaaagcaaagtaaatgccatttgaagatagctaattgaggctccaaacagagaggatggacagagacactgaacagtaaggtaagaacacagtaaggtaaggggagaacacagagtgatggctgatggattctgtgaatgttgaagactggaattagcaccaaacctgacaggtactaacaaaaccagtctgtctcttggactaggtggaatgtgggtctggacccgagagaaccagatgcatttgcaagaattcagagacacaagacagggtgcggtggcccacgcctgtaatcccagcactgtgggaaggcgaggtgggtggatcctgagatcaggagatggagaccatcctggctaacatggtgaaaccccgcctctactaaaaatact

SEQ ID NO: 14302 - DNA, 1118 bp, Homo sapiens
aaacatacgtgtgcatgtgtctttatagcagcatgatttatagtcctttgagtatatacccagtaatgggatggctgggtcaaatggtatttccagttctagatccctgaggaattgccacactgacttccacaatggttgaactagtttacagtcccaccaacagtgtaaaagtgttcctatttctccacatcctctccagcacctgttgtttcctgactttttaatgattgccattctaactggtgtgagatggtatctcattgtagttttgatttgcatttctctgatggccagtgatgatgagcattttttcatgtgttttttggctgcatagatgtcttcttttgagaagtgtctgttcatgtcctttgcccactttttgatggggttgtttgtttttttcttgtaaatttgtttgagttcattgtagattctggatattagccgtttgtcagatgagtaggttgcgaaaattttctcccattttgtaaaacctgtgttcatttctaaactctgaagaaattgctgtatctgccagtcaattgctgctgttcattattaatgttattggtagtattactttgtatgcccttacttgcgaaaaaggttttagtccattttcttccatttgcttatcagatgttaaagatgaagggaaagttattccgagaatgattccaattgttcatcctgttctttataaacgctttttggaaatctcacttagtagaaaaaaataagtctcaagatttagttcacattccaaattcttataaaagctactgtggattattaaccagtttattgtgtcccatcgtattagaatattttcaaatattatttctaatccttaaaatgagtctcacttctaggaaatatatttatttttattttgtgaaagaaaattgaaggattacagtattgaaataacttgccacaattatacagtatttagcatgtcagagccataatgttagaaacaaattactatccatttattgggtgcttattttgtgccagatactgctcaaagccttgtgcatgtattgtctcatttcattctcaaaataatcctaggaggcattggatcaatgaagtatcatggattccatttt

SEQ ID NO: 14303 - DNA, 1041 bp, Homo sapiens
ataaaattaaatttctgttcttaaaggcattgatggatgtattaggccgttcttgcattgctacaaagaaatacctgaggctgggtaaagaaaaagggtttaattggctcactgttttgcagggtgtagaggaagcatagctccagcattagcttgtggggaggcctcaggaagcttacaattaggcagaagctggagcaggcactttacatgacgaatgcaggagcaagagaaagagttgcggggaaggtgccacacgcttttaaacaagcagatcttgcgagaactcactcactatcataaagagagcagcaagccaggagagatctgcccccgtgatccaaacacctcccaccaggctggccctccagcattgcagattgcaattcaacgtgagatttgggtggggacaaatatccaaattacgtcaatgggtgtatctgcctttctttatacttagctatcggctgataaagctcaagaggcagacttctggctgtaccacctcctagttgtctgtttggggcaaatcttaaactttttctaaacataattttcttacctataaaataggtacaataataaaatcttcctcatgaggatgctgtgacagccgtgcaagatactttatgtgaagtttcgggaaaattgccagatatagaaatatcagtaaatgttaccagttttttgttcgttcgtttgtttgagacaggttcttgctccatcacccaggctggagtgcagtggcaggattacagctaactgaagcttcaacctcctgggcacaagcatcttccccccctcagtctcccaagcagctgggactatagacgtgagccaccatgcctggctaagtttttagattttttgtacagataggatcctcctacattgcccaggctggtcttaaattcctggtctcaagggatcctcctgcctgggcctcccaaagttttgggattgcaggcatgagccaacatgtccggccaattttcagtatttttattaagccaccactaaaactggtattagtttatattg

SEQ ID NO: 14304 - DNA, 1823 bp, Homo sapiens
cagtaaattatgtaggagattgccacgggccacaaacaaatgtttctgcaataacaacaacacaaccacaacaacaaaaccgcagtagcaattgtaaagtacattcagaaaaaaaaaaaaaaaaagtatgtcttggagatagagaacaaagtaataagagtacatttgtatgaagataaacattccatactaacttttaaaaatgcaattttgttttccaaatggcttaagaccaggaagcgtactttaacatttacagcagagactgtccaagttcagggttccaagcatgaaatgaaaaggggatattgagttgtttgtatctattcaataagtaaaaatatgtttcctgaggttttagaactgaggttttagaagaaggtggagacaagaggggtaaaagaagggattcaatgggaaacttcaaagtattaattaactcatccaactgtgtagagatctcagcttaatgtatgaaaattcagtgtcaaacttagtttaaaaggcagactacagaacgagtgcttggcaagccaggaatcaacgcacttttgtcagctagaatggtttggctccaagggagtgtgagcagtgaagagcatttcaagtggaggaataggaggagaatctccttcaccctactcactgtaagcattgtaaggcacatggaaatacaggaatgtttgaaagccactggatccgatttggaagcaatatcatcataagtgtgactcagataatgtataggatctgaactggatactccttaaaggacatatggaaagaaaatgacttaaagatgtgataatgcctttccacatgtagtcatgaaggtgatatcagaggtagccttttctggttctgagcaaactttggcaggattaaaatggcctgagaggaaaccacaaactaggatattagaattaattttataagaatgcaggtgtaaacacatccatcccttatttagatcaacataatgcatagcagaaaaatgaaaggtcagtgaaatttatgcatgagaaaagcataaagctgcaaaaatatttcatctctctacagtaattcagccaaaatattcaaaatatgaaataattagcttctcataaatctcgacctataaaagaaagaagcagcagaacttgactattgactgtagagaaggtaaggttaagaagagttaaatagttaaatagtaatacttttttaataaaaataattgatcctgggaaaaatctgatagtttatggttaatacatataggttttggaggtgatagttggatagtgagaactgatgttgagagccacaggctgttttcagggaatcatcaagtaacaacaggtgattgagggagcccttactgacctgatgaatgagtggggagggaagaaagagggttcagcatgaaaactgagtcatggggcctttgaatagggagagaccctaaggtttatggtctccatctcctgtccacactgaaaatttgtgcttaggcccttctaaacataggcagtttactcaaacaaacaaatacaaaaacaaacaaacaaaaaaacagaaaaaaaacaactcctgttttaatcctagcctgaaacctgctttcaacagactgccagccattgactttagttctgccatcaagagtcatatcttttccaattccagttccacatacaggtctttaaaatttgaattcagtgatcataccccctttaagaattcagttcaagttcaatattcccagttgctttaaccactcctcacacagtgtcacattagatgttccactcttctggatttcctcctctgggcacactcta

SEQ ID NO: 14305 - DNA, 2775 bp, Homo sapiens
tctgtgtttcatgtgcttcaaatgtaaggattcttggtaaactcattattatttgttcacaacattatatttttgtcaattctgagtacaattctttttatgacttactgcaaaaggaattttaaaaataaaatatccattagaagaaccaaaggatcatcatatagcctaaactaatgttttttgggtttctgcattaaaaatatatctaattacaaaagtatgacatgcccttgtggaaaacttgacaaaagcctaaagtctaaaacgataatcacccatgccccaggagtaatcactatagagtgaagacatagatgattgatagctagctagctagctagatatgatagacaggtacatagtttttgtctttttgaaaaatcaggattgtactgtagatgatacttttaattttgctgtttccattaacagcatagccattttaagctattacaaattttagggaatatttgataaatattgccaaacttttggcaaaaacatttttaccattttatattctcaccaatcatactgtagttgcaacaaacctgaatattagtaactttacattttttctatattaaataagcaaaataaataggaaaaggtggattttatttttccatttgccacctttacaacctttttaaaaagtatatgagactaataacatttttaggtttgtgggtagttttcaccatctccttccaggattatcttaggatcagatgctgtttttgctatactgtcttatgatttttcctaatggtgctgtaagctctttagagaataagaatcctgtatttttaatatgatgtaacactgttataagtctatgtttatagatttttatttagcctgtatattatataactaaaagacctctaaaataaggccctaacctgcacccattttctatgcattttttccccaaatccatttaatactgtacccatagatggctaaaaattaacactccttggttaactatgaacatggtgaaacagctgcttcttttattcgcataaatgtatgcagaattgctatgctattttaataactatgcaatagacacatcttgccatgactcatttcatgttgctgttagtgaattatgtgtatgtgatctgacatacagatttcagccctgttttattcaatttatcttcatcatcatcagtaaaacttcatcatataggagatgatgggtaaatgattacttacagaacagatttaaattaattagacaatgtatagtttattctataaatgctttcatctaagcttccaaaataaaattagtctttgtaatattttagtatccaccctttatgctttcttcaatttgttgcctatttaagagttaattttgacatattctttgtactgtattattccacttttttctgtaaatgttttttgtcatgttatgtttaatactttttattttattttagccaagttgtatatgtaaatacacgtgaaagactttgagtagtgcttggtataaagtacttaataaacattgatggttgccattctgtaaatgcttcaggaaaattcttaaatattatgtctgaaccactctagtttcctaaattagcctatggtctatgagtcttgatggttttgcattgtaagatagcagtaattttatggaggcagcactgtaaacctgcactattgaacattttcaaatattgtgtacagtgtacaagggagtgaatgagtcctgaatagcacaatttgccattttaattttcctaaacaaaagtttagtttcttttatccttatttgcctatatacgtaactcaagacataatagttggttgacaagtttctgtccagattattacagttcaccaggaatttaggtgaatataaccaactccctggcagcatattgccgtgcagagagcatgggcattcggctgggagacctgggtgccagttctgattttgccactttgtagctatatcaccctgaaaaagaatctgtctgagtctcagttttattatctctaacatggaaaaagaatgtttgcttccattttagtatgattttgatgcttaaaaaagaacaaaaaagtgatggtgtttggggtgtagccattgcttactatgtctctgttctttttcactcttgctctttctagcctgtatatctcatgatccagaatgacaaagaaatgatgagataaagatgaagtaagcatagtttcccaacaataaacgatctgtgtataaagattttatcctgtaaggtggaactttttatgattttaagacaggaattgcctgacgacattcatacccatttgtaactgaattaatgaagtactttttaaagcaaaagagattttcaaaaattgtgaaatcactctgtacttattgttgtaattaaactgtggagtagagatcacagtcttatcaaaatttaattttagtaaattcaagccaagccactaaaattttaattgtagtatcatgatctctcttgtcctttacttgtatacacacacaaaatttccttctgttatttcatcgtgtttcctaattcttatttcttctcttgatccagttcagataagcctgtgatccactccacggcaacccgagggagaggtcaagtcacacagagctctgtgtcaccccctgacagtttcctcaccacagtcagaatggcacttgtgacagacactggagtttctctgctatctaattaaggttccattaacttaactaggttaaccatatttgctttctat

SEQ ID NO: 14306 - DNA, 1034 bp, Homo sapiens
agcgagagtagtactttcagacttattaataactgttggaagaaatacaaatttcacagaaattttagatggagttgaaatcacaaaatataattaaatcttgaccagtgaaaagtgatattaaatacatctcaatcatttgttcacatcgaatgagagaaaataaaaatgctcagaaaataatgaaggcaaaaagattatcttaaaacaaaacattacacaaaagtattacatcaaggcctccaaaattcaattaatgaatgtagctgagcaatcccagaaaaataaaagataaatgttgacaaattggatgttatttgatgtgaacaaaaactattgtgaatttattaccgggctcaagaagttagaagacccaaactacataaaacacatgaaatgaaatcctataattatggctttaaatttgaagagggaaatatatttaagggggattattaatctatacatcaccacacacaaagattaccttatattagcattaaacctgttggattgttaaaaaatgccttaaccatcaatatttgatttctttaaaaaatcgtggcttaggactacaataagacactcaccaatatcaacactgagatcccttaagcctagtagtattcaatctgctgtgataggtgatttttctccatattcaaacagagaataagaaaataaagaaaaaatgtatgtttaacaaggcaagagaatggtgtttggggattattcctcactgctattggcataacacaatgctactgagatgaaactagagaagaataatttcttttatgttcaagggacagtatagttagtgaaataatggaaacgtatgttaaacttccattcatagctaacttgtgataactttgcttgcaaattgtaaaattcaaatgctatataaactatagtattattaaggataataacaatgataattattgtatacagcattgtgctaagataaatggaatacctggagatcctgcaagaacaaagccttctaccttctgaattttgagctgatt

SEQ ID NO: 14307 - DNA, 1034 bp, Homo sapiens
tgagccagcctcataaaaggagctgtaaacagggcacaatgagaggagtctgtggctaaaccaacataatattttaagattttgtaatgcatgctttcatatccctacagagctgttaaaatcactacaggaaatgtctgacgccacactcattttttcgaggcttcccttgatctactgtgtgtggattaggtactaagtagaagacagtggatatacagtgtttaagggcagaggctttggggaatgagcaagccgatgtggactactaagtctgcaatttccgggtcacaggacttgtattatatagggctctctaaggctcagtatttctctaaaatgagactaattataaggcacttgtgagcttaaaagagaaaacataatattcctgacatatataggtgctcaaaaggctacgatgtatgtgtttactgttatttctattttgaaaaagttgcgttttgttctacaatatttgggggcagtttgtttttccttattgccaggatttcatggactacagactgtattcaaagtaggacttagctagaaagacttagcctgcaaatgaagtattgtcttatctcatagtggcaaactctatttagaaatgcttaagacaaaactgtaaatacattccaaactgatagaatttttggtctgaattccttggggttgttttctaataaattaaattgtaatcacttgttaatctgcttcttaaatatatttcaaaattcagaagaaaaggtgaggaacacaaacacgagaactgaagtaaaggaaggatatataagatgatagggaaagaaagaagagattgataagggaaggaaagaagagattgataataattgtgctacctcaacataatattgtaacattttgcaattctagtttcagaaaattctgttaatatattagagaatttttgttattaattttataaatagcatctcaattctgaatggaaaatgtattaacctctagagagaagaagttagcatactaaactggcaacatatatttaa

SEQ ID NO: 14308 - DNA, 1032 bp, Homo sapiens
ttgacagctgccaaggctctaccaaaaccatctgtcttattattattgccttttactgaatttcgttgaaatttctcatatataagaacaccacccgagcattgcctctgactgtgttacaattatgccagcctcctttagtaattgctcaactattcaaaacctttcttataaatattttaaaacaaatcgacatcatcctagtacaccatttaatccactgtcctaaaatatctgggcgatgtcttattgctatgctttctatgcatgggtacctcagaagaaaaattagctatgagacagtgttctaatgatataattatattcactcatctagaacgtctagaattctgtgacagcaaatggcactcttatagttctcaatacttccctaacaaacatcttaatgctacgctatgtgatgtacctttgtgttttgtattgatctgtagaaaaatctgctaagtaaagcaaatgaaagcaagtgttatttaaggacatttaaatagtttaactgacagattgtgtaggacttgtagtgagataaattatacaaactaatttccttgaaatgcgattgaggaaattgaattagtataagatagttcattgatagaagaagttctgaatgtcatctgtcaaataaaaggctttgtctcaattatctatagcttattatttgagcaagagacatcatactataacttaaaccaagtaatgcttggtttaggggatgttatttcattagcaacttagaaattacctgtactatatttaaatataataaactatattatacactgtattatatattatatcatatattatataattataacatcttatatgtattatatgatacataatatattttattaccaataaaatacaatatgatgtattatatattatatatcttatatgtattatataattatataatatatatattatattacataatttattatatattgtatattatattaaatacagtaaactatacttattactatgagacttaaattagtt

SEQ ID NO: 14309 - DNA, 1061 bp, Homo sapiens
tcagtgcaagtacctgctgagcgccacccactgcatgctgggtcttggtgaggtgaggagtgccacaggatggagggatgttgtccctgtcttcagggagcttggggactagtccaggactttccactgcagggagctagagtgagggtatgaggaggataggacacatgtttatagtggcagagaccagagaaagttctcagagaaaaaaaaaaaatggcctctgagctccagcctcaaggaaagggaagtgggaaggaatgagaactggaccgtgtctgtctttttctctctgtctccccagcactagggaagcactggagcataactgatgctaaaggtatttttaaatgaatgactaaagagcataccagacagaagatgggcgtgaacaaggtcttgaagacaaattgcgcctttcaggaaggatacctgcttggatcaaggtggacaggcgagagaaaagcccagggtgtgggttaggcacttgtaggcaggattttagaaaggacgcttatgttcctgtttaggaaagataattccaggaaagtagaaaagaggacacaattgtgacactggggtgggggagtgggccggatgtggcaattgactgtgatgctgggtacagggaaggagaagtcaatggaactacattttctgtcttaggcaattcactgagattgggccgaaataatagaagcagctccatggtgcatggactgactctgggagccagtatttaaatcaggcactgtcattttacctgtgtgtccttgggcaaggcactgcctcctctgaaaccatcgtgttattagagttaaattaattaattcagatgcaattgcctggtttataatggtgctcattaacgtttattaaatttgttgtttagggactcattttatttgtacttagttttacaaatcaaaaccataaatgaagcaactccccatacttctggggtaacttttctaagggaactttttagctcaaagagttcagcctttgcctggggaaggtaatcgctctgcactggaaaacatgatacaattctgtacaaa

SEQ ID NO: 14310 - DNA, 1034 bp, Homo sapiens
ctttttaaaaaaataggtgtgtctgaatgttcattttttttctggggttcttttctgatgtaatttctttaatttgatctagaatgttttaacatttccgtcttttaatgttttcataaatactgcaagtatttcatcttcctcacaattgaaaaggtcaatatttaagccacatcagtagtgactacattaaattacctgaaggcacagaatattttaaaactgtaggcaacagaacccaggagcacagcagagtctttggtattggaatctaggtcagccctctaaaacgcatgtgccttcccaaccattgctttttctctctaggtcacttcgaggtttatatgcttccttcaaatgcttgcaatctgaaactgttacaaaagggatgaggtttctgaatctttcttcgtttctttctatataattctacaaaatcttatttagaactatgaatgacagtaagaaaatatttaaggcaacactttttttaaacctacagatgttgggattgaccttttaatttggtgcatcatattttttccgtgattttgtgattaacagcccacaggctttagggatctgggcggaagaagccacaggtgaaggccagcaccaacactagtgagaattgttaccagttcattaagaagacacttgcaaaatgtatattcaagacttccaagattgtagaaaataatttatttctgtgtacatttgctcctgtgatcgctaattgaaggtaaccgcacataggattaaataaagcatcccatttctcaatttaatatttatttactcatgtaagttagacattttgaaaccatgcttttttttctgatggaataaagcaagggtcataagaaggcagataaactctgcagtggattatattccctccatttctatccctctgtaagaacaaaagagctcctgggagagtggggaatgcatgtgtttattttccaattattaaggagtaaaattatcttggacatcctaaaatatcatctatgcttcttccgtaagcatag

SEQ ID NO: 14311 - DNA, 1470 bp, Homo sapiens
cagattttaataagccaaaagtaggacaaatcttgggaaaaatgtgcaaaaaactaagtgaaatttatattctctaggggaaaaagatagatattcctttcatatggaagaatcttttaaaagttgtcagaattagaatggagtcacttgtgtttcaagcctgacagatggagccgagaaaggttaagaagagaggattctcactcatgtatgcctgataacaaggctgccacaaaagactctgcaaaacctataacccacaaaggctactgcaaccttacaaaaatatatatacttctgtgagtgcatcggccccgcaactgcctgtccaaccttggactgatgccacccttgttatcgattcttgtagccaagtataattgtctcacaacaacttatgtaaccctcctcatttttctcttaaagattcttgcctccctttacctcctggaacacactcacatatattcccattgcaatgcctatttccaaataaatataattttcttttatagtcttcctctctgtctgttacttaggcttggcaatctaaataaatatcataaagatttcattgtaaacattgtttggtacagtcatttatatggtagtccgtgtgagctgttccccatggggtatatatctagactgcaaaaacatttgcgttttacaatacccctgcaaattagcagtcattatggtcccctttgataaataaactaaatgaagcctgaagagaaaaaagtaattttcctaaatcagacagcctgttaatgagagagacctagaactcaccagataacatttgcttctggcataaattattatttgtagaaggaaccacattgaaatattttgagttcatttatcattggtacattttccgtgttatcacaatagttaggtaatgcagtgtggaaagaataatataaaatctacaagtgcttcttggctggcagccatctactggctcaatgacttttcctgttgttgaaaactaatgctcatcagcattgaaaattttcacatattggtgtgtcattttagacatttgcaaatagttcccctatttgaagtgttaagccttttgtttttactgctttgattttattagttcttgcagagtcatccaggtgtagtaatattatacaaaaatgcatgacagtatatttttatgcatggtaatagttggtatttagttgtgcatattatatcttagatattgaaaataatattttgcaacaatacaaacttttacgaagctgaataaacacattttcatatcaatataatcatatttacatactgaatattttatagttgaatttaaaaaggataagtcattaagggattaataatgaaagaatgtgaatatactattatgtacttttagaagtgcatgtcagtatttggtattttaataagtgtctactggcgtgatatttagagtttcaaacacattggaattca

SEQ ID NO: 14312 - DNA, 1843 bp, Homo sapiens
caagattgcaaaaatttacatctatgttttcttctacgaactttaaattgttagcttttattttttaggtctatgatccatttggagttaatttttgagtatgatcagagaacatacttgtatgacttccaacattttatatttattggattctgttttatgccacaagacatgatgtatcctggagatttccatgtgcacttgagaagaattttcattctgctgtgttgggtgaagtgttcagtagatgtctgctaagtctaggtggtttataggtttgttcaggtcccccatttccctgttcatcttctgcttagttctatcaattattaaaaatagagtattgccatgtccaattattgtttttgaattatcttttccttttttcaattctttccgttttcgattcatgtatttgaaggctctgttaggtgagtatattttccacttgttatagcctcctgatgagatgacccttttatcattataaagtatccctctttatctctagtaacttcttctgttgttgttttcatgtctattttttctcatatcagtatagcaactccagctttcctgtagttgctgttcgcataatatacctttctccagccttttacttttaaactatttgtatttttccatctgaagtgtctcctgcagatactgcattaaaagtttggaaaatccaaaatgcgtattagtactccttctcttccaggacctggatggccagtaaaaggaagggtctacagcctccgtgtgcgactggttttgctggtggtgtagacagattgaggatgatggataggggtattgtctaaaaatacctcttcttacctttgactgagagttgacaatatcatggcaaggtgaattctatcagaaagtcctgtcttctagtggcttttaatataaacatcagaaaatccatccctgttccttaggtacaactcttgtccagccacaagatattcccctgaaataggaatcagtggtctgctgtatgagtttcccttttatgtttcttttccacagtttgcagggtaaaagataatactcctctagtttccttctttgtactccccctattatcttctcatgccataagctcaaaaacctatgtattttggatacctacattgattatatgtttatatctaaaatccaactagaatagttaaacaatgatagcaacaataacaacagcaatttaattaattatttaattaaactcatgatcttgaatctcagcaacacagacccacctgcatctccagtgtccattcagtgtctatcttattcatgtatatggaaggtctgatggatttatactgatttaatactttcttcttcttcttgtttgaacccacaagccccatcccgatgtcagaatataaattttttttttttttgctggtcttctttatgcactttgctagaattttcaacagaaagtttctattattaacagccagttgaattcagtaagtatctaccctgcatgaaatatataacacctagtacatgtgtaatataataataatttgtaataaatagtacctgttatatagccaaccttatgagaaaatgggaaaacacacaaataaacaaaacaagtttgagctttccaaaacttatttttgagctttacaacatgaaattaatgttacaggaggaattaaatactttggctttcctcaggctggttcatatgttccatgtgttgtttctttacgttttaagcttgtgtttataaaccagtcaccttcaagacctataatgctgttgcagaatataacagtcattttctatcaacttaattatagctttggtttcattg

SEQ ID NO: 14313 - DNA, 1033 bp, Homo sapiens
gtcctcacccaaatcttatcttgatttatactcccataattcccatgggttgtgtgagagacccagtgggagataattgaatcgtggggctgatttctcccttactgttcatgtggtagtgaataagtctcacgagatcttatggttttataaggggtttctgcttttgctttttcctcattctctctcattcctcatactccatgtaagaagtgccttttgccttccaccatgactgtgaggcctccccagccacgtggacctgtgagtccattaaacctatttttcttcgcagcctcgtatatgtctttatcagcagcgtgaaaatggactaatgcatctatcattcaattcactcttttaaaaagtaagttctaatgttccatggagaatggagaatgtctcctgcacttgagaagaattttcattctgctgtgttgggtgaggtgttctgtagatctttgctgagtttagttagtttacaggtttgctcaagtctcctctttccctgttaatgttttgttcagttctattcacagagttaggcaaccatcaccataaacgcttttggaacatttttctctgtccgtaagaaagcctgatatctattagcagccactccccatttccttttaatacccccaatcctaggcacctactaatctactttctgtttctagagacttgcctgtcttgaacaatttacataaattggatgatacagtatgtgtggtcctttgtgactgactccttgatgtttccaaggtccatcaatgttatagtatatatcagtgttgcagtcatttttattgccaaataatattgcatggtatgactatgccacatattttttatccattcaccagttgatggacattggggttgttcacctttttgggctactatggataatgcttctgtgaatatccaagaacaggtttttgtgtgaacatatgttttaatttctcttaggtgtatacctaggagtggaattgctgagtcaaatggaaactctgactatttcaggaactgc

SEQ ID NO: 14314 - DNA, 1104 bp, Homo sapiens
gaactgttacagtaaaactaaacaaatgcttttgacaacagcatttcccatggtcagccgtgtccaagcacatttacagagattctcattctcagcagacctcagcagtacccgattattttttatggctactggcaaacacattattgaaacccaactgaaggaagagcagactttctcagaaaaatgaattaatactcacaccccatgaatttttggtttaactatagcagcttaactgaccatttcaatctttgggttcatcttttaagctaaatttttccttgttctttttatatttaacgattttcctaaatcttcatatctttccagaatgctaattcaacttatccctttaactctagtgccaaaatttggaggattttcaatcacgttagtgctagaataaaaagaaacgtgaagtaggttataaaaagaaggatctcagcacttttacagtattcatgatttatcaactgcaatgctgagattttacatggctgactacttctgtgctgtaacacattaacctgcttatatgataaagcagtagttctcattttggggtgtgtagtggaatcctctgtaggctcattaggccatagattcctgtacctcactctccaggatttctgattcagtaagtcttacatttccatttctaaaaagttctcaggtgctgctgctgctgacagtgtagaggccaagctttgagaagcagtagtggaaaaggtggttttctcaagcctgggagacagggccagactctgtctcaaaaaaaaaaaaaatacttttgcatgacatcaggcaacagcttgggttggagggatggtgtagctccaccacacaagtgcattttcttaaaaaggaatggaagtcaaactgggctttattgtttttgctgcagaaggtcagtatgatgaccctatttcctatctactctgccacttttataacaagaggctttttattaagtaaaaagtgagctagctttctaaggatgcatgcttctcaatgatacacatatacattttctaagagagagacatagttgtgattaattttatgttcacaggagagcatagaaggtatgacaaaaggaaa

SEQ ID NO: 14315 - DNA, 1873 bp, Homo sapiens
gctagctataatatgaaatgcagagaagagggggcatgttcatgataggctatttttggagctcttctaagatagacaatggatacaggttttattgaactttgggtcagaaaaaataaaacagtgcacataatctaatagcttaaagagaaatgtccttgtccaggtaatgattcatgtataaccaaaatggtgaaattggtactgtccccccaagctgatctgaaaccatgtttttatttgtatagattgaggtattagttatcaagtgaaaatacaaatccacatctgttttttgtaggttttgagaaggtgaacaaattgttaagccattattgttttatttgcttctccaagcagaaatatatcttctctgaaaagagatactgcattggaatatagttaaaataaaaatcatgtttgttgctgtgggagatttgtgtgtgtgtgtgtgtgtgtgtgtgtgtgtgtgtgtgtgtatagatatagatatagatagatagatagatagatagatagaatttaatatgactctctacctattctgaatttcctcacagtgttcttctctttgaaagaaaaaaaaaaaaaaacaagtcagtggctcaactacaaaaagcactctattttctgagtgatttgatttaatcaaattaaatgagatgagttctagaagcacacactgatgtatgaatgcagttgcagctgccgtgcagggcctgacctgaagccttttctgtgcttctgtgacgtggtttatgcactttactgtagtcactgcagattagaaccacacgcagtaacgtggatatgggccagataacaataacaaaaatttggaatgtcagtgctactaaaagggaccttcactcaaattactcgtaaaattttttttcaaaaagaaagataagattgcatggcttaataaaagtgttaccggcactttaagctgaaaactgcccaaatgagaaataatgtgaaatcgaactcacaagtccctttggtttactctaactgtgagatccctgtcacctgtgagtatacattggcacagccagcttcagggtagaagtaggttctgactgagggacaaaacgcttcctaccgctgacggctgcagttttgtacaaataaaaatacaagagtataatattcccagaagagtttttcttctcatttttgtgctagaagacatgtttttaatcgccctttccaaaatttacccaacttaaattttcttaaaattgtaaccagtaattataataccactgtttttcaattcagtactacattgacaaagaaacatttgatgtatctcatttttaggtggaaaataaagcagagtgtttttaataaaatgttcgtggaataaaactagattattgatttgtggggcaaagattatatctatattaacaaacaaatataaaaacaaacaaaaatgaacagcgattatttaaaagcagacggaacgaaattgatctagaggtggctggtgcctgctgacccgggaaggtgggtttggttggctggattctaacactgcccgatggccagacccatgttgggatgtttgtgggaagcactggatttagctccaaggagagggtctgtttgtagcaatcctgcaacaagccgtctgactctgacagatgcttttcctgcgtacctggttggaatgacctgaaggaaagacataatgaattaacgaggaatccttcagatctttcaggtcagatgaaccataatctagttgaaaagaaaaagagaaaagaaacacgctaagtaaatctgcaagtttagttgagaagactacaaggagtatcagcttaagaaaatgccttaatgtttaacagacactccataaatgttt

SEQ ID NO: 14316 - DNA, 1092 bp, Homo sapiens
ggaagaggacaaaggcttctggctgccacaatggacaggactctatggatgttaatgaaaggaagaacgaggagttgcgaaggaccctgacccttccaatgtaggcaagtgagcagcaggtggtatcatttcgtaagacgggagaggcagacaaacaagtttttgaagggtgatggtgtggagttcagttttgtacatattagatttgaggtgcttgtgggatccaactggggttagcaaatcttcattatataccccaaatatgaatattttattgctatattatgtatatataaatacattagcactaatgtgcatgtatatatttatgcacattcagtatatatacaaaatatttacataagatgagataaagctgaagtaagcaatattttaaaacatttttgcctatgaatgatatataatatcttttttacttaaatagaatggattaaatataataaatattatattaatgataacatgttaattatcagcttgaaggtagaataataggattgaatatccatcattatttctaaaatcttagtttaatatttaggataaagtgcttggaaaatttacttgtaggttcagttcatgtcacagttttggtttcagtaccagatataatagtttaaaagataatcacaaaatgtgtagttctaaatggaaggacaatatggacttcatgaaatcattagactttattttaatgatgtccacaaattatgaaaaatttttttcctcaaacaattgaaatgcgatttttgaattcccatcttccttaaaattaactgtctttacaaactaaaagaatgttgaatttttgcattattatcaaatgaatttaaaccgaagctaaactctggaatattttgaaatatgttagaaagttctctgtctgggcagagatgagaggtggcatacattgttttcaacaacaaaatcccaggggctgcaaatacgcgcaaacatcttgttacaaaatactctttccaaagcttaaatgtcttccctgaaatcagttactgtcatttctacctcatcattatataatcacctttctcagaagtgccgttgagtatgttt

SEQ ID NO: 14317 - DNA, 2793 bp, Homo sapiens
aagattggagtctgaaagatggactggaagaaggataaagtgaagatgttaggacactgcttaaataacacctacgattttacatggtgtgactggaataggagcaggaagatggcttcatctgcatggcattcattagaattaaactaagcactaaactcggtaggccaactaaatgtcagccccttacccctagtcttgttacatagcaaatatatttttttctaggaagatagaaattattagtttaattcagggtggaggaggtcaccatgtatcctcactgtctgagagggcaagatatggactcaaacacaggcagaattttgcaaccaaagagaggcccctgcaggtgagggggaagcacctgctgtgctctctcttactgtgaagaagaactgttaatcctccacttgctagaacacaataattactcacaagtgaaatgtgatagaagaggatttgttgtcgtataatgactttcatactcaaaacatccccgaactctgcagatgagtgattgaagagctctgcgccatcctcccacctgctcagggagtaactggaacctccaacagcatgtattttttttaaaccaagtgagatcactggagggaaagactagggtggaggtgtgtttggcatgaatttaaatgatagcttgaataaaacagatctctaaagcacttttcaactcttgctatcaccattgtttctgctaagatctctttaatctctgatatagcctggatgcatgttcatacacgcatgcctcctgccagttacctgttacgtacgacacaatttgaaatgccttaaaatgtgatctccagtctcctttaagtaggtaaagcaaactgatttccaaatgcatggtgctttatatagtgtaagcgattacaggaaaaagaatactgcaactgaaaaggaaaaatcaaaacactcaatttgattttaatttattcttaaggaaaaggaatgcatagcggtgcatttcagatgttattgtttttgagcatccccttgggaccctgctgaactgtagactctgattcataggatggagttgggtctgagggtgcttttctgacaatcccccaggtgccgatgatgctggctttttgtttgtttgtttgtttctggctacattcagagggcctatggtataatgccaaaacttcttagtagatgtggaaagggtccatggcaggctctttagaagcccattccttcacaagtacttcttgtgccgagtttaccgtgcttccagcatttggaagttcagtctgaacagaagtcgtagtcgcttttactcacatttcgagcacctaattaagaaaaatataaaaccatagtgcatttctgaagccttatggttctatgatgagtttttttaccgtgtttttttttaatctgtatactgtattgatggaggatcccttgtaagtcagttatgattgctttctcacagggaaacctccatcaaatgatcttagagtatttcaggcttttttgcagaaagaactggtaaagtatcattttcattcatcatcctcgtcaaatgtcttttctcacacccgggtggctctgtgaagtgctgcaggggaggagagaaagcagatgtcacgctgactcctgggagtctgcgcagctggtggggcatccggggtcccaaaaccctccccagatgatttcaggttatttgtgtcactcaagctttgatatttccctgtgttctcagcatctcccctctcttttcaggaccattgtgcattatgtcctctgtacttacagaactcaccccaaatccatgtaacaggtagatgcgtaaggaaaattctagcagttcatctgatagtgggaggtggtatgaatgaaaaggaccactgatgtcaagaaatggaattgtctttttcactctgagacccaacgccatcccatgaatcagaatctatggttcaataggctctggaggggatgcccaagcataataacatctgagatgcactgctatgcattccttttccttaacaatacattaaaatgaaattgaatgtttttatttttccttttcaactacaatattttctttttcctgtaattggttacactgtatagagcatcctgcatttgtaaatcagtttgctcttcctgtttaaagggggctaggggacacatttctgagacatttcaaattttgttgcatgtaaccggtagctggtggaaagcatgcccgtatgaacatgcatccaagctctatcatggattaaagagatcgtagcagaaaaggactatgttcttttcattctaaagcaagaaaaggccctttactgtgattaagagttgtccttgcccagatatattttccattcagtaaatcagaacttgaactggggagaattcttcccgttagtgtcatcctatctgcctcccattgttcgtcacgtaaatgctaagttgagattgatgggcttataagggctgtgaataacatcacctaatgttagtgacattcataaagagcttcgccatttccaaagattttcacttaaattatctcagcaacaaattagagagactcacctgaggtcacttggctagtgaatattttaaaggatattttgaaatcaggcgaggactttcatagctagaaaaatactgttaagtacccttcatatacacaataatacttaactcagaatattattggattctgcttttcttccttgtgttacaaaatatttccattttcctaattaaattttatttttttataaaattaaaaaaatccca

SEQ ID NO: 14318 - DNA, 1814 bp, Homo sapiens
tgcatgatttaacaaattttaaaaaatatcttgtatatacaaaacatgggatggaggtggccataatagttgtgcaattcacttttgttgagtaaatgagtgaatacatggatgatgacccctgcccctcaagagcatataatataattagagaaatagagttgtttaaaatgatttattttccaagccaggatgctagggatcactaggaaaggtcaagttcagcaaggaaggattaggaaagatttcagttaggaagtagcttttaaatcaaataataaagatgagtagaatcttaacatatgaaggaaaaaagggcagtctgggtagacagaataccgagaacaaaaacccagagactagaaagaccagggtgtgttgtggaaggagcttactgtgtctgatgggtttgatgtactgaaaaccttttcaagttggttttggtccagttcttttgtctccatgtatgagagactgacaactgcttcccaatagacattctctcttcactgtcgaggaatagaacccgagtatccgaaactaatttgcagctgcatgtgtcagtgagaccaagtacactgaatgtctgtgtgcatttggtgtaatcctttagggggatcatcttaaatggaaggcacattccttttccttttatcactccattttgccacctgaaatgcaagtgtaatgttcaggagctccagcagacaccttgaaccttgaccaggaaggtcatgttataagattggtacaatttccaggggacctgatgaatatctgggtctcctaaaccaatatggaccacctactgccacttttaaaatgcaagaaataaactgtttgcttgcagccactatttttggggattttgttgttatatgtagctaacaataaccctgacctacatactcttcaaatagatcacaatccttctgcagtttccagtcccaaagactcaatcctctgtttctttcctattcgtatagttgcatgtatagagttaggtacacagccgactgcatttaactgactaaagaatgagtgattgaatgcgtgaagaaatgactggaaatacatatcgcagtggcattgctaaagggttttatcaactgtgttgacttcttttagtttcttttatatttagatcttagggtatgtataggatcaacttgtagatctccctttgtctacataagagcattgcaagtccatggtatatatgcatttgtagaatatttgtgtttgtgacttgtttttatatattaaagggaaggagatacaagtttaagtgcaaactgaatattgtagactatgctatttcaccagttgaaattattcacagagtagtctaagttccatacaagacataaaaagtggtatttcactattttaatttactttttccactttattccttgtctcccaaatgttttatgggtcaaaaatatctctttatttaaaaattaaataatacttaagagtttttttttcttatgcaggaccacattttccccactctaaacccaggattggggtcatactctgctgctttctcactgtgtgtcatcgggcaagtttcttgaactttctctcctttaatttcctcacaggtggggaataattgaacttatatcagacagtggattgcattaatgtatggaatgtgcttgtacaatgcctggcaacagcaaacaatatgaaataactagcatttcttataaaggagatcctctcatgataagctatagagcttagactttatctgtatataaaataataagtgatttaaattggaagcagaagcatactagatg

SEQ ID NO: 14319 - DNA, 1033 bp, Homo sapiens
ttcataaaagatttaattatgcagaaagtaaagactaagcattttttgatgcttcagtactgagtggaaataactcaatgaaacctacttttgcaacactgtatctttttggaagcaatagcatttgctattaggggcaacgtctatgttacacaatataattttttatcattagctaacatttcgtttctctccaaacatctttaaaatgctgttaagtttattctcaatttattttttggtctgattccattcgcagatggcttatgtttctactggctcttctttctttcactgatttttggtcattctggcctccataccagggaaggcagtaaagaggtcatccatgtgcacttcagaagttttagggtgtatctgctggaaaacaaagctgaaataagaaattggagtgattaggttcatctcccagtaaatttcatttacttttaccaggggaagcacttggggatcttgcgaaaatgctaagcctgattcttcaggtctggggtggggctgagcatctgcattgcagataagtttccaggtcatgatgtgttacaagtgatagcaggaagacttgaccattgacaaagggagattcgaggaggtccttttagcatttcctttctagagcagcagagaatgtggatgattctctaagtggagcgtgaactatatgcagtcagaatgtctagcctcaaacttcatccctgcaatttaaaagctgtgtgacttcacgctatttccttaacttttctgatactcagttgcttcattctgttatgacaataatagcatctacctcttggcattgttgtatagattaaataaattcagataaataaaacgcttagaatactatctggagcattttaagtatcatagaagtgtttgttagataaataaaatatgctttgcatgtaaaacacagcagcccaccatgagtcttcattaatggtctgctggccattgttatctaaatgttaaatgtatttctactgcctaggcaggtatcagtggcctggataat

SEQ ID NO: 14320 - DNA, 1030 bp, Homo sapiens
tacagtttgaggctgaacatgaagtgccacggagagacacagaggatgcttagggaatttaggatagatcactttttgcatttttcattgaattatactcatatgtgttactgtttgtccacatgtggcaagtaacaaggaaattagctgtccaaataattaaagcatcaaaatacagctgcttgcattttgaagggaaaagtaattttaaggctgcattatttgggaaagttacttgaaatcatgtttggttgctgttttcaaattaatgaaccatagtaaactattcctcttgaaattgaatcatttactctgcatttataacatcaaacattccatcttagagtttctgtcgttctttaggagaaaagttacattttcatgcgtatattaaaatcatcccctctttgatcatgtacctaccaaccatacttttgaacattgtaaagagtattagtgcaaatttgctcatttgatttgtttgaaatattttgggaacagttaaaggttaacagtttgtagaaaccaccaaaggaaacttcgttgtgttgtaatcagcaacaaaaggcatcatctaacagctgaaagtggcaaacaatgaattatcctgaaggaaagcatgaattagttttctgactgattgagtacacttttgattcaatagagtggttgccatttttcacagataatttcaaaagtggaataatattatatctgatttcttcttaaagtttagatcaaagtgaagcaggttcagtttatttttcttgctttgcaaaaaaagtagagaatttcattagttatctattgctgtgtaacaaattttcacacatatagagacttaaaacaagtcgtgtttattatctcacactttctgtgggtcagaaatgtggacgcagcttagctgtgtcctcagcaaagctacagtcaaggtgtcagccagggttggggtcttatttgaggctctgctagggaaagatcagcttccaagctcacgtggttgttgaatcctgctccctgcgagctgttg

SEQ ID NO: 14321 - DNA, 1683 bp, Homo sapiens
gcctcaccacaaatggctaattttttggatttgtaatagagatggggtttccaaatgttggccaggtcttgaactctccacctcgggtgatgctcccaccttggctttccaaagtgctgggattacaggcctgagccaccgcacccagccgagatgggtaatttaaatattagggtcacttcatcactgtaaatgttttctttttccttttgattagaaatatttacaaacatcccaaagaattaagacattattataataaacccacatgtaactgtcttatacattttacaattattacgaattttgccatatttactacttctatttagttttaatttatcattgaaaacatttttcgatgatatagcaagcaaagaagacagaaatgtgagagtcctgggcaactaggatggatggccaggtttatcatgtcaaaggcttaggtaacctgaatatgaatgaataatgtgaagatcagaagaacacgaaggtttctgatttcacgtttagagctgagtagagaaaggatgtgtgtatggttttggtgggatggaaataaactttggagattggcgataatttctatgaattcataatttcaatatggcagagtcttttagtctggtatatgaaaagaccttgcctagggcttgatgatgcccagtaaatgggagcaattcattaaaacccacgggaaacatcaataaaattaatatagtcctcacttgagatctcatataaattttctgtatagaagactgatttacaagacttttataaacagactttgcatattgtatggtaaaatcctctgatttattgcacctacatttattgtgcttctctagaaagatgattcaattattgaacaactgtagagtaaaatggaaaacataagttcagttggagtaaaatgtttcattcctaaggctggaatttttttctctattttaatttagagattaacatgtgctacattttagattgactggatcctgataggtgcgtaaccaaaggccttgaacactttggttcacagcctttttgagaggacaaggggagaaaccattgtagtgatcctccatctcctgtaaacctgtgggtagaaatggtcttgggaaacgttttgtgttatgtcgtctgtcaggcattggaaagccatgtgcctccagattccactgtagaagatgtgaactttgtcctgcaccctagattttcagctttgtattctgttatggttggttgtctctgttgttctctacttcactcggcatttatccagtcagccatagttagtatttttattgattgaggactgagatgaagtgggtaacagatatccttgatgtcgagctagagctaccagacaaggcaaacctggtagccatgacagagaagatggagcaggttgaagaaaagcctggaagctgtgctgcatgaatgaaaacaggattaccctgagatagagaagacacagggagacacagcaaggttctttaacttgacgaaaattgtcctgtggaaggaagtcttactatccaatgctttgtgttgctttaggggtgagagtgaggctctgtgtgcaggtgttttggcaagaagatctctgctctacataaggaagagtgttctatgaaaggagttgctctcctacaaaagcaagggctgtctcaggaactc

SEQ ID NO: 14322 - DNA, 1045 bp, Homo sapiens
ctttatccgctgtgttgctctcacaatgactaagcaccaaatattttgttgtttatattgatctacattgcaaatatatttttttcagttaacatatactctagattagtggcctttggggtcacagtggaacatcctggaaatctttgagggcgctaaggccagggcatcccaaccctaagagattctgattttatcgtcctgccggtgtcatgggtctgggctctgtcaaagtctccctggtgattctgatgtgcagccaaggttgggaaccaccattctggttcacagtgacaattgatatagaatgacctttcagctcctatatctcagtagtacatcataatcccatttgctcaactgatgaaagtataactcagatatttttaaaaagtggtaatggcagtaagacatatcccaagggcagggaacgaatttctattgatgagactgaggaagtgcatgagaagtgaactaactgggtctcagagttagggaatgtgctagaagggatcatggagagaaggagatggatgtgtggagggccagagttttgactgtttaaggttgtgtcaggcaactatggattttctatgttttagccaaggttgtaatatcagtcatcttttttattttttaagtttaattcatgagatactatataaagttaaatttaaattttatctaataagaaatcaagcatcattgtaagctacatagtggaatttcttcaatgtaatgctctaatttactctgattcttttttttttttttttttttgagttggagttttgctctgtcgtccaggctggagtgcagtggcgtgatctcagctcactgcaacctcctcctcctgagttcaagcgattctcctgcctcagtctcctgagtaggtgggattacagtagctgcgattatagcctaccaccatgcccagctagtttttgtatttttagtagagatggtgtttcaccatgttggccaggctggtctcgaactcctgacctcaaatgatccacccacctcggccttctaaattgctgag

SEQ ID NO: 14323 - DNA, 1075 bp, Homo sapiens
cagttaaattaaactcaaactgaccttgccttattctcattcttcaagaccagaaacacagctctctgaaaatagtaagtctgaatttacaacattaatttagagtgatacttcactagacaagtgtatcttaaacttttttatctatttttttaaccatatcactttaacttatgcctgggaataaaactttaatggtagaaattaataatgaataactactgcaataattgcagttatttattttgacaagatatgttgcattgaaattgtaaagaaaaggaaactctacgtcttctaattctactagtaataaaaggattgcagagggttcagtttagttgtgtttaagagtggtaccctgtaataattatatttgcctccttccctgcatgtaaaccctaatttctgataatttccatttgtataactcagtatttaaaagacagtctgtattgacaatagactgcagcgtattttcaaatgagcatgccaaatacatcttaatttaaatgttcaagtaaatatattaaaaagttttctttccccttaacctaaattacctctcaactgtatatttacatcatttacataatcatagcgataaagtatagtgtaagttaactcatttataacgttattgcctacttctggattatgtttttgtgtaaagtagaagttaattgtaggcacaaaaaagcacattatgaaaaccttaatttctttaaaaacttagtcttcgccttgataagtaaatgcagacacttgatttcttatcaccgcaatggagaattaattgcatgttatgtcgtgcagacgtttattggttgtggggtgtttttttgttgtggtttcttgtaaacttgaaatatttattccataatagctgttgtcaaaaattacagttgcaaatttgaagtgtggtgttcttggtttaagactcacaaatcaattggttatatgtagaaagggagtagaagcatagtttcttagtttaacatatattttctctttgattctgaaaaagccacaaacacattcacatataaactatgccacattacttaaaatgttt

SEQ ID NO: 14324 - DNA, 1060 bp, Homo sapiens
gctgggattacaggtgcccgccaccacgccccgctactttttgtttttgttttgttgctgttttgagacggagtttcgctcttgtttcccaggctggagtgcaatggcaagatctcggctcaccgcaacctcccgcctcccgggttcaagcgattctcctgcctcagcctccggagtagctgggattacaggcatgcgccaccacgcccagctaattttgtatttttcttcagtagagacgggatttcaccatgttggccaggctgctctcaaactccccacctctggtgatccacccacctcggcctcccaaagtgctgggattacaggcgtgagccaccaggcccggcctaatttttgtattttttagtagagacgggggttcaccatgttggccaggctggtgtcaaactcctgacctcaagtgatccgctcacctcagcctcttaaagtgctgggattacaggcattagccactggcccggcctgtggtgttgttgttattgaacatatgtgtcttgctaccagatggagagctccaggtcaaagctgggttcttgaatcatagcttcctaatcttgatcacggaataagtgccaagcatatataaagtagaccatttacataaataaattaataatcatggcaactctagaagatacttagtgaaaaaaacccttgattgtctttgaaccaatcaactaaaataacatgatgaaatggagactgggctttgaatcaatttggagtttgcctggtttcataattcatggttcttctcatgtaactaatacaaagtccagcttctgacattgtaggagctcagtagaggttgaacaagctacaaatgtacacggataggtaccctctcctaagatgggcaagtggaggctcctctaccttaacactattcatttttcctccaaaataaattgataactaaattgaagagcagatactcacaaaacaatatcatgagactttacaacatcacagatgattttagatattcaggcatattaggtcaattagacatacgaagtaaataactgaatgttct

SEQ ID NO: 14325 - DNA, 1169 bp, Homo sapiens
ggaagaacatggaaggacttgacttgctgaatcttttggccttcatctttcttctatgctggatgtgtccttctttttttttttcattttttttagacagaattttgctcttgttgcccaggctgaagtacaattacactgtctctgctcactgcaaccttcgcctccctggttcaagcaattctcctgcctcagcctcccgagtagctggggttacaggcatgcaccaccacgcccagctaacttttgtatttttagtagagacaggttttctccaggttggccagggtggtctcgaactcctgacctcaggtgatccacccaagtcggcctcccaaagtgctgggattacaggcatgagccactgcgcctggccctgcttccttctcttgaacattggattccaacttcttcagcttttggactcttggacttacatcagtggtttgccaggggctcttgggcctttggtcacggattaaagactgcactgttggcttccctgcttttgaggttttgggactcggactggcttctttgctcctcagcttgcagatggactattgtgggacttcactttgtgatggtgttgagtcaattctccctaacaaactcccctttatatattcatctatcgtgttagttctgtcgctctagagaatctatctaatacatacctaaatctaaccatatcaataattacattaatagaaatggtctcatgaaaggttgtcagattggataaaaataaataagactcatctgttatgttgcctacagaaatctcatgtcaaatatagaaagatgaatacattaaagtgaaggggtgaattttttgtggggaggaggcaaaaagttctaaaattacattgtagagatagttgcacaacattaagaagttacgaagaaacactgaattttcataacttaaaggcacgggttgtgtggtatgtgaattatatcttgataaagctatttttaaaaagtaaaggatgaaaaaatataccttgcagacaatgaacaaaataatggagtggctatattaatttcagacaaagtagacttaagacaaagaaatacaaataaaaaatgaaattgtataatgatgaatagatcttcaccaaaaaagatgcaataattttaaaagtctttgtatctcaaatatagct

SEQ ID NO: 14326 - DNA, 1045 bp, Homo sapiens
aagagcaaaggaagagagcacatgaagtgctgggaacagtccacatagactaacaataaattatgaatatttctgagggtgcaccagcgctggatggcatcaatgtcacccacacggttctgcacagatgggaggttatgcatcattttaagctttaggtgataaaggcctggacccagtgacgatggcgcagacagagaagaagaatggatggttttttaaaaaattagctttatgccctagtttcttcagtttcattccctcctaaaaatcaaccaaaatacaacattcattgctttgtcttttcactacgacttctgagcatcagccttgccctatttttgtaggtcctgagtccttccagtttcagctcagatgctatatgccttctctgtttcttctctgctacccttggaagtaaacatgccctcctgtgaggtccctcacattagtaagaatgttttatgttacttcttttgtgtcctcttatttcctatctcagttgataatgattcatgttccagttatctccttcatgactttacaaaaccgtgatctctggggccatctttcttcctccatctttgcacctgccccatcatagctggatgtggtactgctaggttagcacttgttcaaccaactggacatgggcacaagaaggagagagattatcagtgatgattattaggttttgatgcctcctttggaagcatcttctttgattcttcctttggaagactagaaggcagatgattgtcactggcaacagcagaagaatttggaataatggtttatggagggaaggtatacatttatttttggcttatggttgcatttgggaagactttgacactaagatgggaactggatttctgatactacattggaagactgcaggcaaggggacctgtgcctctgcagacagagcatctggtacagtcacacagctcacctgcacacccaggagaggccaggctaatccctcaacctctcccagtctgatctccctcactcttccaatggaggtgatgaggatgttaag

SEQ ID NO: 14327 - DNA, 1049 bp, Homo sapiens
cagatttctcctgttctttctctcaccttttcttcccttctcgccttctccctttttttcttcctcctgcaaagtctgtgagatacgggttgagattccagctccatcatttactagctgtgtttgactttgggcaaggtatttaaaatctctaagcttcattttcttcagctgtggaataaagacagtaatagttcctactccctgtgtatgttgttacaatttcatttatatgagttgtgtatataaatcacagtgcttggtgcatagtaaccactcaataaatgttagctattatttacattacctctttttcaacctattttcattttaatgaagtaaataaaagtattgaattgaatcctgtgtttctggtaaacaaaaaaagggaaacaatgtgttagagagtttgtatctgaaccattttgcaacagtcaacagagacctgagttgtaaaaaactccagttgatacaaaataaactacgaaagtggctttaacatatctgaacacacaatagctaagacccaaactgggattagataccccactatgcttagccctaaacctcaacagttaaatcaacaaaactgctcgccagaacactacgagccacagcttaaaactcaaaggacctggcggtgcttcatatccctctagaggagcctgttctgtaatcgataaaccccgatcaacctcaaattagagaccaatttggaggctagccagcaatagctgatctgctgtaacctttgcaaccacctccccactgaaaaatttataacagcactggagtatatcaggtaataaaatggaatgaattacgaacacatgccacaacatgtgtgaaccttgaacacattatgttgagcgaaagaagccagtcacaaaaggtcacatattgtatgatctcatttatgtgaaatgcctagaataggcaaatccacaggcagaaagtagattcttggttgccaagggatgagggagaggggatttgcagagtgaccggtaggggtacggattttattgatgtggtgatgaaaattagac

SEQ ID NO: 14328 - DNA, 1059 bp, Homo sapiens
tcttatgttaagaatttttaatccatttggagttgatttttctgccttgtgtaagaaaagaattccatttcattcttttgcacacaaatattcagttttctcaacaccatttattggacagactactctttcctcattgtgtccccatatgtcccttgtgaaaaattagttgatcctatatgtttggatttatttctaggcttttcattctgttccactggcctgttgtgtgtgtttttataccagtaccgaactattcgatgataatagttttgtaatataattttaagtgaggaaatgtgatgtctccaatttggtttttctttcttagaactgttttggctatttggggtcttctgtggttccatatgaattttaggataggtttttctatttctgtgaagaatgccattggggttttgatagggattgcattgactctccatattgctttgggtagtatagacattttaatcacattgattttttgaatttatttttccatgtatttgtgtcttcttcaatttctttcattcatgttatatcgttttcagtgtccagaccttttacctccttggttaaatttagtttttgatgctatcataaatgggatgtttaaaatttctttttcagttaggttacttcttgttggtaacttcattaacttccacaacttacacctgttttcagaggctcactagataatctcaatgtactgtccctcaacctagctgcctcccaccctatctccatctctcttaacacccatttattccttttatgaagaaaaagccacttatgttcaagaaagataaattactaaatatagaaaataagaaagaaaagcaccccacaattcccatgccagagctaatcacagttaaaactctggtaattattattccagagttttatgcattttgtttcttttataaaaaagcaatcataccttgcataatgtcttgtagccagattttcttctctccatttaacattatttgagaagcagctttccgtcatcaaataaatgtgtccaacactattttggtgacttagaag

SEQ ID NO: 14329 - DNA, 1004 bp, Homo sapiens
gggtttttctttcctgagagccgataactacagcacagagacttcctcgctttcttggttcaagtctctatcattgtttcagtaatttttttacagtggccctaggccagagcaacttcttaacagttctgtgtataagtagttagagccaaacgacataattatgcatgccctaacaacttagtaactgtttgaaaaaccaatacatatacctttaaagaaaaaacaaacaaaaacaaaacaaaacaaaaaacaacccatcttttcttttgctctgaaattcccatcacttagcagcgctgcacgcgcctgctggggacagcacagcctcacctaccttggcatgagattggagagccctgctgcgttttctgttccctgctggttttcatacggggcctgctttttatcagagcacctgctgaacatccagccagggcctcgtggaaagtaaagtagcgctcttgagccttggatcggtggctttgctagagcagacgtttcatggaggggctgatggatgtccaagaggttgtgtttctctcaaaaatgaagaaactccacagcgcccctgtgggtttgccggggcgaagatctgctgtgcttcttttaggccctgtaagttcaccgacaaattaattttctttaaaaactagtctttgggctttgtctttgggagaaacaatttctccgaccgtcatttttcgactctattttgggggattggtggtaggagctgtagtgagccgttccagctctcgccctaatgtttgactcatggcaaggtctttgcctccttgactttgctctcagagctttttctaggcttgcttgggaagaagctttcaacatttctattccatggctattttcatttttctcttttccagtaatgttatgttttcatttatatgtattatttttctcaaaagtaacttgaggaatagaaaaattggagccaagccagctcctccatcagccatttgaatttgcttgagcttcta

SEQ ID NO: 14330 - DNA, 1122 bp, Homo sapiens
tccgggtttggcagatttgatttttaaaaaacgtattatctttaataaaatgttattatgtcaaccagtgaggctgccctgaacaaaaaaaacaaaaagaaaaaaaaaaaaggaaagaaagaaactgataaaaagaggcattccagcccctatgttattgatggaaaaagaaaaagaagaaaagcaatctcgcagtacatgttacttgtcgaaaaaattccggacaagactacccttgttttatgttttcagtattctgaaaataccagtgtgtggcagttctcgcagatgttacctaaaactgctgaacttgaccggcagaatgttctgccgttttctgctccctcgacacttgattggagggctgtcgacctctcctcccgtgggggcttccccagtgcctatcttctctgatagtcatggagaggttacactaattcattggagatgtaagttgttggttttgttttgttttgtttttagaaaaatatatataaatatataatagatatctatcgctatagaataatgcattaataaaatgaggcttttttagaggaagaccaaaaaattcaatgtcttaaaaatatatttaatggcaatgcaaaagtcttcctgcttccgtgctgaactttagaacagaggattgtattgcaagacaaagttgaatgtaaagtgatctccctgaacatttttaaggttttacttttctgaaattatacatcacagcagtgcataggccatataatgttagctggaaggtcaatttcagtgtatgatatactttattaagatgtataaaaatcctgaagtttttatttagttttgggaataggcatcaatgggtggtatttgctttgtaactccccccaggtacgatagggactgaatatggaccctgctgaaagcagtgtattgacgcatatttaactcgccctctatccgtagagtagtcatgacactatacagatggttcgtgttcatactgcagcttaaaacaagcaaaatacacagatgataatatgctaaattttcctctatcctgtacatttcacaaaaaggcatatgcaatatttacatttttaatttagtttacagaatggaaccaaaatgtataaatgt

SEQ ID NO: 14331 - DNA, 1081 bp, Homo sapiens
aatagcaatgtaaaaatggttttttgaacctccaaatggaattacagactcagtagccatatcttccaaccccccagtataaatttctgtctttctgctatgtgtggtactttgcagctgcttttgcagaaatcacaattttcctgtggaataaagatggtccaaaaatagtcaaaaattaaatatatatatatattagtaatttatatagatgtcagcaattaggcagatcaaggtttagtttaacttccactgttaaaataaagcttacatagttttcttcctttgaaagactgtgctgtcctttaacataggtttttaaagactaggatattgaatgtgaaacatccgttttcattgttcacttctaaaccaaaaattatgtgttgccaaaaccaaacccaggttcatgaatatggtgtctattatagtgaaacatgtactttgagcttattgtttttattctgtattaaatattttcagggttttaaacactaatcacaaactgaatgacttgacttcaaaagcaacaaccttaaaggccgtcatttcattagtattcctcattctgcatcctggcttgaaaaacagctctgttgaatcacagtatcagtattttcacacgtaagcacattcgggccatttccgtggtttctcatgagctgtgttcacagacctcagcagggcatcgcatggaccgcaggagggcagattcggaccactaggcctgaaatgacatttcactaaaagtctccaaaacatttctaagactactaaggccttttatgtaatttctttaaatgtgtatttcttaagaattcaaatttgtaataaaactatttgtataaaaattaagcttttattaatttgttgctagtattgccacagacgcattaaaagaaacttactgcacaagctgctaataaatttgtaagctttgcataccttagattatttttattttgcacttcttccaaatgagagtcacagactgggggtgatttatagtgactacaacaaggaaaaaaagattggtgttctccatctcttcctctttcgtcgcctcctcactccctccttt

SEQ ID NO: 14332 - DNA, 1049 bp, Homo sapiens
taaaaaattctcagtatttctgcttctcacgttttgttttgggaaataagaattctggctgtaggagatggcggggggaggttagtcttcccagagtcgtgtcatcacagaacagtgttgctccttacagctgttatcccaagagaagaaaacgggagagagtgccggccacgttttgtggcttacacaagccagttgatggtgtcaaagatgttgttgagttctctggccaaaggatgttctgttttctgaaaaagtttagagctgcagaattgtttttatgctcgagtggctaaaaaaatgggacacatggttggggtgaggagaaaagccatattttactgatccaaaggaattggatcactcctgaagcaaacaaagtataatacggcgatctaagtagatagttgcatatattgaacacaaaggcagagcattagagtaagaaaccttcagccagatctcggatgtatttcataacatgtgttcgttgaaagaatataagaaaggctctaggtcttgaaaaaagaaagaaaattctccttcacatttatattcatgtattactagcaagattacaagttctcagaatagcaccaagatgaaagaggcttaccagaattattgaaaaggggatttttcgaggccacttataaaaccaacacaccaaatttggtgttgcagatgtaggcgtgggattgtcctctgtcttcagaggtgtaatacgtaaagcccatgccatgcggcgctgctaagccaaagcaaaccatgatttgtgagcaagaacttgaagattctatataattcattttttgaatactttctcttgtaatacaagcatagaattgttttcgttttcaatggcataatggtgactttgtgatgtattcatgagaattatgaagtttggaatgtgacttttattttaagattttgagggaactcctaaaggcatttcacttttgacctttatctgaaacttgtggctgactattgctgggtaataggcaccaagtgtgcatttttgttgtgtctgaaaatctggatgt

SEQ ID NO: 14333 - DNA, 1095 bp, Homo sapiens
gggaatcagggaagcccagggctgggtgggtgtcggcccagagcccaaccacggggtggggagggggcatccacaatccacagtctccgggggacgtaaccgcgccctgctggcttcagtacgtttcaggagacggcagcgaggctaccttgcatggtgtggtggacgagctggtgcggttccggcagaaggtccggcagtttgcgctggccatgcccgaggccacgggggacgcccggcggcagcagctcctagaaaggcagcccctgctggaagcatgcgacaccctgcgccggggcctgactgcccacggcatcaacatcaaggtgagtgccgcaccaaggtcagggacatcaccccaggagccgggtaggtcaacaggacgtggggccatcagaggcccagacatcccccgtgaccatgctttttttttgagacggagtttcactcttgtcacccaggctggagtgcaatggcgtgatctcggctcaccacaacctctgcctctgcctcccaggttcaagcgattctcctgcctcagcctcctgagtagctaggattacaggcatgcactcccatgctcggctgattttttatttttagtagagacaggttttctccacgtgggtcaggctggtctcaaactcccgacctcaggtgatcctcccacctcagcctcccaaagtgccaggattacaggcgtgagccactgcgccctgcccatgcttctgagtagagaaacccacccccataaaaaatgaggtgggagggccgtgagggaggggccaagttggctgcaggggacgctgagcacggggacgtgggtcctgctcagcccccgccacctcctgcaggtgccttgaagctcctggccttctgctggaggtagtggggccctttctaagcgcctggcaagctttttaggacaggccggtgagggaacaggcaccctgaacctgattacgcctgtcagccccctgtgccacatgacgtggtgtctgctcagagttggacctcactcttcttctccaggacagaagcagtacaacatccacgtgggaactgctggatcaaaggacaaaagaccaaaaatca

SEQ ID NO: 14334 - DNA, 1047 bp, Homo sapiens
tctagttactgtacgtctcaaagcaagctagggcctggcccagtagagaggctctggtgcctgcttctgcccaggggctccaggggtgtgtgcagcgctggcatcataggaagtccctcggcaactggcatgtgtacccagcgggctccctgtgagtgtgcaccctgttacctcgtgagctcactggggctcacatggcttgttaccatccccacctgaaggccaatccggtcctccggcctgggctctgggagattgcttacctcctggagagttccagcacgagcttacactgccgtcgccacattttgcctctcagggagccgtggcaggttgcacggtggaaccggagtagtatagaaacttgctgatatcagccggcacagagcaggaacacgctaaaaaattaatgtccgtgtgcacccacagtattcaagagttttcacatcattgtcagaatactgtgtaatgaagaagttataatatgtttctcctttagtccgtataaactcaatgctctagaaagattagattccagatttctattagaactactactatagctcgctgcagtagcgcccgcccccgcaagagcagggaagataagcctttaatgttgttggggtttcagagaactatgagatgcgtgaaaacacattgaggctaattctgcatgcgtttacattctgagaggaaaacccctttgagagaaagccaggtgaaatcgtttttggaatgaagtggggagcgtggaggctgcttgtggagtggtgtttccacaccgaaacccggagacctaaatagggcgcaacctgaactgaaaccggcaggacatggctgtgtgcgttaattggaaccacagcacctcgggtgagggagggtgtcaagtaagcctgcgagttgcgaattagaggacccaggagtaatattccttttttcacaatttgggaaggagcacccgggagatggacagacggaaatggaattccagtgtgattactgatgaactactgttggattggacaggggctcttcacacacacacac

SEQ ID NO: 14335 - DNA, 1049 bp, Homo sapiens
tgtaagatattcgcagttgtgaaacgaccactatctaagaacgtttttttttttttctttttgagacagagtctcactctgtcgcccaggctggagtgcagtggcacaatcttggctcactgcaagctccgccttccgggttcacgccattctcctgcctcagcctcctgagtagctgggactacaggcgcccaccaccacgcctggctaattttttgtatttttagtagagacggggtttcaccatgttagccaggatggtcttgatctcctgaccttgtgatccacctgcctcggcctcccaaagtgctgggcttacaggcgtgagccaccacgcccggcctctaagaacgtttttatcaccccaaaaagaaacgccacatccatgggccatcacttctcactcccacctcctcccagccccgacagccgctcatctactttctgtttctgtgattcacctattctggactgaaatttctttttctcgtggactgcaccccactaaagctctgtggtctgaacatacactcgcggcatgtaatgatctcctttcattaacacaagaggttcatttgttctgtttgtttccagtgtggtggtctctctcttccccttttcaatttactttttgttttgtcttttttgagagtcttgctctgtcacccaggctgtagtgcattagtgtgatctcaactcactgcaacctctgcctcccaggttcaagtgattctcatgcctcagcctcccaggtagctgggattacaggcctacaccaccacacccagctaatttttgtatttttagtggagatggggtttcaccatgttggccaggctggtcttgaactcctaacctcaggtccacctgcctcggcctcccaaagtgctgggattacaggcgtgagccactgcatccagtcccaatttacttttatttgtcatatctgtgaaacatttgcagggttcagcattaacactaaagagagcatggagaaggctggcctggagcccgcctgcacccattccttccccagcagccacagttgt

SEQ ID NO: 14336 - DNA, 1029 bp, Homo sapiens
cggatctgtggtactgagaatggccatggtcacagcccggatgagcattgcctccttcctagggagacacatggcctggaacacacagcggctgcagccgggcagccttggagcataggttggtagtgctttcttcttgacaaagctcccactctgagtgcctcctccccagctctgctttcttaggctttgtggtggaaggggcaagggcagcccaggcttgcaggaggctctggagaaggttctgacctcagactgcaaagcggaccttggcactcagcctcacagacacttcaatatgcagatgatttttttgtgtgttttttttggtagagatggggtctcactatgttgcccaggctggtctcgaactcttcagctcaaacaatcctcctgcctcggactcccaaagtgctgggattggaggcgtgagccactgcacccagccagatgatgttttcaatctgagtaaaaaggtagttttagaagatgactgggcaaagaaagagtgtctttgctagctggtgtgtaacataaagtaaagaaagagtgtctttgttagctgttgtgtaacacaaggcacaagatctaaatgaaggtcagtgataacacttttcttttttctgattaaataattgtctcagtagtttacagagaacttacatttgtgttttcactttcacgtctgtgtactcatgatatgtccaaatcatgcatttatcttatagtattgtttttaattctggttaacaaatatattaagccaggcatggtgtcactcctatagccccacctactgggaaggttgaggtgggaagactgcctgagccaaggagttcaaggctatcgtgagctgtgattgtaccactgcactccagcctgagcaacagcaagaccctgtctataaaaatataaatactatatatgtatatggggccaaatgctatgttctgtatttaaattctaattacttgttagatgttaaggttgtcaatatgctgatattcagactgagaagtgatgaattca

SEQ ID NO: 14337 - DNA, 1030 bp, Homo sapiens
gcctcccaaagtgctgggattacaggtgtgagccactgcgcccggccaccaaatatgaaaacattttaaaagctatagaaggtttttgttttctcatatatatgtatatatatgtgtgtgtatatatatatatgtatatatgtgtgtgtatatatatgtatgtgtgtatatatatatgtatatgtgtatatatatatatgtgtgtgtgtgtatatatatatatatatatatttttttttttttttttctgcacagctttatgtggtaggattgacctacaatagattgcatgtattattcaggaaggtgcagtttgccaaatgttgacctagggatgcccctgtggatgcatccgtcacccctgtgtctgtgcccctcgggactcctccctgcaccccctaaccctctggtgtccaagcatctgctgatctgttatctgtggctttaaagcctgcagaaattaaacacctgtacaaagcacgcataaacagatgatggaatacaccaaaaagtccagaaacagccctgataatcaatgggagtttgttttatgataaaagatggcatttcaaatcagtaggggtgggaggtagagtgttggcagctaggggtcatctggagaaaaacataagccagaggtagatagaggcgtcatagccgcattcaaggcaggtcagagatttaaatataaaagagaccccaaggcaaatttgatagcctcatactggggaggctttgtaagtttgtttccaaatccagaagccatttatgagaaaagattcagaaatatgaaagattgctaagtataaaaatgacagtttttacatttcatgaaacaaccataaagttgaaaaactgtggaaaaatggaaattatatcagcgataaaaggttaatttctttaatataaaaatacttccggcctggcacggtgactcacatctgtaatcccagcacttcaggaggccgaggaaggtggatcacctgaggtcaggagttcgagaccagcctggccaacaaggaaaaacccc

SEQ ID NO: 14338 - DNA, 1072 bp, Homo sapiens
ctaactgtagagagtagttaatttttgaaccagagaatttccatacttggtacacagcaagatcctaagatggtattgaatagtttctttcctcaaaataatgtctgacttcaatgtaataaaacatgtatctgaaacccatagttatgaaaacatctgttttttagtatttagtgaaaaggtaattctttaagaaatgcaaatcaaaaccacagtgagataacatctcatgccagttagaatggcgatcattaaaaagtcaggaaacaacagatgctggcgaggatgtggagaaataggaacgcttttacactgttggtgggagtgtaaattagttcaaccattgtggaagacagtgttgcgattcctcaaggatctagaaccagaaataccatttaacccagcaatcccattactgggtatatacccaaaggattataaatcattctactataaagacacatacacacgtatgtttattgcagcactgtccacaatagcaaagacttggaaccaacccagatgcccatcagtgatagactggatgaagaaaatgtggcacatggaatactgtgcagccatagaaaaggatgggttcatgtcttctgcagggacacgggtgaagctggaaaccatcattttcagcaaactaacacaggaacagaaaaccgaacaccgcatggttctcactcataagtgggagttgaacaatgagagcacatggacacagggaggggaacatcacacacccggcgcctgtcaggggttggggggctaggggagggatagtattaggagaaatacctaatgtagatgacgggttgatgggtgcagcaaaccaccatggcacgtgtatacctgtgtaacaaacctgcactttctgtacatgtgtcccagaacttaaagtataatttaaaaaaaaaaaaaggtaattctttttatccaatgtaaacttttttgaaggtaaaattaaaacttttatttttcttctttaccttttttataatataaaatttacgattttaaacatttttaaatgtgcaattcagtggcattaagtacatttacagca

SEQ ID NO: 14339 - DNA, 1102 bp, Homo sapiens
gcagagcattaacatttggaaaatttgcagcctgacaatatgatagaaaagaaaaacccattttctggggagaaattcaagctggctgcagaagtttgcataagtaacgaggagccaaaggttagtcaccaagacaatggggaaaatgtctccagggcatgtcagaggcttcgcagcagcccctcttagcacaggtctaggagggaaaaatggcttcatgggccaagtctagggccccactgctctgtgcagcctctggactggatgccttctgtcctagctgctgccactcaaactccagtcgtggctaaaaggggccacatacagctcaggctgctgcttcagcgggtgcaagccggaagcctgcacagaattcaagaattgaggtttgggaacttctgcctagatgtcagaggaagtatggaaacagctggctgtctaggcaaaagtttgctgcaagggtggaaccctcatggagaacgttagggcagtgaggaagggaaatatggggctgtagcccccataacagagtacccactgggtcactgcctagtggagctgtaagaagagggccaccatcctccagatcccagaatgtagtcccactgacagcttgcactgtggcctggaaaagctgcagacactcaatgccagcccacgaaagcagccaggaggggggctgtaccttacaaagccacaggagcagagctgcccaagaccatgggaacccacctctttcataagcgtgacctggatgtgagacatggagtcaaaggagatcatttgggagctttaagatttaatgattgcctcactggattttggacttacatggggcctatagcccctttgttttggccaatttctcccatttgaaatggaatcatttacctaatgcctgtacgcccattgtatcttggaagtaactaacttggttttgattttacaggctcataggtggaagggacttgccttgtctcagatgagactttggacttggacttttgagttaagactttgggggacagttggaagggcattattgtgttttgaaatgggaggacatgagattggggaggggccaggggcagaatgataatgg

SEQ ID NO: 14340 - DNA, 1045 bp, Homo sapiens
aaagttacaggtgccagggataatatcttggctgcgtaacttgtatcttaccaataaaacttagtgcgttctgttttcctagaatttaagagttacaaatattgatgcttttagtgtggaatttatatttacaaaagtaattacttccagaaagttttctggctaagtcacctcttaaggagatccctgtaaaattcaccctttaaaaaagaaaaagaaaaagccaaaacactttggaatcctgagtctgaatgttaaccattcttccccacaaaaagtagtgtctgcttttagtaaactactttcaagtattttaaattggaggaattttcttttggaagctgttgatgtaaaagatcttaagtgaagaagaaagacttggccttttgtattgcttgaatattaactgtcttggaaggaagttatgctacaagaagtcatactttcataaaattatttgcatctgtgtcaaatgcagtttagtcagaacgtaagacataataggtgtggacatgaactctggagtgtgaaataaaatccacagttacttaagcagtctgttttgatggaaagtatcttgggataatactttcctcagtgtgggattttgttcattttagatggtgcaaggaagtatcagtctttaatttttttgttgttgtttttatcaatcatttgctctgatggtatgatgcatgggcttcaggactccagctgcaccactgtataaaactcagttcaggtttgctagcgttcttggttaatcttcaggaataacccaatacaattatttttatatgtactccttggaaactgtggtcgtttttcaatgatcttggttagaaaagaatgccagtcccttccatgagtgaaaacttgattttgctgattgataattgttttggatggagctctagagtcgtggggaagaagcaggggaacacagtgagtttaaaaactgacccaataacttcaatttcacaattgggacatttgccccagaagtaggctgtggtgacagcagatctcaagtgtcaaactgact

SEQ ID NO: 14341 - DNA, 1024 bp, Homo sapiens
ctgaggcaggaggattacttgagctcaggagttcgagaccagcctgggcaacatagtgagaccttgtctctatttaaaaaaaaaaaaaaaaaaaagtcttaataagaaggtaaatgtgatagcttggcaggcatatttagtgaacttagggggagaggtgggagtgtgaagtaatgaagcagattatgagctcagatttgctgagtataagcacaaagttttgcccgttggtttaaaaaaatcaaccgtgcaagttacagcataaggaaaactgagtgactatcagttaatcacttaaaaatctagagattttggttaaatttcatgaaccaacatcatcttttctaccttatttaatgagtgtgtccaagtgaaacattttttccctataaagttgataaaatgtcagtattatgtacttcacaactatatcttgtcaccataaaaattcctgtgataagactttttatagtaatgtatgaacttaacagttttatcaaattcaagatttttatgagttaagcatttctggaaagatgctaaaatcataagcatgacatgaagatctgcataaaattcaaaatggtcttttttaatggtgatgtattcagcattgtcatttatttgtaccatgttttaatatattttttctaatgtagtttcaacgcctttttaagagcatccactttttaaaaaaatcctttgtcatttcctttaattaaagcctggttagtattgtagagtggcctcatgccctcatgcacgaattgtacatgtctgtccctgtatgtcactgtatagtctaaatgtccttgaaaaatgatttatgcttcattttctcttattgctgataaatcttaaattctgtttagtatttttaaaaagagatcacttaacatgctaattggactcaaaatgcacctagaagagttcgtaaaactagtctcagagtttctaaggtcagttgaattggccaataccacattgcttaattaccctgaaaagcatttctgaggattccttg

SEQ ID NO: 14342 - DNA, 2536 bp, Homo sapiens
ctgttcacattcttgacagaatagaccctcccaggtcatctgcacttctgatatcttttgaaagtgaaatataccattaaaaaaaagtccagctatatgatgaagctgtcacgtaatattagtatattttctatttcaataacaaggtgatctgattttgtacaaagtataattaatgtaatacaatctgcccaaactttggtgcttccttttcatttaattcatatatcaaaataaaaatattatgcaatactagaaaatactcatggccattcatagccatgcagtcttaataaggctaataaaaatagtgactttagtctgtaatagtcctgcacatagccgccttatatttttaagaattttgttggtttctgagattctcaattctcttttatctctgatcagataggatttgggtcttttttcaaaaggtgtaatgcatttatcttatgctttaaaaagtagagacgcttagctagtgtccatgcacacttctcatttccaaggtcagagctctatgatgtctgcaaataacgaatacaaggctattgtcagtccttataaataagaaaatattatttgtccctaattctgtagttttcactctcaaatgcggggttttttttttttttttttttttttgcattaacagtaaccccaagaaaggcatcagggttctggagtggttgtttgagtgacacagcacaaggccttgatttcatcatgcttttgctgtggatgtagtgtagcttgctgaacaggtatggaagctgtctttgctgttaagtacttctcccgtttgtttatcaacctgcagctaacaggatgtctgcttttttacaggtttatttcacagagcagtgtacattcttgtcttccaggggaacttcaacatggagttacttttgatccctcagttttaattcagtgtctaaaggtttacaagttcaacttactctattttattcagctctttcacttactctgccatcacttcctacttgaatctgagttttagctactgtagaggtctcagacctttcctttttagtactattagccaggtaaaactttggttcttgtgagtggtagggatgagtttttaggacagtattcaaagcctttttaaaggaaccaactactcaaatgctctacaatgccaaaaatacaatactcctgcaggttttcccaagcaaggccaaaacaatcaaaatctgacagaaaaacacagctgttcagctctggaatctgatgataggctactttttaatgtcaggacatccttctaaacttccacttacagtgtcacatgtaagcatgaaggctggctcgttggtgagccattgctttgtttttaggaagacagttatgaatgccatggacaatctcagtacatgttgtttgttatgattttattcacgctaaaggaatgggtattaaaattaagtgcatataatatagaattcagtttcaagtctgaagttagcgtaaatttagattcttcagactaacataaaacatgattttgagaagttaaataggaagatgccttttttagaagtttagcatatttagtttatctcccaaatcttgcttagaaatcaaatgtatataagagaagttagttacagagctagattgattaactacttctttaatgaagatttgctatgaatttgtttactctttcataccaccttcagatagctagtcagttcagcaggagcagagaccaggttagcacgcggatggggtgtaattcagtgtttttgtgttgtacagcctgagaaatgccagtggcctgacagcagcagacattgcacaaacccagggtttccaagagtgtgcccagtttctcttgaacctccagaattgtcatctgaaccatttctataacaatggcatcttaaatgggggtcatcagaatgtatttcctaatcatattagtgtgggaacaaatcgaaagagatgcttggaagactcagaagactttggagtaaagaaagctagaactgaaggtgagaccgctttgcgggtgggaagagcacacttatttttcctttctgtaatatgttttctttttatggctgagcgcaccttcgagatgagaccttcacttcaggtggtaatgcgcctggtggattgtgcggtgacggtggagatttctcctgtactgccactgcgaagatgggacttaacaaaagggaatgtgagggaaatactgatggcccaagtgtaaatgtctatgtggaactttttgagcacccatgtttacctgccatgaattagattttttaatttgttgtatctgtttgaaatatatctattaaagaaaatctgccactgtgcctgaatttttttttttttttaatttgcttcttgtaaatgttcctgggcttataaaaattgctgatggtctggcagtaaaacattttcacattcgggaaggtgaatgttttctgtactatttctgtactatgatttgacctcagtggtctctgtacctcacatgtgtgttgacttatcacagcaa

SEQ ID NO: 14343 - DNA, 1072 bp, Homo sapiens
gataaaatgtggtatatataccccgtggaatactatttggccattaaaaaaacaaaattctgttattctcagcaacatgtatgatcttagaagacattatgttaagtaagccaggcacagaaagataaatactccatgtactgtacttatgtggaaggtaaaaaagatctcatagaagtagagagtggctcatgcctctaatctcggtgctttaggagtctgaggtgggaggatcacttgaggcctggagtttgagaccagcctgagcaacatctctcaaaattaaaaaaaaaaaaaaaaaagtagccaggcatggtagcacatgcctgtatacctagctacttgggaggctgaggctaaggaggatcccttagcccaggagttccagggtgtggtgaactatgattgtgccactgcactccagctggggcaacagggagatactctgtctctttaaaaaacagtggttactagatggaaagataaattctagtgttaccttgcactgtagggtgactaacagtaattttttattttttttgtatggctaattcagtacaaatggaaagtgtttgaggtgatgcatatgcaattatgctggttttttttaatccctatacattgtattggaatttacaatgtaccccataataaaggatagaggaatatttacagtatcatctatttggttaaatgttattcagcagttctggcctgctgcctttttttgtataacctatggcccaagaatggtttctacattttttaatagttgagcaaaaatcaatagaataatattttctaatacataaaattagatgaaatttcagtttcagtgttcataaataaagctttatgagagccatgctcaattgccttgaggctgctttcagcctacaacaaaagaattgagtagttaggactgagaatgtatggtctccaaagtctaaaataattactacatagtcctttttagaaaagtgccttctggattagatgatccttaatgatcatttcaggccaatttctataatgtgcactacacagttgagtgaccacttgcaagattttt

SEQ ID NO: 14344 - DNA, 2189 bp, Homo sapiens
gggtcttcctgtgttgcctaggctggtctcaaacttctggcctcaagtgatcctcctgcttctgcctcccaaagcgccaggattatagggttgagccactgtgcttggcttagaggtaataaattttaatattctattcagaataagaaaatatagcatataagcatttgtatctttagtaaagttactgccagtttgattttttttttttgcaagttacttagcagaacatgtaattcacagtaaagatgattctgtgttgtaccacattttaatattcctgttttgaaagaatagtagagagaaaatgggtggcctgctcagtgattgcttttcgtagtcttggtgaatgttacaggagattgaatttatagataaaagcacagtcatcgtagtttccacagtacattgcagcacatttagcttgctagcctaaaaatctgatcatgctgagtttcttttaaagaaagttaattttagaacttcaaactagaaccagtttgaacctcaagttgaccgttgtctgagttttaaaaatctcttcccattttcaaagatttttcaaatggatgtaggagaggaccaaggaggtaggctatagctgtagaacaacacagtcctattttcagaaacgaacagacacacgttttaggtcaggcacagcccatgtatccaggtgcatcaaactggggatgctaagttcaaaagtgcgtctgttttgaagatttcatctgaaaataatgtgtacactttcattactaccagtttgcattcaaaatagtttttgagactctttaaactcttctggatactttaattttccctttggaatagtgtgtaaacacagtccggatgaactttactactgatacctcacttgaggttgacaggagtggccagcagttagtgcctatggtcatgtaatacactaagtcaatacctgtggagtgaaatccggtctctataaaaaatacaaaaaaaatggctggacgcagtggctctcgcctgtaatcccagcactttgggaggctgaggtgggtgggtcatctgaggtcaggagttcaagaccagcctggccaacatggtgaaaccccgtctctactaaaaatacaaaaaattagctgggtgtggtggtgggcgcttgtaataccagctactcgggaggctgaagcaggagaatctcttgaacctgggaggcagaggttgcggtgagccgagatcacgccattgcactccagcctaggcaacaagagtgaaactccgtctcaaaaaaaaaaaaaaaaaaaaaagaaaagaaaaactagttgggtatggtgttgtgtacctgtggtcccagctactcaggaggctgaagtgggaggagcacctgagcccaggaggtagacgaggctacagtgagctgtgattgcaccactgcactccagcctgggtgatgggagtgagaccctgtttaaaacaaacagacaaaaaaacctgtggattgaagggtaaaggatggagtatttaaaaagtactgtgacagaacaaagtactgtaagtactagagttgagtgtggatggaaacacagaacctgtaaatcaagtgtttcatttacgtgctcaactcctactgaattttagcaattaaaacatgaaaactgaaatattggttaacaaatgaaaatagaatttaaagacctgaacttcttttatgatctttaatgattatttgttctaatctttgacttggaaacccaaattattttcagtctaacgtacttgaaatttaactattaaaaaagttggaggaactcaaactttgaagttagggctccctttctccagataaagcacattgcctggtttattgtaaggcacttagaacatgtaaccaaaaacactcaatttaggaataggaatgattgttttacagctaagtgcgctctcagagtcttttgttttacacccctctcaagtttacctttagatatttttcttgttgtttaatattttgtgacagatttggcaacttttaaaaagttgtttgaattgaatagtgcataaaattaatagatgtttttcagaaaatccattattaagagtagaggaatgaggagaaatattcgttctaaagagaatcaaaaccacaatgagagattgtcttacccccgttagaatgacagttaccaaaagacagtaacaaatgctga

SEQ ID NO: 14345 - DNA, 1050 bp, Homo sapiens
ttcttcctattattaactgaagaatatatttaagaaagtcttcataattaaataagagtttggataccaaagggttaaaaatacacatgtatttcttttgctgaagatatcttagatgtttgctaatgttttatctttacaaatggacaatttagtaatgttttttatctttttttaatgattccatgtatttgcttatttccatctaggaatagttactaatgtatttgagatacagcataccaaattttaaagtaaccagaatcgtgagttgatggtttttagtccatactgttaaacttatgttgaaatattgacatatttaaattggcttcatgctaaaaaattaccaaaggtaatttaaaaggcagtgttttagagcagtagctcatggtcaaggtggtcacatgacaatggcttaagctcagtgtgcttctgcaccttatgttgtctatgtatttttaatccaaatgttgcctgcaaatatgtgatcccttattatttaagtttcctgtattatgaaccattgcccgttttaaatcacacagaagattctgaatctgtaaaaactacacatgtcaatgttttacagctacgtaattcgaattgacttgattttttcaagtaatcctagaaagggggagcattccatatagaaactgctgaaactgccacaggtgcttctccgaaaaccttacagttgtggcattgaatgttcagtatcgcttcctttctgcacacgaggcatactgttgaggtatttgttgcggtgattggttttaacgctaatctaggaattcagatagagatgctttagatttgcatgctttgcttacctaatttatgatatctacctttctatttgtaaactaacaatagctaagttgagatcagaattttaacagaaatattatttatataaaaattgttatcttttattgtcacatggcattaacaataagaaaacatcctgaaggtgatgtgacaactcggattctaaaaattatacttcaggtatttcctgatccgtggtttttcaaaattgaaaca

SEQ ID NO: 14346 - DNA, 1027 bp, Homo sapiens
acataataataagggcaagtacactaagtgtctgtggctagaatggtttgttatataacttacttgttaatgtaggttgcatctgtaagataacgcatttcagctgctgtgcatcgtattaaattttctagcaccacacgtgagtatgttaatggactttctttttcttttcttattttaaatcttgagttttggtgccaagttttctgtgtgtgaggctctgtttctggcttatatgttggtcattattatttgccattgtttacatctaaaaattaaaacgcacaggattaaatctaacttgtgaccaaactaaatgtttgtgtactttaaaggacctaaatctctgtgtatggagttttcagcaagcacgtgaagttgtcaccatccttaatcttgcttatatggtagttccatttttccactgcccccaatatttgagtgctgcttgcttggtactcaggtattgactggaagaagaggatatactattacaaaaagattgtcatctcatttttcttttgaacgatggaacaaataacagcataacattaagtcttaatgtgattttggaaaaagacttgaaaacttgctgtctgctgataattaagaagaccttttcactactagcattgtaaatagaattcgggccttggaatagctgtactttcagtaatttggtaccaattacttttggctgatttgtgtttattttcttgagagataagtggaggatgtttccatatcaaccagctagtaaaatagctttttgccactgagtagaaataaaaagatttagaatgaaaccagcatgacttgcatctcaggcagatttgtaggtccgttttaatactgcattatacggatgccagtgtttaatggcagagtctcagaacttttctacaggagaggatttcttgagaagccatttattctgtggtaaccagattttcagctgggctacatgtattttaacttaattatttttatcttaactgggatcatcagatagcttgagaagcatcga

SEQ ID NO: 14347 - DNA, 1024 bp, Homo sapiens
gtgtccaaacattcccttctgagaagaagccgttaggacagaaatcaggccaggactcagggctaccgcttgcgaagtccaggctttctccccagccctgctaacggctgccctcttacacaggtttcaggctcgtgttcttagaaatgtgctagtggtgcacaagatcccctaaccgttggtaagactcgtttgttgccagaggactaaacgagttgtttaaaatctctgttgtagcttttataccatattgaacagtatctttccagaattccaaatccaagtttctaaattgaacccaagggtaacaggtttaaagccagcgagccctgaatagctgatttttggtacgccaagtgattttcatccgttttatttttattggatttgcaacctgttcatcttatcgctaattaatactttcattttcacccagtgaattaataaaggcaataaatagacatcagcctttactcccaggtccaagttggttgaagagggtgttttgaatctgtgtactcttcatctcacaggagtgtttactgaaagcctgaaagtgctaagagaaatggaaaaagaaaccttgagttgagatggtagtgtcaggtgttttgtcttcaggtgaggtctctcctcttgaagagaattgcttgcagtcaggcatagcttgttccctaactgcattgtgattggagtgagggaaaatgagcagtccaggatcagagaacgtgggttgaacagttgcttggcacatggtaggcacttggtaaatttgttgaatgcgctaaattattttagccagaggctatcatggtattggtgcttggccacaaagtcttaacttgccatgttagtcacccactaggtgcattgctcagttatgctgtaggcttttttcccccatagggttttgaaaagagtaaaaaaatgtggagaatggggcctctattgattattcaatgagtattcagtgctggcttgtgtaaaagtgcacagttgtgcacactatagaaaatagtctttg

SEQ ID NO: 14348 - DNA, 1029 bp, Homo sapiens
cactggcatcatcatcctgtttcacaaaataaataaaaacagcagcattcatgagaattacaaatctcctgcccgttttcattactgagtgccacaatgccgatgtcacccgtcggaatctccacagctgcctccgctctgcatcactctgtgtttgaagcttgtggatcgtgcaccatgctgcattttgcaaacgtgtgcatctacaggtgctcctcaacttagagcagtcttatgtcccaatgagcacattctacactgaaagtgcatttaatataatatagatggagcatccctaatctgaaatacaaaatacgaaatgctcctaaacccgaaactttttcatcactgacatgacgtcacaagtgggaaattccacacctgactcctttgctttctgatggcttattgtacacaaactttgtttcctgcagaaaattataaaaaatatataaaattaccttcaggctactatgtatttaaggtgtgtatgaagcataaatgaatttcatgtgtagacttgcatcccctctccgagatacctcgttatgtatatgcaaatactgcaaaatctgaaattcaaaatacttctggtcccaagcatttcagataaaggatactcaacctgtaccccaataaacccatcgttaaagtagaaaaaatcttaagtcaaacgatcttaagttggagaccttatatgtatgtttatatacctgtaatgcaagtatatatgtatatataatatgtataggtatatatgcatgtgtatgtgtttgtgtgtgtgctttgcatatatgtgtgtttacaggtacatgcatgtgtgtgtgtgtgtacatgtatatgtacatgaaccaaatttctgtacttaacggttattttcagatttattaagcaagtttggctgtttatgggatttcttttatttactataatctgtttaatcttttactttttcaggatacagtcatgtaccacatgatgttttggtcaatgacagactgcatatatgacagtagtcccataaaatta

SEQ ID NO: 14349 - DNA, 1048 bp, Homo sapiens
ctttaccagctcacaggctggtccctgagcagctaccagagatccagaatagtgacccctgccgaaggctgtggggcagggagttccctgtctgagccaacactgacatgtagaattgtcggtttttattgggtgttgatatttgactatagtgggaagtgaatggtaggaatcctctgaattagctgagagggaagcaaaggggagattttcttttaaaggcagtgatggctgcgggcagggtacccttcttatgaatgtgctgccactggacgggaggcgggaggagggccgtgctgagagggctgcatgcacgcctggggctctgcgggtctcctttctccatggtttcacaccgtccttctcgccactgttgcggattcccttgctcacagttgctttaactggatgtgtacttgcctgcacttctccttccccctgtgttcttatgaataccaccaggtagatcggttcctggctgcccccttcacgaggcagcatctttcttgtagtggatttagaccaattcaaggccaaaccgatgctgtcattgtcacacgtcaaaataagcctctgtgaaggctgagctccattatcaacttgaaatatgggctggttgcgatatagttttctgatctgattatcagtttagcaacgtctgtatcaatttgctcttctcttattgtattgaatatcaataatgagttttgttttctagttggagataactaataaattttttgatcagttttctatgtatgggaaaatgcatattttattatttataaaatttatttatatcgctaggatcctgcttcacagagtttgactccagcttcttctgctgatccttccccctcgctattgaaactttttctgaaccatttttaatagcacgatattacctcatgtacatatgatttcatcatttctctttgcctggacatgtagttttttcctccaattttttgccgatataaataatgccatgcatgtttttataaatacaactttatatgcctctgaatatttcttgagaatagataga

SEQ ID NO: 14350 - DNA, 1060 bp, Homo sapiens
tttaagctgaatcaaaatcagttctttttttttcttttttttgagatggagtctcgctctgtctgtcacccaggcagtgtagtggcacgatcttggctcactgcaacctctgcttcctgggttcaagcgattctcctgcctcagcctccaaagtagctgggattacaggtgcccgccaccatgctgggctaatttttgtatttttagtagagataggatttcactatgttggccaggctggtctcaaactcctgacctcaggtgatcctcccaccttggcctcccaaagtgctgggattacaagcttgagcaaatgttcctggccaaaatcagtatttttcagattttaaagaaatgtaactccacaataattagtaagccctgtttgcagttaatgctctgaagcttttgttgccgcattattgtattggtcccatttgtcttttgagtttttataatttgaactcttacttttaatagtttatacgttttttaaagttcattaagaattgaagtaatattttctttaatttttaaaaaatttgttaagaccagaacttgtccgtccagctacgactttgtatcagcataacttgactggaattctagaaaccgctgtcagagccaccaacgcacagtttgacagtcctgagatcctgcgaaggctggacgtgcggctgctggaggtactgcggctctgcgtgttgggaacgccgccccggcaccgaggacccactgggccggggtgttctagcgagtgttttccatgttgtttcaggcacagctagccgttatctttctggaaactgggcagcctgagtaggaactccactctgtggcttgttactgcctggtcagcacatctgctccctctccaccatctgggtttccgtttgcccatcttgcagcggggagccttgcagggctgctaggcttaagctggagaaaacgcatgacacccttgccctgtgctgggcagcatatcacagatgcttagaaaatggtgctttcttctcatagtaaatccaacaggagcacaagacatggtgtacgatggtat

SEQ ID NO: 14351 - DNA, 2068 bp, Homo sapiens
tttgagaccagcctgggcaacatggtgaaaccctgtctctaccaaaaatgcaaaaaattagccaggcatggtggtgtgctcctgtggtcccagttacttgggaggctgaggtgggaggatggcttgagctggggaggcagacgttgcagtgagccaagatcatgccagtgtactccagcctgggccacagagtgagaccctgtctcaaaaagaaaaaaaaacagatctaggtaataaaaataactcaatagaaatactgaaagaacatgatggacaatattttcataatctaggaatgggaagatcttaggaagacaggaaactcagaaaccataaaggaagactgacatttatctacatataacaaaaaaatagatcagaactaaaatatggaccatactataaacaatggcaaatgattaacttggaaaaattaaatctctaatatttaatgattcacaaatggtcactattcctaatgtacaaagaatttttgtatattgatgagagaacaaaatgaatagcaagatgggtcaagggcatgaaaagaccattcacaggagaagaaaagcaaatggcaattagaactatgaaaatatgctcggcttcatttttggttaatgacagcaatataggataaccatgattccacctgactggcaaaatctaaaatgagccaggatgcaaaaacaggacatcttgcccgtgggagcgtcagtctacacagctgtgtggaaaggaaacctggcattgtctataaaaactaaaagctactttaattcagcagttgtgcttttataaaacaagtttatagaaataaaagtgcaattctattagggtgtatgattgaaaaatgagaatggctgcattgttgtagtggcaaataaactggaagcaacagcaattgaattttctccttactgctcagtttcctttctaacggcagtgatgtaggtgcccgtcagggtcagggcaggggagctgcatgccagtgaggaagaaagctcctgagcacagatggttcctgggggagccacacaggggtcacttctacagtgccacctggctggtgctggccccttgtacacatgggtacatgtacagcaaggtctgcccatagagcttgggacttgtctgtgaacagaggacgccggcctgggcacctctgtgttccaggctttggggctttgcaaaagagagactgcaagggcaggcagactgatgggaggagacacacagctgctgcctgtgagggaggggaaccccaaaagcctgcaccgttactgaggaagagctccgtgtggcccaggaagcctcagtattatgctgcagaggcactaatggacattctgaatctccaaggaagacataacttgtttttgttatactttagttttaaaagtttaggaaatacatagttcaatttagagagatttctgtgtttcatacaagttttattgtataaataggtaagactccctgtgtctggagaacttggctttctagaataacttactctttgatgttgctgttggttaatattttgccataaatatcactcttgaacatttccatgcccctttgctttcagttttttgtagcatcagatccaacagttaaaacagatcgactgtggcacgacaagtatactttgaggaaatcgatgattccttcgtttatgacgatggatcagtctaggaaggtaggattagaagagatttttgtgattttgatgttttatggctatgtatacttagattatgtgacaaaaccaattttcagttaaaatttcatgcgttttgagattgttaacgttctggagatgaagtaagtgcatgttaattgaatacatcagtatagtatgtgttcaatatatctttgagttactagaattcgctccatactgtagcagatgctcttgttagttttcaatcaatagccaatttgtagcttacgaatatttgtagatttgggcagtcgttttaaatttacataaaagtaatcatagaatgtttttctttttaggtccttttgataggaaaatcaataaatttcttgcaccaagttt

SEQ ID NO: 14352 - DNA, 1058 bp, Homo sapiens
ctcttggtagctgcctgcgtgattggcaagttgaagttggaattttttatggtctgtattaatggatctgattctcagaagttgcttgctaagaaaattaccctcttcatttctgtttttagtagggaggccttggcatttgtccagcaattaatgagaaatcatggtacaattatgttttattttttttcttaattctttctgcgtttgacataatggtgaaaattaaagaaccttgagtggaaaatgccttagtaaaataaaagcgtatcgcaattatattctgaccttggtttttttccctctataactctatatttttcacagaattaattatattctaaagcgtacccaagctgtgtgcttgctacgagatgtttgctgctggagtgattgcatgctcctttgcccttagatgaagcagtgctttcataacttctaaacatgcctgaattgcctgaggttttttatggcttacattttctttattgttcatactgataaaaatccggctgtactccaactattaggataaattagtgtgttgtctgtagaaacgagctcttctgtctaactgaataacagacatacaatttatatgcagttaatctaatctgtagcatggcaagctacagagcagtcccagcatgagcgcggtgacttcgtcactgccgagattactcaacgggggcttatttctgtcatggacaattgaagtctaggttaagtcgatgacgcctccgtgatagtactgctgtttacccctgaagggcaatatagatctcaaaaggctaaaatagatcagtgaatgcttcagtcatttacattgatacttaaagataagacattttagttgaaaataaacgtagcagcctcttccctatggtcataaaaatgttggcacttattcatgtgcctacttaccaggagattggctgtacataattgatagtgtctggcccttaaaaggatcaaatagaagattttgacatcattaaaattttgtttcctgaaatacttactcttggaagtagatttctgtgaaagaaaaaaattca

SEQ ID NO: 14353 - DNA, 1053 bp, Homo sapiens
aagaatccacacatactttataataaagattatatataggtagagaggtgtatgtatagctgtctaatgtataagttcaccacattggcaggatacaagctcaataacaaaaatcatttatatttccatatactttcaatgaataatccaaatatgaaattaagaaaataactccatttaaaatatcatctaaataagttaaatacatagtaaaaaatttaaccaaggaagtgcaagacttgtactctgaaaagaatagatcattgttgagaggaatgaaaaaggcctaaataaatggaaagacattctgtgcttatggatggaagatttgatattgctaagatggcagtgcttccccaacatgagacacactttcaatgtttgatattgttaagatggcagtactcccccaacacgagccacactttcaatgcaatgtctatcaaaattccaacagcctttgcagaaatggaaaagctgatcttcaaattcacagggaagtacaaggggccctgaggccaaacaatcttgtaaaagaacaaagttgaacaaattttctgattttaaaacatgctacaatgcaaggtaatcaaaacaatgtgatactggcataatgatagacctctgggtcaatggactagaagcgagagcccagaagtacatcttcatttttattgattttcaataaaggtgccaagattactcaatggagataaaaagcgtattcagcaaatgataacaggacaactggatgcatgtagaagaatgcattgggatctctgtcatacaccatatgtaaagattaactcaaaatggatcagacacctaaatttaagggccaaagttataaaacttagaagaagatatagtggtaaatctttgggaccatggatttggcagcagtttcttagatatgtcatcaaaagcaccagcagtgagaacaagtatatcaggctttatcaaaataaaaactatgtatattaaagggcacttttgagaaagtgaaaaaaacacagagtgggagaaaagtatttccaaatcacttacctgata

SEQ ID NO: 14354 - DNA, 1014 bp, Homo sapiens
ccaaggcccggggggcctcttctctctacatagagcggtgtttctcacactgtctgttgtagccagttaatgggttatgaaaccagttaatgggctggggctagcataccataccaaaaaaaaagtacaaggatggattcacaggacttctgcttttcatacatgtttgtgccctcctttgcaccatgaagcgtgaatcttagtatgtctcaagtagaaaaggcatgaaaagtcatgtgaactttagattgtgtagccggcaattttttgctactttttgtttctgaaaaattcctcagcagtcctaaagagaagagtgactcacacacttgtgtaaagccagggttggagtctggacctcctggtttctgaatcatgacatgttactgctgcttctaggtccaaagtggtattaactgtaagaaaacaaatgctctttatctcaattacttgggcgtctttggttggtgagaagtgactggtgtgtactatgagtgtaaatgtggatgtttttgtgtattttcctccatttctcccaggaaggaaaggaggtgagctggcctcagctgtccacgcctacacaaaaacaggagacccgtacatgcggtctctggtgcagcacatcctcagcctcgtgtctcatcctgttttgagcttcctgtaccgctggatatatgatggggagcttgaggacacttaccacgaagtaaggatcggtgttcggttctgagacttggatttaaaaagcatgggcacgcagttatgctgtttcatttttcccctcatgattaccatgttctcctaacaggaatgcaactgcacttccattgaataccatatacattttacacagtgcctcgacagctggttatctcactgaacagcagataagttcacgagttctttggttagtggagaattgtcccagtttattcctcagcaaggtggaatcactcgtccgagtttactagcacgtggatggcaaaacaggacgaggcctcctgagtcttgggg

SEQ ID NO: 14355 - DNA, 1863 bp, Homo sapiens
acagttagcagcatttgaaacatgagtgtcctgaaaacagaggattgggtttccctgttggctcgtaatctgctgattacgaaatggctctggatgttacctgtacctgtccttgcgtagaatgcaaaggtgaggagcatctgagagctggaggacatcctggcacagtattagcccccgcagtagtctccaccatctgccccactccgcctgtccctgtgtgtggctcccgcgtccagcctctgtccacagctgcagattcatgtcgtgtttgacagctgtgcgttcatggcacagcaggccaacctctagactgagactcgccttgtttctttctaatctcatactctttttcatcttgagcttatttattgagttagtaaatttcatcggggtggcaaatatctaatctgaagctaattgcaccataatatctattgtctgttaaaatattgtctagtaattactgtctttaaaaaatgattttgcaggtactatggaaattacagaagcagctctggtaagggacattttgtacgtctttcagggcatagatggcaaaaacatcaaaatgaacaacactgaaaattgttacaaagtagaaggaaaggtacagtaacataaaatctaagttaaaatattcagaaagaaaaaacatgtcatgaagtccagatagtggctgttgattgataaggtggtactggggttttgcgaatcggttgtgaggtgaaattgcactgtggaattctggtttctatttctgtccattgtggctcgttcagttttgttatggggaccctttgtgattaatgtgtgcctcctttcctcacgtctactgatggggctgccccatagctgatttctgcatcctgctgtgtgatggctgaggcacccaggggacagaggtcccttggcaccttcggcattgatgcaggattccaggtcaggggtcttcacccacttttgtttcctttttccataatctgcctttaccatgcccatttcttgtggtgtgggtcacactgtggctcttagccctttcacagcgtggctgagatcacagaccttctctgccacaccgcaggccaactgcagggtggtgtgaaatgagctcaccatgccctttgaggtgctttccatcatgctgtcacttaatgtgctttccttccctttagtgatgggatcttagttttaacttttatgtcttgaagcctaaggattatagtattaaaagtagaagtgcttgagaaaaatactaattaaagctctagtattgctttttaatgtttaacatttgatgtatttactttttaggcaaatctaagtaggtctttgagagacacagcagtcaggctttctgagttgggatggttgcataataaaatcagaagatacacggaccagaggagcctggaccgctcattcggactcgtcgggcaggtgcgttcatggttcctaggatgctgggatgctgcgcactttgggaaacgcttactctagttgaaatcttactgtgaaatagctccttctaaggctctttccaagtaaagcagctttgagagtcaactttcagggtccactcaagacagtagaaaccacagtaggtgctgatgaggacactgaatacagcaggttggctcaggaactgctggaggactgtaaaatacagagaaaatggtgagacagagctggccatggggagctggcattgcccgattccaaacgctcgaagggggccctgcccagctgctgctgcctcctccagaaggttgaggaggggccctgctgggacggggcctgccaacaggggacactcccagctgcgtgattccccaggcagcacggtgaggcaggatttgggaa

SEQ ID NO: 14356 - DNA, 1075 bp, Homo sapiens
agctcgcagagattttgttttccattttactgctaggaattcctagagccctgattgtatttaagtggataaaatgtctgcagagattgtggtgattttctttcctgtgattttatattatttatgtaagaaagagtatttggagtatctcagttgttgtatgtatacttttattaatttattaatttcagagatttatacccctctacatatttttgactccaaccgaaatatattatttgatgcaaaatgacttaggttccctcaaagacagcagaaaaatctcagcttgcattaactattagaaaatgcattttttggccgggcgcggtggctcacgcctgtaatcccagcattttgggaggctgaggtgggtggatcacgaggtcaggagatcgagaccacggtgaaaccccgtctctactaaaaatacaaaaaattagctgggcaacggtggtgggtgcctgtagtcccagctactcgggaggctgaggcaggagaatgacgtgaacccgggaggcggagcttgcagtgagctgagatcgcgccactgcactccagcttggcgacagagcaagactccatctcaaaaaagaaaaagaaaaaatgcattttttgtacatccaggagaatttgagattaccttgggcagtagcaaaggtacactttttagaggctagtttgcaaaagtcaaactggcagctggtgggatattgcagactctcagtgaatccttgttctttggtctcagccccacagggctcctcgtgggtcatggctttgtggtttggaagagacgctggccccacagcattcacgctcactgtgcaagactggatgttttttgtgccaatgtggccacatagtttaggagcagaggcagtgtgtggtctcagtgtgggttccctaggcctcgacccagaccccagggcctgctgcttctggtgacccattctgcataagggagggcctctgcagctctgagcatctctgttctcttatatttgggacttaatatcactgttcaggaagaacttacataaacaggaacatctcactttcctaattcttgacc

SEQ ID NO: 14357 - DNA, 1086 bp, Homo sapiens
cctgcagggctgcgccccctggaacggcttcccagagcctccacaagcacgggctcctgcagggctgcgccccctgaaacggcttcgcagagcctccactagcacaggctcctgcagggctgtgccccctggaacggcttcgcagagcctccactagcacaggctcctgcagggctgtgccccctggaacggcttcccactgcagggctgcgccccctggaacagcttcccagagcctccaccagcatgggctcctgcagggctgcgcccccggaacggctttgcagagcctcccagggtgaatgccatctatgctggctgctctctgttttggttttattatataaataattgttatgatataataggttttgtaatttgcattttaaggagacatgcttagtaatttgttttgccacctgtttttgttgtttttaaatattttaaatggattgttattcattatagatcaacaaactccatttatgtaaacccctaattagagcaattgacagctcaaacctgaaagacgattacagcactgcacagagagtaacatacaaatactacgttggacgcaaggctatgtttgacagcgattttaagcaaggtatgttgctaatctttttttcccagtattttaaataagacattgcattctgaacaactttgaataatatagtttcagagaacacaattactgtattttatttttaaatgtggaccaagttatatatacatatttgacactaaagctgattaaagggaaattatattgaagattcttaatccatactgggtctctgaagtgcatgctggagtctcacaggcattacagacatcgtttctgagttcactgagcatgactgttctcagaatagaatgtaaatcattgttttctttatttgctttttgaccctgtaatagatgctggttatgttgacataggaaatggagattaggacaacatttagttcagcgactgacttcatgacctacacatcccgcatggagatgacttagaagcaggggatatgcccttggacctggtgtcaaagctctcgtttaaacagcctcgtgcagtgt

SEQ ID NO: 14358 - DNA, 1031 bp, Homo sapiens
ccctttcagctgtctggatttgttccactgtgggttgcttcctgcctgttcggtgacttcatgtaaatggaccaccacagtgtgtactttttgtgtctgccttggtgggactcatcctctttgtgtgttttactggtttgttttgtcgtactgatgagaagtatttttccatttttcttttctttttttgtttttgttttttgagacggagtcacgctgtgtcacccaggctgaagtgcattggcccgggtttgagtgattctcctgcctcagcctcctgagtggctgggattacaggcacacaccaccatgccctatttttccatttttcaaaaacggtttataacaattaacttttacgcattgttgctgcaaatgaggcagtttttagctggtgccgcggaggaaggatgttactcaagtagttaattgggattttcctggtttgttttctcttttatttttacccatcaggtaagacatcttttttcataatgttattttgtttgatgaatatgacttgatatgaataagttgatatgaatatgacttgagctttgggacttacctcaagatattaatttgtttaggcagtttattttgtgatttataaataaaatttttatttcctatgtaacttaaaaaaaattatttccccatagccgtgctggtatagaggactctaagaagtggggcatgctgtttctggtgaaccagctgtttaaaatctacttcaaggtgtgcttctgtttgaatcctttctgtctttacaattttcgattgtcctgggcttcccacatatcatatatatatcagctagcctccctggcgttgcttgtgaaatgatcataaccgtattcctagtcctaatagcaaacatttgttgaatgcctactaggtgcaaggcactattctgaatgctttacaaatgtcttcctgttgacaatcagccctctgaggttagcgctcccagccccagaggaaacgaaggcccctgtgtgtgaagcagctgtcccagtgtggtggaattg

SEQ ID NO: 14359 - DNA, 1740 bp, Homo sapiens
gtcttcccgtcattgtcatggtgattgtcagccgctgtggcactggtgggagtgtcacggagcatgcaaatgaggttgtaatgaagttggaggccctgcaaaggccaggtggacttccacttagcatcctgctggtcttagctggtttaaccaagaggggagcctctgacctcaggcatcctattgctgaagataggcagagtttgagttgtgcaactgttcagccaagcctacaagatgtatagtgctgtgggggtaacatggcctccctacccagcctcgcttcagaactttcgtaccaaggctggactgtagaaaagtccttcctatgccatggcactttcccactgaggcctcccatgggtgccgtttcctttgctggaaggttctcctcgactcctggcagtctatactcatttaaaggtttccgccttctctaaagcctctcactgctggacttcacggtggatcagatttcccttttataaacattcatagcagactgtacatttctttcactgcgtttaccaaacgatttgatggcgaagtgcgtcagggcgtgggccttctccatcactagcgttccttgcaccccaggagctcaatccgtgtttcctaaatgaatacttgacatttcgcttgatcgtatatttttgcacagcagtgatcttcacgacctttgattaggcagtggcttctcagatacgacaacaaaagcataagcaaccaaaggaaaaaattaattggacttcatcaaaattaaaaactttagacttcaaaggacattctcaaaaaagtaaaaaacaaccataacctagcaaataatacatctgataagggcctaatatccagaatatataaagaattattacaattcaacagtaaaaagacaatccaattcaaattctttaaaatgtttaaagaatttgaaaaatcttccaaacaaaatacgcaagtgaccagtaagtgcatgaaaagatgctcaaggtcattaatcaccagtgacttagtcaccaatgactaatgcatcagtcacttgaaatgcacatcagaacctctgagagctgccaggccacacccagtgggatgactgtaatcagaaagacgggcggcgccagtgaggatgcagggagactggagcctcgtacacatcgccaggggaacaaaaacagtgcagctgctgtgcggaaatgggaaggcagttcctgaaagtgggacgtagagctaccatgtgacccagcatttccaccctgaggggacactcagaagacagggcagatccccagtgacatctctttcccgttggggtttgcttttgtcacagtctccaatagaggtcatcattcctggtgccagaccagctacgatattaccatgcgtgtagcgttttacgtgagttacggagtacttgtgtgttttgtttggtttttccatagctctttgaagtcatagaacagtattattatttgtctccgttttcagatgaggaaaacgagaccttgagagacttttgtttgaggtcatgcacgtagggaatgataaaagtcatagacctgcttagagcagctcacaggcagttataaaacagggtttgatattttaaaattgtatttttacattattttaagtgtttctatatggacacattttggtctttaagagtaattttatgttctgtggcttgtaaaccacctgcttgttttctgtactgggcacttttgtatttttgtgccttgactt

SEQ ID NO: 14360 - DNA, 1033 bp, Homo sapiens
ttggagtaatacagacttctcaatttttaaaaatattatagtacatgctagctgatttctccaggatctttcgggactttgagtcttaattgtacccattttttgcttcaagaaataaatgttttggctgggcacaatggctcatgcctgtaatcccaacacttccggaggccaggatgggaggattacttggagtcagaagttcaggaccagccagagcaacaaagtgagaccctgtctctacaaaaaaaaaagaaaaaaatattaaaataaattttaaaaaaacaaaacccaaaactagccaggcatggtagtacctggttccatggttccagctcctcaggaggctgagatgggaagatcagtggagcccaggaggttgaggctgcagtgaggtgtgattgtgccactgcagtccagcctggacgacacagcaagatcttgcttcggaaaaatgaaataaaagttcttatattttattaggcagatcaacagttggtaaagaaaggaaaaagcaaagttggggacatgttggaaaaagcagcagagttactgatgagctgtttccgggtctgtgccagcgacacgtgagtaaggacttgaggaccgaccaccagacgctgttggtggtgttttcattgcagcgttcaccctttctggcctgtgtttattgttgacacatatttcatttctacacatgctataatcccacaaccattgttatttttgctttaaaaagttgattgttttgtaaaggaaataagagctgagggaaaaaagagtcttcatttgcccacatttgaccatgcctggagctcctctctgcaggaaccagtttccgtctagtgccatttccctttcctgaggcactttcttccacatttgcgtttggtgagggtctgagggcagtgaatcttttaagctttcatttttctgaaactctcgttattttttttaagaaatgttctctctttaccagtgaagaagcagcactgatcaccttcatttttaaggctccatttgctacatggag

SEQ ID NO: 14361 - DNA, 1028 bp, Homo sapiens
ttgtttacgattgcgccactgcagtccgcagtccgacctgggcgacagagcgagactccgtctcaaaaaaaaaaaaaaaaaaaaagaaattattgtttacccactgcagagagtagtgaccatctgttacattttgattgttctgtcttctttcaaagtaggggaaaatgaattttcccctgtgtggcattcagtgtattgttgtaggttctattcgaacagaatattttattttctacttaggtttccctttcaaatgtttcaggtgtacgaagccatcgacagcagagatggagcatcttgtgcagagttggtgtcttttaaacatcctcatgttgcaaacccacgacttcaagtaggtgaaagagctgtgcacacaggtgtctgcagacaattacagggtaaccactttcctaagagaagcgtagagtttgagtaagaagaaaactaatattgtcactcttatttgaaaattttaaagtttctttatgatttatgtaatttcaatccatttgtggagcactgactatgtacgcacactgtggtgatgtggacctcctgcccttgtgtttgattcctagacagctctctgaggtttagagaagttagatggtggagaggcggtggagcttagattctgtctaggcctgtgcgtccccaaagccccatagacgtcatgtaccacaggtgtctcccatttaagttgttagtcagaaaggctggcaagccaaggcccagcctggggttgtacatggagtttccatgtcatctgtggcgtagatgatgttgaggcagtattttctatagaaaatcttgtggacatttggtaaagccctgtttcctcattgacaccctttatcatattggagtgtgttcctactggaagcagcatttttcttttggaagaaaaatgggcttatctattggtgattatgtttggcggtgtacagacttgcaactcagaccaggtaaatcagtctctgaagtagcagcaggcctgtttttgtttttctaataaagttacctag

SEQ ID NO: 14362 - DNA, 1048 bp, Homo sapiens
tgacatgattgggcccagcagttgcttggttaattgagaaaactggttaaaacaggaatcacgaagaaatggatgtatgtttttaacttaaaacatgaaagtatacattcacttgccaattttttttttacaccacttacctcaagttctatacttgccaatcttttgatgtaagcccagggccttttctttaggctgtgtctgttttggcctaatcttagcagacttaacattttccaatatcagtttatttaaagttaaacaaggatataggcatttaagaaccaatttgatacgattatctttagaattttcttaatcttttacaatttttcccccatacctaattatttttttaacaaactcaagtgagccttttaaaaacatacaacttagcttatagagaaacaactgtttccttttgcattcatatttcattgatgagcttaaaagtacataactaccataacaggttcgggtagcaaaaatagatttgagaacaaacacatctggatatgagaacacatacaacttagctggcaaaagcttgcgatgtattagagtgaagcctacttgctgaaagtcgtcatcataccttgggcatcagctcgtgtatttcagggagggattggagagagtcatttttccaattcaagtcagttaaagtgagactgataagcgagcttctactctatgtgtgtaaactgaagtttaaacagacagatttgggttaaagatacaaacctgagactccttcgtagtcacatgatgggaaagactgagaagggaaggggtgacccagggaacaagtagagagagtagacaggggctgggcccaggatggacttctatggagatgtgcatgcctacatctccgcaaagggcagtgtagccactggggtgagacagcaaaaagtccgcttcctcctaattctgatggataaaaatatttctggttgaactggcatgttacctaagttttatgtattaacagattcttgaatattttaagaaaataggtgcctcttcgatacagaatggcaaccgg

SEQ ID NO: 14363 - DNA, 1029 bp, Homo sapiens
tgagccaccacacctggcttaacattttgttttagagttgaggtctccctccgttgcccaggtttaagtgcagaggtgtggccatgaccgcaccctcaggctcctgggtttcagtgatcctcccacctcagcctcccagctaactgggactgtaggcacgcagactgtgcctggctaatttttaaactttttttggagggacggagttttactgtgttgcccgggctggtctcaaactgctggtctcacacagtcctctcacttcaggctcccaaagtgctgggattacaggcgtgagccatggtttcagctgaaggttgcacttttgatctgttctgttggtgtgtttcccagcatgcattcattttctaggggtgactactgtttgtagtatcttttttctcaggatagcattgtatgggatttgatctcagggctgttctgttgctcatttttatgtgaaattagttttcctagtctttcagaaggaggatggttcggggcagcttttcgacttcatggtgctccctcttggctgtgtgtgtgtgtgtgtgtgtgtgtgtgtgcaggcgtgtagtagacagaaatgtcggctttgctgtctgagattgtctggcactgctcctcccccctcctcagcttttctctcttttccatctccattgtccctttcccgcccagcctgttctgctcccaggcacttccctgttggtggcctctgccctcagccacagcctacttcaggctcgtccttacctggtcccggcgtgtaggcacctctgaggccctcctgttctcacatctgtcagaggccctgtgccccccacgtccccggcatgacggcaacacacgggtcctgttgctggcagtggctcatcccctagcttacaacttgggtttgtggtgatactttctcacctaaatttatggtaaatgttgcctctgggtgtttggctttgctttctaattgctgcatctgcttttatgcgcagattcagggaaggttacacactgtgctgcctccgcccc

SEQ ID NO: 14364 - DNA, 1958 bp, Homo sapiens
ccacctcccaggttcaagtgattctcctgcctcagcctcccaagtagctgggactataggcgcatgccaccacacccagctaatttttgtatttttagtagagatggggtttctccatgttggccaggatggtcttgaactcctgacctcaggtgatccgcctcagcctcccaaagtgctgggattacatcatcaagttactttagataagtggaaactcagccctcctatatctgaaagtgtcaagatgttactttgtttcattatatactatatatagtacagctatttggcagttttgttatttattgcctgcccagagcctctgtcctattttttcattttatttctgtctggtatacagaggcattcttgttattagtattattgtttccatttaatcataacaggtttttttgtgcctgcttgtgaaattttcataaattacttttaacgctattcttagttatttgtgtacattttcatcaatgtgattctgtgatttaaagtgggaaaaaaaatctccaaaccgcacagcctcttcccattcattaaagcctgaactttattgaaaccaaagaagactgcagctgtgacccccgctggtgccgtaaggtccttgccctgtgtcctcagaggctagatgtgcattacagagttactgagagttttagagaaaaatgatagtcacacttcatgcagagtgaactggatagagatcagaatgtattttgtataaaatgttaattctcataatttttgaagcttagactgcctgtttgttacagtatagatgctgttgtttccattttcagaagactgtgcagtctttgtaactgatgaagagcaaggctttgtctctaattctgcccagttaaagtgcaggcgttaggctaaagctgggacaaacctggagcggcttcattggctttcctacttcttttgcatcccaaagcataagcttaaatcgtctcagaaggacaaggtccgccagtttatggcgtgcactcaggctggcgagagaactgctatctactgcttaacgcagaatgagtggagactagacgaggccacggacagcttcttccaaaacccagactcgctccacagggagtccatgcggaacgctgtggacaagaagaagctggagcggctgtacggcaggtacaaaggtaagaggagactgcagcaaagccggacggatgtcggcctccgcgagcggcctgcgcgctgcacttccagggttctggtgccggggcaggtctccgggctgccgttgcttctcctccccacgctcagcgctcggcgctcagctgcagaatccacttgcttctgtgtaaatggggctgggactgtgattggtgggggtggggagggcgagaagagtggagtcagcgatggggcagggccaggcccgtgcccgcttgttctgtgcggtgagtctgacgctgcacagcctgtcagggaaaagctgctgctgggaggcttggtgtcttggcgtgactgtgtctgttaatacagtatttttttcaagcacttctatttaggctgaaatattgatgatgagaaggttaagaacaacagcaaatcatgaagatgatctgaagtgagggtaaaccttagtgttttccttgcccgggtagtggcgtgtcagccctgaaatagcttcagtgattagagaggctttgggaaaagctcgcagcaaagaaactttttgttgcagattgtgatttttattgacatcagtgcttggatcggagcttcttgtcaaaatgcttcttgtcaaaatgtgccttgaactgagactgccgtgatgagcatacgcagatccacgcccctctgcaggctttaaatttcatgtccaatgcagagggacaggcagcagtctaagagctgacttattttgctttttctttctagcagtttttaaggctaagttttctaaaactttaaaacaa

SEQ ID NO: 14365 - DNA, 1074 bp, Homo sapiens
tttttaagaatgattggaaccccagtcattcttaaatgagagttcttgtttgtgtgggtaatagtcatcaatattgaccatattagaaattaaaatagtattaaaatatttctatagttaattagcaataaaaacccattacatttttgcaaatatcttaatgtctggcttgataaaagataggctctcgaatctcgcgttcattcctgtgatatcacaggccttgcagcccacggaggcctctgctgtgcactctgtgagaatgagagtgagcaaggctggtggcggcttaggacgctcgggaaggtagttctgtgggactcctgaaaggcctcaggacccaggatcccagatgcacacgggagagtatgtatctggacagcgttatcttaatgcctctgcagaatcgtcctctggtattttggcatcagcatgctttttgattgcctgtctcaaaaaaaaaaaaacttctggaagctggctctgctgtacgtggttggcattttggtgaggaattggtatgtgtgaggggacattgaactttgtgaggagccgcagaagacgtttcctcaggttttaggccagaagggtctgtatctgtaccacttctgagctgctggtaaggttttagatcttatgaaaacggattttcctaactaatcgtgttttctttgctgtggcactggggaagcttggagcctgatttccagctcttacatgtgacaggcacgtccttgtactaatggcaccccttccttatccacaccttgttatccttctatatacttttgttaagttatgttataaatcattccatgtgtttttataagttgtctcatctttatttgaacaagattgagtataaatcgttttgagtaaaaaatttcctgcttatattattgtgtaaagcatttttgtaaaacgttagcatccagtggattctagggtctgtttggatttagagaagttagtgtatcactttcttttccagtgttgcttttatcaggttactttatttatttatttatttatttatttatttattgagatagagtctcgccctgtcgcccaggc

SEQ ID NO: 14366 - DNA, 1027 bp, Homo sapiens
tgcggcgtaggggtggccagcagctgtgaggaccagcttggacctaacagctcacgtaggggtggccggcaggccctgaccacacctcggtctcctgcagctggtggtcctggccgtggagcatacggccttggccctaatggagatcaaggtctgcgacggccaagagcacgtggtcaccgtctcgctgagggacggtgaggccaccctggaggtggacggcaccaggggccagagcgaggtgagcgccgcgcagctgcaggagaggctggccgtgctcgagaggcacctgcggagccccgtgctcacctttgctggcggcctgccaggtaggtgctccctgctccgctcaacccgggtgaagagctccagggaggcccagcttggtcaccccagatctaacctggacaggctggggtttctggtagtgaatgcggaagaggacttgtgttttaagaggaaggagaagtccaggtgggtcgttagtggctattatggtgtctcggtgctggtcaggtcattggctgagactgagaaacacgtacgggggccggcattggcctgagtcaggccccacgaacctgcatcttcagggagcattcgtccacacccatcagaccagccccgggggagagggctgggcagacctcgggccaggctgcagttgggacccgcggctgtcaccgcagctgttagcagcgaacagagtgaccgccagcccctcccatgtccagcagggcgtcctgccgtgtcccatgggctacacagcacagaggctgggaccggggatgtccttgccatgagctgggagggtcagcggaaaggcacgtgggagccggcaagtcctcggctgcccgcaggttttcacttgcggcaaacggcaggatttctctcttggctgccagacacagactccacttagttttaataaacagagctttgaagaggatgagagcgagccaggaggcctgcagcctgaatgactcactgggcacagaagaagatcacgtttaaccgatgggactgt

SEQ ID NO: 14367 - DNA, 1064 bp, Homo sapiens
gctggaagggacactcctcccacctccccagccctctctgctggagccgtgcccctcccccgacattcctccaggctgggccacccccacatgcctccttgctctccaccgcccagaccttctccttatcttgttttcctttttatattgttgttctccctccctggccttgcctctccctgctgggttccttgcccgagtttctaattcagagaagactgggtaactccccacagtgtctctgctaaagcttcccaggcccagtgactttttactaaatcctcgaaggccatcaggttccagggcctgctgaggtctccataatcaccccttgattccagaaatgatccgagactagagacttatcccagcccagccctactgcccaggtcctccggtgcctgcctgggagcctgtttgtgcactttgatccccggcctgcctgccggaaaatcatccaggctgtggttcctgatcccatcacctggctttatctgagatacaaagcacaatattcaccgagggctggtggccttccctgagggttggcctggattagcaacctgcacctgtacccgcacctgcacgacatgtggccaggcctgtgctccgaggccaggtttcccttcccccatctctttctttgtctccctctgtgtttctctctctgtcccagtctctctcttctccccactgctggtggtgaggaattctccgcatgggatgttggtgcatccgttttcaaacttgctggctcatcctgaactgcatgtgccctccaagcaccttttccctgaccttgtggattctttgggaacagctggggaaggggtaccctttatggaaatgaaaacccctctgagtccccacttgggaacagccacttggctgggacacaggcccagatgttgggatggcctaaagggaggtccctgttggaggggagggctgtacaatgtgggggcgcctggtggggaaggtgatggccaggctgagacctcccctgccctgccttgacagaggctgcagcacactcccacacacagacacatgcacacacattc

SEQ ID NO: 14368 - DNA, 1051 bp, Homo sapiens
ctgtgatggttatttttacacctggaggctggcatcctggacaaatccccaaaataggttccttgtgaggacttcgcctgagacttcagcagaggcaactgggtgggtcggatggaggctctgtgcccgcaagttcagggcaaatttgggctgggggactggatggcctggtgtcctctgggaacccttgtcccccggcaaccctcatcctcctggaaccctcatccctcgggaaccctcgtcctctgggaaccctcgtcctctgggaaccgtcttgccctggcaaccctcatcctctgcgcttcactgggtcaaggttgccatttgccaaggtcatgagctgtgcacacgcccatggccagcaaagggttcattcatgaagttgaccatgagcccagctgtgggggtggggtgaggcccttgacggaaattaaggagtggagccaagaagccctggggatggccctgccccaagggacctgtgctaattgtgcgtcacacttaattaactctgcttcctgggaaagcactggctggggaacccacacgtgctgtggaaagtgaaggacgctgtgattactgcagaactaatgactgtcctcgcatccccggagcacaagggccccagcgtgctgctcccacggaccttggcgtcccggcagaaaggcggggtttcccacgtgctgcccgggagacggggcttggtgactgggccgctcccgcctgcgtgtcggcgagttccccagctcttctattctgggatacccgccgtcgctggggtctccgtcacaacggcctctgagcagctggcagagtgcggcctcgtcgtttgcctcggattcaagtttggttttattggcaggtgtagcttttcctctttcttgccttttttttttttttactgatttaattttgaaatggttatagatctataggaaggcatcaaaacagtacacaggagtggcgaggggcgaattcccacctttccctgaaaacggaaggccgtgctcccttctcccggctcccccgaacggaaggccgtgctcccttc

SEQ ID NO: 14369 - DNA, 1096 bp, Homo sapiens
ggggatgggagtgagtgttgaatggggaccgagtctccgtttgggaagacgagagtgttccagagaggacggtggtgatggttgcacaactcggtgaacgtggttaatgccacagaactgtgcacgcgagcaggtcagagatggaaaattgtatgttaaaaattaaaataaagggactaatgcaggtaaacaagacacagcaatcctgagtcccaggctggcaggtccctgcttgcgggacttgcattagagggtggcgtgcatgtccctcgcctttcggcagtacacatggggtgcacatccacattttgacttgtggtggcaaaaaaaccaaggctttatagagagctagtgaatgcacacaagcaaaggctggaaacgtgtctgcgatgtagcagggaacaaacatttctacgctgctgatgatgtatgtcgcttttactttttaggtgaagccaaaaaccttccctcttacccggggccgagcaagatgagggattgctactgcacggtgaacctggaccaggaggaggttttcaggaccaaaattgtggaaaagtcactctggtaatgtcttctgttgctttacttggcactgatgtgttttctttggtgtagagaatgtcccaagggtgtacgtcaccttcccattttcccatgtgtggagaacgtcccgagcgtgtacgtcaccatcccgttttcccgcatgtagggaatttttctgtgcgtagacaatgtcccgagcgtgtacgtcaccgtcccgttttcctgcgtgtagggaatttttctgtgtgtagacagtgtcccaagcatgtacatcaccgtcccattttcccatgtgtagggaatttttctgtgcgtagacaatgtcccgagcgtgtacgtcaccgtcccattttcccgcgtgtagggaatttttctgtgtgtagacagtgtcccaagcatgtacatcaccgtcccattttcccatgtgtagggaatttttctgtgcgtagacaatgtcccgagcgtgtacatcaccgtcccgttttcccgcgtgtagggaatttttctgtgcgtagacaatgtcccgagcgtgtacgtcaccgtcccgttt

SEQ ID NO: 14370 - DNA, 1033 bp, Homo sapiens
tgcggctgtttctgacctctggaccggttagagagcgtttgtagggtaaaaacatacacaggaggctgtgtgttatgagaggagccaccaaatcggcaggcgacagcgagggggacacgaggcctgcagagggcgtggacatgaccagctgcttcgaggcctgcactctgcctccgacggctttatctctagggcatgagtctcttgcgacaggaagtgagtattaatgaatcagttaaccattttctaaactgggaagttgtcttgtgaccagtcttcacgcaggcaggcacctcccccgcgtgcccgacactaacccaagccttatgttttgtgggacacgtggcctcgcccgggccaagggtcggtgtgactgtccagcctctgtgtcaccaaggtggggtgttcatctattgaactcacatcctcaccagccgtcccagccaggagacactcgggaaaactgctaccgcacggcggcacagggaccgtaaacatgttaccgctggacataatggaagctgccgatgacaccacacacaaagccccccatgggttccaagtatttttacacggccagacctggccctgtgccttgttcagcggcctctctgtggagaagccttctcctgccgggacctgcagcatctcacagctgggggtggggctggggaacctgcagcatctcacagctgggggtggggctggggaacctgcagcatctcacagctgggggtggggctggggaacctgcagcatctcacagctgggggtggggctgggggtgctttcacccacggccaggggtcgtgcccgggaatttcccagcttaccagcttagcacccccgcgtcgtccctggagctgggagctatgggtctttccactgttggtcacgactctgccctgtccctgcacatgagggcgggtggttgaaaaatcaaagccaagtaagctttggagggagcgtgtttaacctgccctcgggtttacactgaaaccctgcccacatgttatcaagggttacccataaa

SEQ ID NO: 14371 - DNA, 1042 bp, Homo sapiens
cgaggttgggcagcaggtgccggtacctctggagggtgcgaggttgggcagcaggtgccggtacctctggagggtgcgaggttgggcagcaggtgccggtacctctggagggtgcgaggttgggcagcaggtgccggtacctctggagggtgcgaggttgggcagcaggtgccggtacctctggagggtgcgaggttggacagccgttgtggaactgtggtgggggtcggggaggcagctcactgagcgcgtctcgtcttacgcagccgcgggtcagagcaggggtctgtgttcacgcaggaaaggaggggcttgccgtgcaaccagagcttctagctttgaaccataggtgaaggcgatgaacagacgtgtctactgcagcagcacctgtggccagtggctgagtgagcaaatagcaaacagtagaagcaatgttgaggagttggggtctccccaccaatctcctgtcgaactgtcaccccgtcgttggaagtggggcctggtgggaagcgactggatcttgagggtggatttatatgaacagctcagcgctatccccttggtgctgttctcacgatagtgagtgagttctcgtgagatccggtggcacacctcccacctcgcgctcttgcccccgctctcgccgtgtgagacacctgctcccccttcaccttctgccatgactggaagcttcccgaggcctccccagaagcagatgcctccatacttcctgtacggcttgcagcaccgtgaccaataaacctcgtttattttgaattacccagtctcaggtgtttctttatagcaatgcaagaacagcccaatgagtaatcgccaactgaaacggtgattatgtcatgtgcatccacatgtgggctgctctgtggctttcaaggaacatattaagcccaggccaaaccacatgactcgcaggaagttccacggcataagattcaaaagaagcaaaatgagagcgcccaacaccaccccctagaagaatgataaacacagatcagatgagtgtgcgcagatcagggataag

SEQ ID NO: 14372 - DNA, 1106 bp, Homo sapiens
gagaaatgctgtcttatattttaacatacattttggccattacacagatgaagcaacttttcatttgttaatacatagcatacgttttcttctgtgtaattcctctttatattctttgctcattttcccactgggatttgcaagttctttattatttgataatctctatacattctgaatatccatttttttgttatgtataccatgtaaatattttcttctaatttgttatttgtctcaatggtatttatcaagtgtttgctaaaaatgagtttgtttagttagtaaaatttgtctgtcttttacttcatgatatttatatttcatgtcatgaggaaaaggcatgaatattttaaaaacttccttgtagtattaattttattttttatttcattctttaagttatttgaaatttattgtttatttcttcaaattccaaataataaccaactttctcaaagtaatacttctttctactgatttcaaatgttacatttgtcttctctgaagttcttgtctatttgatacctgacggtcacactactgctgtggatgtgcttcgtaccaccacagtactgcagggttataagattatctgatagccaatagaagcagacctctactcactgtcattcttttttcttttggagaagaaagttagctatttttatctgggttctcaatttttttttttttctttttgagatgaagccttgctctctcacccaggctagagtgcagtggcataatcttggctctctgcaacctctgcctccctggttcaattgattctcctgcctcaggctcctgagtagccaggattacaggcatccatcaccacgcctggctaatttttttatttttagtagagacagggtttcaccatcttggccaggctggtcttgaactcctgacctcgtgttgcacccacctctgattcccaaagtcctgggattacaggcgtgagccaccgcacctaaccgggttctcagtttcgtataaactttaaagtagattatcaaatcacataccaattgccatctgattgaaatttcaatgtttttatatgtaagtttcgagactaaagccatctctattctttcagc

SEQ ID NO: 14373 - DNA, 1033 bp, Homo sapiens
acgctccgcctctgggttcacgccattctcctgcctcagcctccggagtagctgggactacaggcgcccgccaccacgcccggctaatttttttttgtatttttagtagagacggggtttcaccatgttagccaggatggtctcgatctcctgacatcatgatccgcccgtcttggcctcccaaagtgctgggattacaagcgtgagccactgcggctggcaccagaagtttattgttatggaccaagagaggagtgataaaaaatcaaactgattaaacaattaacatttaaatttgttttcacttctggatatataccaccataaaaaatttaatttagataaactgaggtataccaggatgctgaaactgtccggaaacagtcacatatccaaaaaaatggagaagttttagtcttttttaagatgggaagatctgagacataatagctgtctttacacactgacgtcatgaggaaagccttttttttctagacttattctgagttgtaaaatgtgggaggcagaacttggatggtcaaccctctatatccatggattcaatgaactgagaatcaaaaatgtttgaaaaattgcttctgtactgaacctgtacagcctttttttccttgcttctcattattccctagacagtgcaatataaaaactttacaaagcatttacattgtataatattgggtgttataaggaatctagagatgatttcttagattgtcttgtgttttgtttgttttttgctataggatgaagaggaaacaaagaaagaggaatctcttaaatctcccttgaagccagagtcacagctagatcttcgggtacaggagttaataaagttgatctgtaatgttcaggccatggaagaaatgatgatggaaatgaagtataataccaagaaagccccacttggtaggacttcacattttcttctgcattctctccttataattcctagctcctttaatggatactttattatcattatgatttaaagcttgctcatagtactgaatga

SEQ ID NO: 14374 - DNA, 1067 bp, Homo sapiens
cacccccttttcctatttgagtaactaaaaccacacaaacaccatttctgtgaactcaagtgatattagatagacaaaataacattttacatttgttgattctgttttctggtttacatccgatttctatttcttttatagctttatagagccccgtgacctagaaataaccctgagtggtcaacaggtctacctgtgcttctagatagaactgtatccaactgttccctgttgatatcaatataacttatttttaaatgattttataaaaaataattttaactctagtctcaaaagtcaaaatccacatagttcatcttataccgagtatatatttaatattattttatatatttggaagttaagatctctttacagatctctttctctctcaaatggaaaacctgtttctcatacctgttttctaaaggacctatctgtcattttctatttttagtcatgcgccttttagccacatgtcagaaagctcattatgggttatatctctgttcttagactccgtactcctccactaatccggacacagaaggaactgtcagaaaaaatacaattactagaggtgagatatgtatgatttgagaagtattatatcccttataccagtgtcctcccacattgattctatatctcatcttctcaggctttgggagacattgaaattgctattaagctggtgaaaacagagctacaaagcccagaacacccattggaccaacactatagaaacctacattgtgccttgcgcccccttgaccatgaaagttatgagttcaaagtaagaaaaatgatcatttattttcatattcttgcacccttaaccacctcccccatcccactgttctctaactacttcttgtcaagagcaaattgtcaattagggcagactttttatgtactagggatttgggaaggccaagcttttcctagctgccttgtaagactgtttgggagcagaaaggtctgccaagttatatcagaatccccaaattcttcagttcagctcagtctcttgtagagtctacatcagcctttttgtcttatttttc

SEQ ID NO: 14375 - DNA, 1064 bp, Homo sapiens
gcccttttaccctccctaatttgattatttccttgcacttccccgtacactctggccccttcctctctaaacctttgtcataaggataagtatgcagcttgccagtgttcagtggatccaacactggagttgggcctgttagtagaaacaggctttattaacttttgccaggctctagaatggaggtagtttcatatcagacttgtagtgggcttgattcagaaagaagggtggctgagtagatggaagagcatagtatggcctttccctctgtgccagcttctccgtccctgctgcctcagtatacctgccagcctttttgcaccgaaggtcatttgtctgtgatgcccttggaatgggagcagaattcaccttgatattttttctcccccagatacacctatgaagattataagaacactgcagaatggcttctgtctcacactaagcaccgacctcaagttgcaataatctgtggttctggattaggaggtctgactgataaattaactcaggcccagatctttgactacggtgaaatccccaactttccccgaagtacaggtactggcaagggaaagtggggaatgggactgagggatgttcttggaattctgtggaacacaaccaaggaggccaatgtttctactccttgacctagcatttcactgaagacaaatgttgtaagagaggagaaaagcccaccatgagtcagagtgactttaggagatgcctctagcagacatcccataagagacaggacatgtgtgtgtcagtggactgaggctaagactcagaagagggccaggtgacaggggccaagtaaagggcaagggttgtttatttggtttacgtaatttctcaaataactaacttctgttggtttatttattaatttttaagatttctatcttcttttccctggagagttaagaatttttttttaagacctgtcagcaggaaaagacctttaatagctatttttttaaactctttaacacaagactggaagagcagagggagaaggtgagggaaatattaacagagggtgtgtgaagggcata

SEQ ID NO: 14376 - DNA, 1006 bp, Homo sapiens
acgccttaaatctaaacctataatacataggtaatcaactaaagctgaaagggaatggccaaagcacccacgtggagtgctgggtgctgtaggcgagaggtctgaggtagtggcttttagagctcaacatcttggtaatgttggttcgaccttttcccctgccagtcccgcggtgacctttatctttcggtgagtgaaatcggtcgttcgtgtttttcgtgggtcttccaaccacaggccgcctgagatggttctagtccctttgagtatacagacccttcctgtgcattgaccgacacagctcggcccggatcccgaaatgaacgtttctaccttcggaacgctgcgtctcggatccttctgaacccgcacgttgactttcctggagtctggagaaaatcactagattctaaaggaatcaaaactgttcaagtgttgtgctacaactaaaaaaataaatgaacactcttaaagaatagaatctctccagttctggctcgttggtctagtggtatgattctcgctttgggtgcgagaggtcccgggttcaaatcccggacgagcccctttactttcctttccgtttcatctttctctctttaaagtcagtagttaacaaatactgcaatcggcgctacggctaggtcacctagccctcttcaacctcgacctatgggggatgagattgttgagcaaattgcggctactttcgctgaaagaatcaaagacaacgaagacgctgcgaagggccaaggtcttcatcacagatcggggttccctgacgggctctgacaggatcttttgtcaggagcagagtgttcgggcagttcttacccagtattttgtgtggaacaaactagtgcacttttcactaggtcacttcgtatggaaaagattgctacctgaaggcgtgttagggtcacaatgtcccaatagaacccgctttctgagaccctgaccgcgcggtgatccagccgcgggatggagtctagcccctgccctggcc

SEQ ID NO: 14377 - DNA, 1050 bp, Homo sapiens
gcgcaggaagtgaggacatcagggagcccgggcctaagcctggaggcccgccctctccggcgttcacagttgcgcagtcagaattgtgtgcgtcccaccgcctcagcccccagttctccgacgcccaggtgccggtccccaccctacacacaaacacacgcatccacgctcgcgaggcccctgggtccgcgcccagtgaggccaacagccctcgggcgcccagaggatgagcagcctcggtatgcccgagtttcaggggcgcctgctctgcttgggagcccctcagtgaggcaggggaatccagatttagaaaggttgtcctcagaacctcggacgcaggactgtcttacaagctggctttgtgactctgcagtaattactttccgggtataaagagatttctttctttcccgtctctggttaaggatgtctcgagtagggatttttaggagagttgtttccgtgcttccttcgatagctcagctggtagagcggaggactgtagtacttaatgtgtggtcatccttaggtcgctggttcgattccggctcgaaggagacgctgctgttttggggtttacggttgctcttcgtttgtgcaaaaaatctctgtatcttgacgtgatcaaatctgtttctgtctctcacccttgtccgaaggaaacagcttagccgcgaggtgggctgcgttaatcgcgtcttgaaaagttggttacctttctgaaagatagtagacccgaatcgtcccaccgttgggggaaggcactgttgtcttaccgaagtgtgttatattttggcttctacgttaagtccaaaggccggcagatatatacgtatcgcgcgtctgtcctggggctcagtaccctacagccttgcaaccgagctcagctctggccctcgatctctatttcagccccctccaggttccctccaggccctagcgggcttaaatcgctccccgggctcagtgagacacaagcatgtgacctaaagtctaaaaagctgccttccttcaccccatcctgcatctggatcgaggagaataagccag

SEQ ID NO: 14378 - DNA, 1061 bp, Homo sapiens
gcaagagtaagaggtttgtcaagttattgttggaagcattggtcactgtgactcaaattaaagtagctggataaaaaagtggaccaatgaaggtcagtgaaacctttctttaggagtttttattgaatctgtatttaagcagattctctgtaattctctgtaaacagttattcccggaagaatgccatgaaatacttgggaaagagggaatgggaacaaagagtgagtgggcacaaagcccagagttggttgaaaagcaaatgtttaatttttgtctttgtttggaaatacaggcatgtcagcaggactttgtccccactgtccttcaatcagtagtgttgcctcttcctggagacgtggttcttcttgccacgtgtgcttttccttctttacctgttacttccgttattgaataagttcatgcttatagacctaaagtgttagaataataaagaaatatagaaattatttagtccattcttcccatcatctaattttataattagtcctaagacagaatgatacatatatactctgtatgaaggaggaaagtgctctaacactagggtccttggaaacaggacccgtgcatcccgtgtctgtgtgcagggacattattggcttgagggagagagagaaaaaaatctccaggaaaggggaatgactttcaagttaaagctgtctgaacatttaaaaaatatatgaggttttttgcaattggcgattccttcatttgtattaaaattactgacaaagatgtgatgttccttaatcatagaatataattccttgttgtattttaaacacaaatgactaagtgcttagatgcattctaatgaaatagtaatttttcccccaaaccctacttttcatttcaacaaaacttccttgtgccaagtttaaaagaaaaacataaaactgtctttttgcattgtgggcagattgtgtatcctccaaaggttgtccagtgaaggcccagaggcagagaagggacctaactatattcagaggctgctggttgccccacctcagcactactgcagaactctaaaatcagaggc

SEQ ID NO: 14379 - DNA, 1061 bp, Homo sapiens; identical to SEQ ID NO: 14378

SEQ ID NO: 14380 - DNA, 1049 bp, Homo sapiens
actctctgcagccccacggcgctccttccaatcagcagagagaacacacgtccttgcggaagtgacggcagttccgagtccagtgggggcggtgggagcgatgagggtctgagacggtgggagcggttgtgtgaagatggaggtaggaacctgatagctaagaaggctggcgagagaacgcggccgaccgggttgaagcagggacgggaagccgggcggagaggcgactgacgggagaggagagagagcggggtttggggagtgttgtcagaatgtcagggtcaaaagccatcgctccaagctgactccctgctccccctaacttatccccgcgactttcttttggtttccagtttcccggaggaaatgacaattacctgacgatcacagggccttcgcaccccttcctgtcaggggccgaggtgagccagagctgccgacgccgcgggggtagggcctgaggcagcggtggggtagggtagtggggaggagagcacggactccggggacgggggctgggaaccaagggccgcaattggtgtttagagaaaagtggcggttgcttctagagcctgtggggactatctggggaagtcttgggaagttgctgtcatcagaaagcaaggtattggaaagagataacctgtttaaagagaaaagggattctggattagaagacagagtggaattgtctcctttctctggggagaaatagctacagtaatcttaggggatcgcagtggaaagaaaatgtttcagcagctgaagaaattggggttgaggggaggagcttattggttttcttttgttttgagacagagtctcgctttatcgcccaggttgaagtgcagtggtgcgatctcggctcactgcaacctctgtctcctgggttcaagcgattctcctgcctcagcctcccgagtagctgggattacaggcgtgcgccaccacgctcggctaatttttgtatatttagtagagatggcagtttcaccatattggccaggctggtttcgaactcctgacctcaggtgatccacccacctcgg

SEQ ID NO: 14381 - DNA, 1039 bp, Homo sapiens
caggagatcaagaccatcctggctaacacagtgaaaccctgtccccactaaaaatacaaaaaattggccgggcatggtggtgggcacctgtagtcccagctactcgggaggctaaggcaggagaatggcgtgaacccatgaggtccgtctcaaaaaaaaaaatgtatctaggctgtaattctatttcagtttgtgtataattctgtttgtgtatgtctttttctctcttagggatgtattcttggcctgggtagcctctagaaattcaaacacagtggtgtttgtgaaatagtccttcctgttctccaagccagtgaagagttatctgctgggaaagtgtccaagagcctgtttttgaaacacaagctgggcttctggtagtgcctcatcacaacccatgatggctgttcatgtttcaccccttttcttccttcagcagaggccaggctatggagcagggccactgaatttgctgtaatctggagatgctttttactttcaaccataagcggtaatagcagaggaaagggtgaagggagtctgggcaagcaaagcatagagatggtggggtggtggtggggttgaagaaacttgttggtataattgtcataggacttgcctaaaatattattaaaattacgggagtgtactcagctttgagcctaggagaaaatgccactgtgtgcatccattttaaagggttccctcataaaaaaatgttattccccattatcacatcagtacactgctttgaaaacaaaacttttcaacatgggcatactgggctacatggaaaatgacatcacccaggagtgatttctctttatatatattatttctgcagttaccatccttatctgagttatcacagttcatgaatctaagaggcggaactctacatcattagtaagaggttccaccaaagtctaaagttgtattcacttgtgtttgatgaactatctttaaaagaccataggtctatcattatttcttagacataatctaaagaaaaacagactagagaagccacctggttgta

SEQ ID NO: 14382 - DNA, 1031 bp, Homo sapiens
actgcaggatgtttagcagaacacccactagatgtcagtagcattctccttcccctgcccccggccacccaccagttgtaataatcacaaacgtctccagatgtttccaaatgtctcctgagggtaaaatcaccccaggttgagaactactgccctagaacttctctaggtttggtcagctgccaggatggggactcccagctcagcaggatgttctttgggctcccagccacgccaagaagtgttcaggcagacctggttcaggccagtcccttcctggctaagagctcttggaatgactggaatctccaaacctctataactgagctgaaggtctagtgactctctgcatctctgaagcttgagaccacctcaggacagcttcacttgcttttccacccaaggtgccccttgtcacttactctgcacactagcttaatttgcaggcaatttccagagttaccctttggtgaccaatctgctcaatcccttaaagatcttctcatcaggattattagaacactaggaaggctgggcatggtggctcacgcctgtaatcccagtactttgggaggccgaggcgggtggataacctgagctcaggagttcgagaccagcctgaccaacatggcaaaacctggtctctactgaaaattcaaaaattagctgggggtggtggcacgtgcctgtaatcccagctactcaggaggctgaggcaggagaatcgcttgaacctgggaggtggaggttgcagtgagctgagatcatgccattgcactgcagcctgggtgacagagtgagactctgactcaaaaaaaaaaaaaaaaaaaaaaaagaacaccaggagatgtgatataaaggaagatatcacattatctggaaaagcctaaaagcttgatgtttagcaggggacttcctatccctagtgttacagaataacctctctccttatccctcccactctggtaggattcagtacagcattcattcaatatgggaggcctaaaatcaacccacccatcactcttcac

SEQ ID NO: 14383 - DNA, 1055 bp, Homo sapiens
gaacccaggaagcagtggttgagatcacgccattgcactacagcctgggtgacagagcaagactccgtctcaaaaaaaaaaaaaaaaaaaaaaaaaattgcaaggcaccaatagataccatactaaaaaaaaaaaaaaattttttttttgtcactccactctgggtccctccactctgacgcaggctggagtgcagtggcgcgatcagggctcactgcagcctcaacctcccgggctcaggtgatgctcctacctcagtctcctacgtagctaggactacaggtaggcacctctacgctcaactaatttttttattttttgtagggatgaggttttgccatgttgcccaggctggtctcgaacacctgggctcaagcgatcctcttgcctcggcctctcaaagtgctgagattactttggaagtgcaagaaccaccgcgtctggcccatactaaatattaaggacaattgtttaaagacatggattgtcataaaatagtataacacttgttagatctctaagccaacaaaccaactggactcttttttaagaacgtctcaaacacccgggcttctggttctttcatgcgttaccttattttgagcaaggtccttactctgctttttaacttttcctggtgctttacaggaaatgtaaggaggtaacggatgttatggagttgttggcatatttcagaggcttatatgcacattgaaggctctttcatcataaataatgttttttctttcttcccccactgttgatagctgcaaaacaattagcatcagccttgaccagctgcacgtactagattttaaaatgtgtgcattttcattttggagaagatgtaatggaccaacattaatcattgtttttttctttacccaacctggcacatagaagtaagaggaagagaatgaacaagaaatatattggttatttttaggttctttataagaaagatggaggaagacagtgggtggggaagaatgggtttgaaaaaggcaggcaaataggaaatgaagttatttttggtgatttttctaaggtagttg

SEQ ID NO: 14384 - DNA, 1041 bp, Homo sapiens
gctttggttcggctttatcaggggccaggcatatgggttctagagtacctaccatgacctagaagcatttatgatttatttgaagccacactgtttgcatgggtgttacttgtctgtacctcagagtctgaggatgttaactttggaactcgcagtcctctagaacagcttcagattatggctttttcttttgaggaagaaattattcactccagatgcatgccctgagccagacctcactgctgcactttccaaggtgctaagattgctgctctccaatgctaactttctgacacagtgctctagaaccctgcctgtggtcctgagcactgatcaccttagctagaccatggttgactcttcttggagattttcacttggtcctagaatgtggcaacgtagttgtgctcgccagaacgtgggaccaaattggcctcaggtgttgagtccagacttctgcttttgagagagggctgcactttttcatggtatttctaggggaggtggtaggctgcatgtgccacttggtcttgttgtgagtatgctgacaccagaaactcagagccagcttgtggcaagcagttggggtggggggtctctgacttgctcaggacaaactaggccagtggttttcaaactgcttggcagagccctgaagtttcctaggggttgcctcaggagtccttggggagatgaagggggtggggagctgagcaggctgggcaatttgccctcaaacagaacagctccccttgtagctgtcttacatattggggttcagggtaagattttatttgcattaaggggtttgctgctgaaaaaaagttggaaaaccactgactagaccatcggctccaaattggagtctgtgcttccttccccaggtatggagcacactcttcaccctaccctctaccacaggacacatatccctgttagcattccccgggacctttagccaagaggagctgcagggaccatggccaggttaccaaaatgccctgctctgaagccttgacacctgggtggaaagagaggctg

SEQ ID NO: 14385 - DNA, 1059 bp, Homo sapiens
aaacggcagaacagatttggttagtttagaagaaaagaaagctctataaatataaatctatattcctgtatttttatttaataatttataaataccaagttcatttgacttttatttttgtgtaatatgtaatgatcgtattaaaaacaataaataaagcccagaagtttaatgagaaggactgaacagggtttgtgacttctacactgtatagcctggggtcaggacatttccttgatccaatcatctcttcatgaccttgttaaaggcaagaattagaataacagggatttgagaaagtgttgggatcattaagaaaaaaagagtctttcccccatcctcaccccactcctataccagccaaatggtcaaagccaagaattccttctatttcaacctgagccttgggagggtgtgtgtatatggtactctgggactgccactaacaataaccaaatgagaaacaaagaaaacctaccaaaaatctttgtgtgatagtaatcaagcccccagttgtggttcaggctctaatcagaagtgtgtgataataatgaacatttctccatggtgccttcctgcctacctcagacttaaaaataggtctgggccaggtgcggtggctcacacctctaatcccagcactttgggaggccgaggcgggcagatcacttgaggtcaggagttcgagaccagcctggccaatatggggaaaccctgtctctactaaaaatacaaaaattagccgggcatggtggtgcgtgcctgtaatcccagctactcaggaggctgaggcatgaggatcacttgaacctagaaggtggagtttgcagtgagccaagatcgagccactgtactccagcctgggtgacagagggagactctatctcaaacaacaaacaaacaaaaaataaggcaaggcggagtctggcaaaaatgggagtccctgcttcctttgctggtcctgtgagacatttggtttcagccattttaatgcaaattgataaactggatggaatttctaagaatattcagctcatccttctctacctctaatcttgg

SEQ ID NO: 14386 - DNA, 1053 bp, Homo sapiens
acagtaaaacaattaagcgcgccgtggagataggcccacttgtcctgggaaatgaggggaagctggggtttgcagtggtttgattgaagggggactacatgttagaggcacagactgggtgcaggtacacccaaaggaacgagaagagtggaaggaaacaacatccacaaagtaaccacatgctggcgtatcgaaggccgtgatttacggttttgagactttacctcgccagcaaaggggggccagtctgttagcggtgcagattggaggggtgacattggaagctgtccaggaaaaagaaaatggaactggggagcagaaggcctacgcaagagggcgggacagacaggacttgtgactagtagctctggactgaggaatcctccctgctttctggtgcgggagagctagtggatgatggtgccaataacctggatggggaaagtaagctccctcctggaatgcttcattcacaacctccattttcagcaacatcccatctactggtgcttcctggtcgagatacaagtttcctgaaactgctgctctgttttgggcctcacccggccaacagctcactagctggcaagcagtagtatcaagatggcggccccctaggactggctagtcatgtgacctcgggtttcccaagtttgaagcccggcagtcctttcgggggcaaggttcacctgtcacgaaacgagtgtcaccccttcgactctcgcaagccaatcggcatctgagactgggccactgcggtgaggcgatcggaagattggtcctttccagtcgcctagctagggccaatcacggagcgtcccatacttcgcgggcccgcccgtaggccggggagaagcaggaatatcgtcacagcgtggcggtattattacctaaggactcgataggaggtgggacgcgtgttgattgacaggcagatttcccctaccgggatttgagaatttggcgcagtgccccgccttagaggtggggccttatttgattgccaagtaatattccccaatggagtactagctcatggtgacgggcaggcag

SEQ ID NO: 14387 - DNA, 1727 bp, Homo sapiens
agacaaagagtcagtgaggacttccttggccttagatgagtccctatttagaggaaggcaaatcaaggtaagcctatgtccattgctgttctagttgtgtataaactctccaggttgcctttaaggctatcatttgttcatctctgactcaggtgatcccaaaacgaaccaacagaccaggcatcagcacaacagaccggggttttccacgagcccgctaccgcgcccggaccaccaactacaacagctcccgctctcgattctacagtggttttaacagcaggccccggggtcgcgtctacaggtcaggatagatgggctgctcctctttcccccgcctcccgtgagccccgtatgcttcctcctctctggtctgaggaacctccctccccccacccctccccgtggtcttcaggaactttgtctcctgcctgtgcaggttgaggaaggtagttgcaggccaggccagaaggccagcctcatcatcttttctgcagtagaaattggtgataagggctgcatccctcccttggttcaaagaggcttccacccccagccttttttttcttgggagttggtggcatttgaaggtgtttgcggacaaaactgggaggaacagggcctccaggcagtgaaagcactgcttggacatttgttacttttttcggagttagggagggattgaagactgaacctcccttggaagaataccagaggctagctagttgatcctccccaacagccttgtgggaggattttgagatacttattctttatttgagccagtcttgcaaggttaacttctcactgggcctagtgtggtgcccaggtttttgccttgcttcacttctgtctctacatttaaatagacgggttaggcatataaaccttggcttttcataagctctacctgcctatccccaggagttagggaggatctatttgtgatggcctagggtttaagagctgtggaggactgaaaactggataaaaagggggtccttttccttgcccctgtctctcactcagatgcgcttctttttcgccactgtttggcagttttctgttaagcccccctccccctgccccagttctccaggtgcgttactatttctgggatcatggggtcagttttaggacacttgaacacttcttttccccccttcccttcacagtaactggggcaggggcctacggggaggggcttgtactgaactatctagtgatcacgttaacacctaactctccttctttcttccaggggccgggctagagcgacatcatggtattccccttactaaaaaaagtgtgtattaggaggagagagaggaaaaaaagaggaaagaaggaaaaaaaaaagaattaaaaaaaaaaaaaagaaaaacagaagatgaccttgatggaaaaaaaatattttttaaaaaaaagatatactgtggaaggggggagaatcccataactaactgctgaggagggacctgctttggggagtaggggaaggcccagggagtggggcagggggctgcttattcactctggggattcgccatggacacgtctcaactgcgcaagctgctgcccatgtttccctgccccacttcacccccttgggggctgctcaagggtaggtgggcgtgggtggtaggaggtttttttttttacccagggctctggaaggacaccaaactgttctgcttgttaccttccctccgtcttctcctcgcctt

SEQ ID NO: 14388 - DNA, 1050 bp, Homo sapiens
tgagacctgaagttccgctggccggtagtgtagcaggaaagggcaggtcctcccgggtcgtgagccagtagcctcctggggtggcaaggtgtagagaggggggcgttgaaaggacacccgctacccggcctgctttctaggggtctctttggattgaggacatcagcagcagtggaagggattttactggagacctgtcactgtcagagccttaaaatatcaccgacggggccttaatgtcaccgaggtagagagaaaagggcagtagccctagagactattgcgacacagtgtgcccctcataagtttttccagggaggggttctgtactgagttgacgccccaggagctgagcaccaggctttgcatccttgggaactcagcaaacgtttgttcagccaattgcaggtagcatggcccagggcttgattgaggtggagcgaaagttccttccagggcctggcacagaggagcggctgcaggagttggggggcaccctggagtaccgggtcaccttccgagacacctactatgacacccctgagctgagcctcatgcaggctgaccactggctgcgacgacgagaggatagtggatgggagctcaaatgtcctggagcagcaggtgtcttaggaccccacacggagtataaggaactcacagcggaacctacaattgtggcccaactctgtaaggtgctgcgggctgacggcctgggggctggagatgtggctgctgtgctgggcccactggggctgcaggaagtagctagttttgtgactaagcggagtgcctggaagctggtgctcttgggagctgatgaagaggagccacagctcagggtggacttggatacagccgactttggctacgctgtgggtgaggtagaggccctggtgcatgaggaggctgaagtaccaactgccctagagaagatccacaggctcagcagcatgcttggtgagggagacaggcccttttgtgcttttcctgctccccacttttctcttttggaggcacctgctggaccatgcagtgggggagggcctc

SEQ ID NO: 14389 - DNA, 1079 bp, Homo sapiens
cctcacgctcaaacactttgagatctgggatgggagctggagtagggagacagaagcagctcagtgtgcaggtttgagagaacatgtttgttcattcattcaacaaaaattgagtaaacacctactggccctgcactactcgaaaggctagtaacaaagtagacatgtagatgaggatggagcttactgtctaatgggggagagaaacaataaaaaaaggccgggcgtgagccagtaatcccagcactttgggaggctgaggtgggtggatcacctgaggcccggacttgggaggctgagacacaagaacagcttgaacccgggaggcagaggttgcagtgagccgagatcacgccactgcactccagcctgggtgacagagcaagacgctgtctcaaaaaaaaaaaaaaaaaaaaaaaaaaaaaggcaagataattacagaccataatagatgctatgaaggaagtaagtcatgccagaataactggggagaactgacttaaataggagtggtaggggaaggcatctgacattttagctgaagcctgaagagtgagaatgagctggtcatttgatgtgctggggaaagaacattccatgtaaaaaagaacatgaaatgccaagggtgggagggtgtgaggagctgagaagggggcagtgagtgggtagtgggaaagtggtataagaagggttggggaggaagcagggccctgtaggccagggaaagaagtctggaacaaagggaagacagatgaccatgattgacttcattcttttacctcctgagatggcgatgggatgggggacacacaggaagaagcagggtccatgagcctcagcccttggcttaggaggaggagcagtacatttccacctaccttctctaagacatcttccctttgcttaggcttacctgggggtggaggtacacagggaaggtcaagcaggtgtaccagggcacctcctggggaggggtccagatggggaggatgctggacatccccagaagccccatccaggagatctagcagatccaggagctgtgaggcctggcagaagggacagaaggggcagggctg

SEQ ID NO: 14390 - DNA, 1028 bp, Homo sapiens
caagaatgttgacagctagaacctatgagaggcagaagttggggtcagtcggaaaggagcaacctgctcagccattgaggactgggaacacattggcgcaagatgatggggctaggagggagaaaccagcaagcaggacctgtgtgggtgaggtggtgggcggggccgtagtgggagaggcataaggggtgatacccgtaggccagctgcagagcggatatccatgatggtgagtactgtctcaaacaggaccgcatttccggcatttcggctggtgtccgtgttagtggccacctgagtggatgagagaggagatgtatctgctcaaggccctcctcaggtctcctttttttgatacagggtctcactctgtcgcccaaagctcactgcagccttgacctcccaggctctgatgatcctcctgcctcagcctcctgagtggctgggactacaggcacatgccaacaagcccaggtaatcctcaggattcttgaaggactccaacatgttatctgtccatccttcaaccatccaacaaagttccctgaggctctactatgtgccagggccagcctgggcactggggcaatagcactaagacagactgtgtcccttcttcatggagttcactgtctagaggagatggagaggcaattacacggccactgcacagtgacgagtcatgtgaggggcacccagggctgatggggtctccaagcaacacagctaaccagtgccctcccaggccccacctgggccagcaagtcattcatggtctcactgctctcctcgtggttccggcccaggatccgaagcagacgaagtatctggacctgaggttgggttgaaaatggaaagttggaggggttcataggataaggagtcgtggggctgaggagaaaactccaacatgtgagggtctggctcgctccctagagccttcccccacctcctcacctccacaggtcccttggtcctaggaggggaacagaggtgtgtgaggccaggggagtttaggacaggcttaa

SEQ ID NO: 14391 - DNA, 1049 bp, Homo sapiens
caaaacaaatggaaagcaaaaaaaagcagggattgcaatcctggtctctgataaaacagacattaaaccaacaaagatgaaaggagacaaagaaggccatcacataatggtaaggggatcagttcaacaagaagagctaactatcctaaatatatatgcacccaatacaggagaacccagattcataaagcaagttcttagagacctacaaagaggcttagactcccatacaatagtaatgggagacagtaacaccccactgttaatattagacagaaaacatgacaaaattaataaggatgtccaggacttgaactcagctctagaccaagtaggcctaatacacatctacagaactctccaccccaagtcaacacaatatacattcttctcagcaccacatcacacttattctaaaattgaccacataattggaagtaaaacactcctcagcaaatgccaaagaacagcaatcacaacaaactgtctcccagaccacagtgcaatcaaattagaactcaggactgaaaaactcactcaaaactgcacaactacatggaaactgaacaacctgctcctgaatgactactaggtaaataacaaactgaaggcagaaataaacatggtctttgaaaccaatgagaacaaagacacagtgtagcagaatctctgggacacatttaaaacagtgtgtagagggatatttacagcactgaatacccacaagagaaagcaggaaagatctaaaatcaacaccctaacctcaaaattaaaagaactagagaagcaagagcaaacaaattcaaaagctagcagaagacaacaaataatgatgatcagagcagaactgaaggtgatagagacattaaaaaaaaaaccttcaaaggatcaatgaatccaggagctggatttttgaaaagatcaacaaaatggactgctagcaagactaataaggaagaaaagagagaagagtcaaatagacacaataaaaaatcataaaggggatatcaccagtgatcccacagaaatacacactaccatcagagaat

SEQ ID NO: 14392 - DNA, 1022 bp, Homo sapiens
ccctgctgggcacccatggcactcagctccatacccagtaagagtggttcttacctagggagggtcaccaagaggacctgctcatgtgtttgaggggctattcaagggagcctgtctctgtgactacacaaatatagtctattttccaagtaagcttgaaaaaaaaaaggggggggtcctagtgggaaaggagtgatgtaaggggtgaagagatgggaagggagtgttgaactttttagtaaggcagttgacacatgatatgaggccacttcgatttacttgaaaaacaagtttaatttgccctgactctaacctgttcttgaggaaagaatgccttgaagggagagaccacctggaattgactggaaaagggtgcagctggctttctttctttgcttatggctctttgaggagaagatgggtttgggggtcccttcagaatattgtattcttttttgtttgtgttttgtgttgtttttagtagacatagacagggctcactgtgttccccagtctggagaacgggctattcacaggtgtgatcaagtgcacaccacagcctgcaactcctgggctcaagcaatccttgcctcccaggtagctaagactacagttgcacacaccaccgcacccagcttagaatattgtcttctgtggtggacttctcaggcagaggctcagaaggaaatgctgtgaggatgtttagcttgttgggaggtcaacttagtaggtcatgtccacagcgtattggtcttgctcttgttctaaggaaatgatgttagaatgtttagctcgctgggaggtcaacttagtaggtcacgtccacagcatgttggtcttgctcttgctgtaagagtaaaactctctttcctactgtgttttataggagaccaaaaataacagccaaggtctagtcagcctcaaacctcaaaatgagtaccaagtggtctaagagctagatagccattgactctgaatttggttggtttgggggaagaagtcccctcctttataatgggggt

SEQ ID NO: 14393 - DNA, 1048 bp, Homo sapiens
ctagaaatggggcacagagccactggaggcctctgactgacctctactccctggccctgtaggctgtgttatatgacatcatcctgaagaacttcgagaagctcaagaagcccaggggagaaacaaagggaatgatctattgagagccctctctcccattctgtgatgagtacagcagagaccttcctgctttttactggggactccagattttccccaaacttgcttctgttgagatttttccctcaccttgcctctcaggcacaataaatatagttataccactgcccatcagcccaagtctctttattggaaccgggccccgctggccctggctcaggcatttccatttccattagtgggaccaacccactgggtgatttgagtgttgagccgctggttggtccagtcctgccggatgtcatcaaggtggcagtcaaagtccacaaggtgctggtgggcccgatcttccagtagagctcccaccatctgccgtgactcttcccagtccctccacatcactctgaaatagtaacccccatggaggtcaaacagcaagtagtgggtccagacacagacttaacagagattgggtctagagaaagacccttggggcagggccaaggacagaggagacccaggagccttgggcttctaagaagaggtagagggagtggggtactcacaagttcttatccttagggacccagcggagaccttggttctccaggacgatgaccgggggcacacgaggctgaggcaccagtttctgattatccaactgagtggacaaagatgggcaagtgagagtttcaagggtccccccaccctacttgcttttcacctccccacccagaaacccaagcctcaccataataagtactgcatcagggaagaattctgcaattcgcccagcaattttcaaggccaggggcccagggctgtgtagagggaagatcagaggagtgaggagccaactgtgggcaaaacccatccatttgagctgggcctcccaggtctcataggtgtgggcgcagctgtggccttt

SEQ ID NO: 14394 - DNA, 1049 bp, Homo sapiens
catctcaaaacaaaaacagacggggcgcggtggctcatgcctataatcccagcactttgggaggccaaggtgggcagatcacctgaggtcgggagttcaagacctgcctgaccaacatggagaaaccctgtctctactaaacatacaaaatagctaggcatggtggtgcatgtctgtaatcctagctactagggagggtgaggcaggagaatcgcttgaacccaggagttggaggttgtagtgagccaagatcgtgccattgcactccagcctgggcaacaagagcgaaactccatctcaaaaaaaaaaaaagagaaaaaaggtcctatgccaagttctcaaggaagatttggagtttgccacaaatacagaaaagcagttgtggatcattacgtgtgtgttaaaaaataaaattggggaggtaagcaggatcagacttaaagctgtgtgaaagaatttggatggacttgatcctaaagagaatggggagacactgaattgtttcaaatggaaataaaatcagatttatgctttggacttgggatggacagactggagtggagcagaaggctggcgggggccatctgttcgatgatggaggcgtgaactaagggattagcagtgggctcagaaaaccatgagaatattatcaaagagagaatcaggaggtataagagataggatttcgtgatagattgaatgtagggactgaggcaggagggtctgggatgacatatgagtgtctaaattaagggtgattagtgtacaactcacagaaaagtctgagagaagaaaataagttcaattattgatatggttaagtttgagatggatatggtaagttccatgcctggggcagacatggccacgtaatactggctgctctatctaaactccagatatatgggatggagatgaaattaggagcagtcagcataaatgtagtattgacaccatgggtatggacaagattaagggaggatgtgaaggtttgagaaaataaagcttgtgatgtaacacttgggatatgattaagggatggatagaga

SEQ ID NO: 14395 - DNA, 1022 bp, Homo sapiens
agttcaaaaggccatctgaattagtgagattcaaagctaagttctgctccgatatttctgatatatgaacagaattttcccttttgtcctgtttagcagtttgtacaccttgccaacttttcccaccacccaggtcaccccctcacagtcacatgcatcccttcagttatgcgattgtccacattaagcattcactgttttagtccagaaactacagtttaagcattcaaaaatcctaactagaagatcctaggagaagcagcttattaattttctttaataagaacaattcattaataaaagaatacttctgccattctttttttaatcttcctcttctttaagtcctaggttcctgggagtttctgggatgtgccccaaatgggatgtgtttttcttatatacaagttgttcactttgaaatggaagatgctgctcctgtcagtactattacctgcctctatacttgttgctgagaaggtagagagttatctgggcactttgagaacatatgcactctgctggttgatccatgtagccctggttgatgaattctgctattgtttgtggctccattagtcttaaggacttcatatcctttttctatttttgattgctgtgtctttgtggaatgtcttgtcatttctttaaggttgatagttatgcagttttatttttactttatttttattgccattcagtaactgcttaggaatctttctgttgcccactgtccatctgccctgaccagtagagttcagaattggtgactctgactgcagagttaacaggcgtgctgtaatacatgaacctttttggggactgtcttgatgctttatgtggagcctggctttcagtattgctgacgagaggtaaagaaatcaggttttagagataagagccaagtcttactgtaataaaaaggttggatgcaagcaaacatctttttctaagtttggtatgtaatctgatgtgctcatcatgccacactctgccagtatatctccaacatctgctgactt

SEQ ID NO: 14396 - DNA, 1125 bp, Homo sapiens
ctgaccatcgcagagcacagcgttatagcgagacagggcatgatggatccccagcagcccagagatactcagtgaagtcacatacccggaggtggggccagtgaagtcacatacctggaggtggggccaggtttggaaaccaggttttcaaatgactatcttagtgcttttgcacccatcagctctatcttaggatatgttgagcaacaaaatggtgaactgtgggggtgctggtgggatagtagatatggttgtaacggataggacatccatcaccaaataatatgaattaatgtgtctttgtcaacctggagggaggtccctagtgatggcactttttcagtgacgtgggatgagcacagatgccactctcataatcgaaggtcacttgcacataattgggaggaatactggatgatggcgtctggtgagattgttgggccagatttgtcatgtggtattgaatagggacagaattacactctggttctttggtcttcagataatcagctgcacaagagtgagatacgtgaggggtggaataacgatagtgtatgaagacaggaggactctggctgataagagattggaaagaattgactgtgatctgcttgccaaaagcactaacatgactttgggatgcactaagagagctttagtacccagaacaatggggctcataggccccagactctgtgagagtcaaaccctgtgaggagtgtgtggcccattttgagagggacagagacaaactgtagagtccagaggtagaaatcaggatggtgagaagagcccatgaccacagggaagacatgaagatactgaactgggagagaagattcaaggggcagatgataatggtctttcaactcctggaatagaaaccgaattgattctgcatatcttgagagcaaagaccaaagaccagagagtggatgtagatcctttatgaggaaggactttctaataattaaagctaattattctaccaaaggtagaatgggcctcaatgagaggtgggaggcattcaagcatatgttggtcaaccactttgtgagaacgtagtagtggacattcagagaccagagtctctccactctgaagttctgaaagatgctgatccct

SEQ ID NO: 14397 - DNA, 1033 bp, Homo sapiens
tgtcgccatggctgattcaagacaccacatgaaatcactgaatgaggacttagaagagatgtgcatcagaagctctcagaagctggtgagccactccacttaccactggaacagtaactggggacggtccccagaaagccacaggaagacttctgccaatcttgtgggcagcctggggaagcctcagctctcactctgaagattttgaataagtaaaatgatttatgtttctctgatttatggcagccatcccatcactttggatggttatctaggctgtccggtggaaggttccctcagaatagcccttggctcctcttaggaacacaccccattgccttgcctcaggctaggacagcctcttgcataggcaaggcagctctatagggctcatgcaattagttctgcagaaagcaattcaggtagaaccatcccgagaggaaggatgagagttgtcggtgtcacagctattcctctgtccctcacttggattcaggcagtaccttctccccaagttccaggaaatcatgaacaccaaggaatctgcctttgctggactgggcctcagccagagatcaggcccagctagaaggtagcaggcatccctgaagagatggtggaatgggggtggaaaaccagtgtgagactggatgtgcccacttctagctgtggagcgactctgctcctcagctggggcatgggaaacaggtcttgcagggcagagcaggaacagttctggaggaaaggggtcttgtcctggggcagaaccccttgagaagcttcacatttatacatctttgagtctttctcccaaattgttaacatgttgctgagcagagaatcagcagtcaaaaacacattgaaagagaaatgagacttttattagctccaagagcatttttcaatactaaggcaaaaagtaaaaagaaggacaaggaaaaccaaggcacaaagaagggacctaggcgcaccccagaactcaccacggacacacagcagagggcttctcttcatatcaagggtatgggtaaac

SEQ ID NO: 14398 - DNA, 1041 bp, Homo sapiens
agccggacaggtcgcgaagcacacatggggcagggtccgcgctctccacacaaggtggggcgccggttcccagctggtggcaaacgggggcgcggggccaaggggtcggggcgccccttaccaggccgtaagcggcaaccctggccgcctccggatgggcgctcggagccggctccagattcgcacccgcacctgagcccggaagctctgggatatttccgccgggcgctgtcagcattgaaagaggctcccgagactggggaagaacgaggtaggcagcaacttcggggtttagaccaagagcatcaaatccagggcaggcaaggaaactttctagggtcggcagggcgtggggacttagtttcatttcccatgtcctcttcctcggcctccgacccacgacccttggttaagcgagggtacataactgtattctctactaagtctcttcaaagtgtgtctttcttcccttttcagatctgatggtgcacaatataatgaaggaagtagagactcaggccctagctttgtccacgaacaggactggcagtgagatgctgcaggaactgttgggattcagtcccttgaaaccgctttgtcgcgtgtgggctgctctgcgctctaacttgcgcactgtggcctgtcaccgatgcggggtccatgtattacaaagtgctttgctacagctccctcgattgctggggagtgctgcagaggaggaggaggaggaggaggaggatggaaaggatggtcccacggagaccctggaggagctggtcctgggactagccgctgaggtgtgtgatgattttcttgtctactgtggagacacacatggcagcttcgtggtcagaactctgcttcaggtgttaggagggactattctggagtctgagagagccaggccccgtggttcccaatcatctggtaagtattacaagaggaaagtggacctagggggaagaagaatttagaaagttcagaatgagacagtaaacagaagagtaagtcttcatgggggagcttgaccgggaagaatta

SEQ ID NO: 14399 - DNA, 1012 bp, Homo sapiens
gcagctctccgtgttcttcagtttttgggggatcctagctagaggctgacctttttcctctttgctcctaccatgtcattggcatctccccttgctcccctccaagtcacttctggtttggaattggaaagcaagccaggttctcacgaagtccacccttctgtcttatctacaatgctgcacctcacttcccacaccctcaagagttctccagaagtgttttcagtaatagtgtttaacctttttgagtccttactctgtgccaggtatgaggactttacctacattatcctcttactcctttcaacaaccctaggaggtgatgtattattattgcctttttatagttgaagaaactgaggttttggtaggttgaacaacttcccaaggtttgacaggcaggaagtggcagaatcagaatttgaacttgatttgtcacacaaatcacctttccatactagcttctgaattctgtccctcgaactctccctatctcctgctaacccctgctcccatagaaaagctcactcggtggaaaatgaacaaattgaccagagctcattaggcccactccgctgcttttagccctcagagggaggggcagctgtgtgacttcagccctctgctccatcatcacaagttgccactgttgtggagccccttggctacccctgctataggaaccgaggaacttggcctacttactttggctagcagctcctggcgggtggcagctgtcaggcctttccggatggtccgcttgtgatcacagacacggaaaggtcgctggggtggtggagctgaggtccagaccctccgtccaaactccgagcttatattagatactgacctggtagttgagaagaaaagtcaagaaggggcgaggaggggcttggtgagtgtaaagggcatgatgagggtagagtggctagagggctagggagggagagatctaggtttatcgattagggatgagggagagaccatggagtgcaggtgggggcgggtggct

SEQ ID NO: 14400 - DNA, 1032 bp, Homo sapiens
agtcacacttaggtcatcttctctcacttttctccttttgccgattagtggacgtgacagagatgtgaatggggcagggatgtcctttgatggcatcaagactttagcttctggtgcgctgtgtcccagctctgatttcagttgcagccgtgatggacagttgcatggaagctgagactctcactgacagtgaaaccctcaaatgaacacaatccctgctttcctgccaaggatccttgtagggtcccccagcttccccactttttttctgtgtcctgacaaagaaacacagagtaacttgattgccctgtgacctggccagttgcatttcccctgcaggcttgagcccaagccagagccttgaaaaggtattcaggttgttgcccaaaacactgaaaaaaactggccctggccctgaaccaaataccttgaaccctcgtaaactccataccctgacccccttgttttggatatacccaggtagaacaactctctctcactgtctgttgtgaggatacgctgtagcccactcattaagtacattctcctaataaatgctttggactgatcaccctgccagtcttttgtcttgggcaatctatacttttctcagaggttcccaaggcctactgaagggacttaacatactcttaatggctttcctctctcttgttttaccttatgccctcacttcctgagttaacctcccaaatacaggatcacctgtacccaagcccttagctcaagaatacaggatcacctgtacccaagcccttagctcaagctctgctttggaagaacccaaactaagacagtgctcctggtgccctccccaagcaacctcaagttctggctgttacttgagcagaggcctttcttttcccttcccccagctctatccatctgccaggcccccctcaaatctcttcatttccaagttttgcttgacttttccaagaggagagggctgcttcttagtatgtccctactcatcctttcctttcttgtcttgtatcctggtgcagcctggta

SEQ ID NO: 14401 - DNA, 1028 bp, Homo sapiens
ctgggcctatgctagcccacttcttccttttcccagaagaggtagacatttttcctaggagctggcttcaggcctacccaccatctggaagaggacttttggggttgggggtaccccagagaggccatctctgggttagaaaatagcctcctaggcactcatcgaaagtcattcaaggctttggatggagggcgggaacttccctctttagggatgtatcaccattttggcttcagctaggagggcttgccatccatcctttgcctccagcattgactgcgcgggaatcctgaagcttcggaattcagacattgagcttcggaagggtgagacggacatcgggcgcaaaaacacacgtgtacggctggtgttccgggtacacgtgccccagggcggcgggaaggtcgtctcagtacaggcagcatcggtgcccatcgagtgctgtgagcaaagaggccctgggccatgtctctgtctcttgcaactcttttgtctgtgtgtgtgtgtctgtctgcccattccctctgcagcgtcctgtgccctgtctgtcctgggtagctctatagaggactcagcttctttctattctagtttgcccctgccacagactctgtctctggggtggcccagagtgacactggaccctatctattcctggggtgccctgtgcccttgtttgggaaactccctggtctaccctgtttaaccctctctctgctctgggagcggccccttacatggtgtatgtgactccatggatattactggtttatttgtgtgtctactgctgaggagggctccctcagagccctgtggcagttttcccaaagagggtggggacagaggaggccacccctccatgcccagcccagccagtcctcttccttgcactgctctgcagcccagcgctcagcccaggagctgccccaggtggaggcctacagccccagtgcctgctctgtgagaggaggcgaggaactggtactgactggctccaacttcctgccagactccaaggtggtgttcat

SEQ ID NO: 14402 - DNA, 1043 bp, Homo sapiens
tgggagcccacatggagggagttgggcaagatttgattcggagcaggtgtcaagacgtgttggggaaactgaggcccagtggaatagaagccagtagaggaggaatctagaggcctcctagattaagacctgcctggaatggattgggggtgggtctttggaaaaggaggggacccacctctagcccagtctctcaactgcccctcctttacagtgagtgagatcattggccgagacctgagtggcttccctgcacctcctggagaagagcctcctgcctgaaccacgtgaactgtcatcacctggcaaccccagccccagcctcagccctgccccctttccctccttcctggagtggtggctacagaagcttggggccaaccctggctcctctttccccagcttctgtctgtctcactgtcttccctcccctcccccagctgaggtgtggccctcaggcctggtgctgccttggagggctgggggaaggagtgtgtggaggagggaggagggtgaagactgaggctaggtgccagaatggactggagtgaaggcgtgtctagagtgtgggctggctgttgtgctggaaagctggggacaggttgatggtaataaactgctcaatgaccagtgcttcaggctccagagctctttggagagatgggttggggcagcttactccagccctggcccaaggaggcccagaagttggaaagagatggaatgtggctgggaacattgcatcccaaagagcttctcagtggaggaggctggggaaggcatgagggggctcagaggctccttgactgggaccaggattgggggccagggcttgagtaggcctctccactctcctccttgggggtccagattccttaggagctttgggatgaggcccaggaggctgcatttttccaggtccttagtcttgccaccacacagatgattctgattcatagccaagatgaggacacactgatgtagctgatctctcatttacagaggaggattctaaagttcagagagggaaaggggcttgcctg

SEQ ID NO: 14403 - DNA, 1088 bp, Homo sapiens
ggtgacgaaacttcagcacatctctgtccattttggaaaaaagaggatcccctcaagagcaaataggcggaaacaatgaccccgcgcccggagtttttctgagctcctaaatagggagagagacccgacaaaacaaacaagcgaaggcgacacagccaggttagcaccgagcagcagcgcaggagcgccagaagggcgggagcacacgggcccttccccacagccagcgcctccgcgggtcccacccctcgagggcggggccgaccgctctttccgggtttgcgagcggaagtggacgaatttgaatcctgtgggccgttgaatgtggctgctcgcggtcggcgtgccccgacgtacagcgggccgggaaaagtggcactgaggctctggaacttctgcccagctctccttggtgagtaaatggggaacgggaagacgcagaacgttccagagagagaagcaggaccgtggggtgggagagggtgtcaggaggccggacgtcgcagccggggcctcgcagtgcttttggggacgtctggtgctggggcccggcctggagactaagggaattcggggcactgggggcgtttgctggaccagcgctctcgacggttgcgcacgccagccagctctcagtgttgaggattcggaggccctgccggtcccccgcgagtaaaccttgtttatacgcatcctccgtggctttttttaaacccgtagtttattatttccaccaattcggctcgaatgctgaaattttaacagtagttaaatctcactgtgaaggcgttgccacgtttaaacaaatctcttttaatgaaagatggaaggttggggcgggtttagaatgaaaagatgctctacgtggctccgcgttcctcctgagagagatacccgggcaaccttgattaactctggactgcagggaagtgacagtctttgaaatgcctgagtgggatttaaactgaaattcgagtgtcctttgtatttaaaacccggatatttttctttcacggttgacatttttcatgtaccgcaaaaatccgagactcctatttaaaccggctgtggtaacagcggtggtgatt

SEQ ID NO: 14404 - DNA, 1063 bp, Homo sapiens
gtaggattattgtgaggattgaatgagttaatatatacaaagaccttaaaatagtgtgtgccacatagcaaatgatacataagtctccaattacattgagttactaaactgtaaaaaccgcatcacatacattctctcattaatctttacaatatcgctgaggtagttactatcttcaaataagaaaacaggctaagaggggctcggtaatttgttctcacacaactagtaacacgttggaactgaagtcggaaattagatttaactcaaaagtttatgcttttttaaaaaagtaatatttcttgcctctcttcagtctccctccagatgttgctccataagtatctctgatggcttctcattgtctaccatatataattcaaatttcttagctttgctttttatttacagagcccttcagagtctggtaccaacttctcttcccaaggaccatcttcataatattacaccagtctcttccaacctgctgatgttctatcaatactactagaattctccaaatctatctcttattacattttatgcatatttagccattggcctttttatttccccttaagattttactcaaatgggtttaaagacttctccaggctgtgctttttgcttataaatatatagtgcgagactgcccttgtccttttaatttttatgtctgcagtgcacagtgcagaacagtgagtgtcatgatactctgaaactgtgtatgttcagtgagtacttattattttaacaatttaacacattttgtcttgggttaatgactcaaaaagttgttgcttttttttttttaaggcttggcttttttctgagatgatagcatataattctgtgtagtttagtagagattttagtgatagcatatggtttataaactatggaaaaataagtattgaaattataggctcagaggacatttcaagtggcaaaaaatcaggagcaatgtttgttaatattcatgaatttaaaatgctttatacatattttctcacttaatcctcacaaccattttattatctctatattaagatgaagaaactga

SEQ ID NO: 14405 - DNA, 1029 bp, Homo sapiens
ttatttgagacaagatctctgtcacccaaagctggagctcagtggcacaatcatagttcactgcagcctccaactcttggactccagctgtcctcccacctcagcttcccaggcagctaggactacaggcatttgccaccaagactggctaattaaaaattttttttatagagacaggatatcaccatgttgtccaggctggttgcaaacacctagcctcaagcgatccttccacctcagcctcccaaagtgctggaattacaggtgtgagccaccatgcccagtcaaaaattagccattttaaagtagacatttcagtgacagtacattcacgatgttgtgcaaccatcacctctacctagttccaaaacatgtaaccttttatgtctgacttccctcatttaatataatgttttcaaggttatctatgttgtagcatgtttcagtactttattcctttttattgccacataatcattctatggatataccacattttgtatatccattcatcaattgatgtataattaggttgtttctttgtaatgtattgatttagtgatctcttttgtgaatagtgctgctgtgaacatatgtatgcaagtttttgtttgaactgaaatatttcaattgttttggttacatagctagtggaattgctgggtgatatggtagtcttgtttaatgtgttgtggaattgccaaactgttttccacccttgcatcattttactttcccactagcaatatgtaagggttctaatttctccatatcatcattaacacttactattttagtttgtaaaaattattattatagctattatagtggacatgaagtggtgtctcattgtggctttgatttacttatcactaatataatgagcattttttcatgtgctgttggccatttgaatattttctttggagaaatgtcttcagatattttgttcatttttaagttggattacttgtctttttgttgttgcattgtaagagtttctaatgtattctagatactagacccttt

SEQ ID NO: 14406 - DNA, 1049 bp, Homo sapiens
ttgcagtttaggcttagcttttccattcctgcaaaaaaaggccatcgggattttgacaggaattgtatcaaatccataaattgctttggggagtataaccatcttaatgaaatagtttttcaacctatggatgcaaaatgtcttttcatttatttacagttctttaatttctttcagcactgttttgtagttttcagtgcaaaaatcttgcaccaccatggttaaatttattactaagtaatttttatgctattgtaaatggaattgtttacttaatttcctttttggattgttcattgttatatagaaatacaactgatatttgtgtgttgatcttgcatcctgtaacttagctgaattcgtttagtagctctaacagttttttgtgaattctgtaggaaattctacatataagatcatgccttctttgaatagagttacttcttgctttcttgctttattattctgaatagaccttctggttcagtgttgactacaagtggtggaagtgtgtatctttgttttgttccagatcttaggtggaaagtgtgcagtctttcactgataattatgttaattacaggtttttccatagatgctgaggaagttcccttatattcctaaatgtttgagtgtttttatcatcaatgagttgtattttgtcaaatgctttttctgcatctattgagatgagcatgtgaccttttcctttttctctattagtatggtatattatattggttgatttccatatgctgaaccacctttgcatttctgggataaatcccacttggttatggtacaaaattttctttatcagaatcagtttgctggtagtttgttaaggatatttgcatctatgttcataagagataattggcttgtagttttattttctgtgatgtctttttctggctttggtatcggggtattggtggcttcataaaatgagttaggaagtgtcataatatcttttggaggggtttgagaaagattggtgccaatttttcttcaaaggtttaatagggttcaccagtgaacccatctgg

SEQ ID NO: 14407 - DNA, 1021 bp, Homo sapiens
tttaaatgtctggtcaaatcttttgtccattttgttcattttattgtgatgtctatttgagttgtaagcattctttatgcattgtggatataaatcctttgtcaggtatatgttttgccagtgtttattcccaatctgtgttttgcctttttctttgcttaactatgtttttttgattagaaagttcttaattttgatgtttaattcatcagtgttttttatgattcagtttcctaagaaatctttgccaaaccccaagatcatgaagattcttcactatgttttcttctagaagttttttttcttgtgatccaatttgaattaagttttaatatatgaggtcaatgttcttccccccaccctccgcccaaagcattcagttatttcaatactatttattgaatagactaccatttgaatacagtgaattaccttggtatctttgttgaaaagcaattgtctgggtctgtttctggcctttcccttgtgttctattgagctatatatctgacttttcccttatgatctattgagctacacatctgtcttgattaacatagctctataagaagtcatgaaatcacatagttggagaccactttttctttttaaaaatgtttttgctattacaagacttttgcatttttatataggttttagaatcagcatgccagtatcttaaaaaaaaaaaaaacctgctggggattttggttgggattgtgttaaattgacatcttaacaatattacgcccatgagcattgtctatctcttcatttatttaggtctttcatttctctcagcagtgttttgtagcttttcagagtgtagtctttttccacatcttttactaagtttttacctattgtgaatagaattgttctctaattttctgattaattcttgctgttatacagatttgccttgtttcattacaacttgttaaagtcacttattcttataaatatgttggtaggattttctatgtagatgatcatatgtgaaaacagttttacttcatcc

SEQ ID NO: 14408 - DNA, 1064 bp, Homo sapiens
tttttcctaagatggactgtttctttatttacatgaatgtatttaaggtagaaactttacttcattattgtaatagaaaccagtatcatttactacactagacaccaatcttaataataaatataatgaaatcaggacaattttaccaaattttaaacattaaaagcaggaaggtacaaatgaatataaaaataatctacttataaaaatgcatgcctgaaacctagtctgttctgcattcaaggccctccatactgggtagagggagacaaggggagagaggaacaaatggaaaaccacaggtccacagcatacagcagatgtacctccatccagggttcatggcaagagtttcccctcttctatagtttcagccagttcacaaggactcctcttttgtagactcagctaattctacataattctctttctcttgagctttatgcacacttgcgggtaaaagtgtaggtattggggatggagttaaggtggagcttactggtgtagaatgtccaatatgaacaaatggcaatttgctggagttaatgtgaacagttcccttgtatggaagggaaggaagaggagctgaaatcttttaaagggttaggagagatacttcgagttatgacttatccctttaaaccagagtgagggagggcagagtagttaggctatttcactatattaaatacgagctcatcttatttcttttcagttctagaatctatttggtgagcagcctattaacaaatataataccttttaacatgtgacatctattcttgattgcatgtattattcaaggtaaataatactagtttccataactggtaaaccctgacatcttactggtttaaaacaagagaagtttattgcttggtcaggttacagtccagtgtgcatggtttaaggaagatggagcagttagggagtttctgcggtatgcaatcatttagagatgcaagcacccttcatcttgtagggatctacttcttagggatcctgtcttttcagctagtgattttcaacttgtttcattagcatcttaataaaattttctgtat

SEQ ID NO: 14409 - DNA, 1032 bp, Homo sapiens
tttgagatatacagtttggtggcatttagtacatttacaatgttgtgaaaccatcaccactatctagttctaaaacattttaatcgccctcaaaggaaactctgtacctattaagtagtcacccctcattttccgtgtccccagcccctggtaaccactaatctgctttttgtgtgtccctgtggatttacttatgttggataaagtaatccataagtaaattgagtaatattgtgaccctttgtgtgtgtttgacttctttcacttaacataatatttctaggtttattcatgctgtagcatgtattactactttcatcctttttattgctgaataatattccatcatatgggcataccatattttgtttatccacttatccatcctttgatggacatttggcttgtttctgcttagctattgtgaacagtgctgctgtgaacattagtttacaagtatttgtgtgaacatctgttttcagttctttggtatgtatatccaggaatagaattactgtgtcatatggtaactctttgtttaaattttgaagaactgctggactatttcccaaagctctacatcattttatatttctaccagcagtgtgtgatggttttgattttttccagtcctttgtcaatacttgttattgtcagacattttgattacagctatccttgtgagtgtgaagtggtatctcactgttgttattatttacatttctctgttgactgctgaccagtgatattaagcatcttttaatgtgtttaatggctctttgtatatcttctttggagaaatgtctattcaaatctagtgcctatttttaaattggattgttggtgattttgttgttatcagagtttttttaatgcatcctggctactagacctttagatgtgtagagtgtctttcactctcttgatagtgtccttttttttttttttttttttgagacggagtcttgctctgtcgcccaggctggagtgcagtcacacaatcttggctcaccactgcaacctccacctccc

SEQ ID NO: 14410 - DNA, 1050 bp, Homo sapiens
ccaccccatgtcaagtctggaaattaaggaggatggaaaaataagcagctttattcaagaaggtctacaagggaagcacataagaaacatttattcttttagttgaggcaaagaagtggaggcaattatttttgaagatatcaagaaggtaggagagttaatggtaaaaacagaggttctagggcacaaggaagaaccgtgggagaaaggtgagcatgaatctaaggactacgtgagatgttaaacgtgagatattagtatcataattcctaaacttcctggtgatagtgagcttgtggtaaaaggtggtctctaaaggtccccttatggtttggaactacagattgaatatcccttatccaaaatgcttggaaccagaattttagatttgaaatttttttcagatttaggaatatttgcttaccagttgagcacctctaatctgaaaatccaaaacccaaaatgttccaatgagcatttcctttgagcatcatgttggcactcagaaagtttcctattttgaagcattttggattttagatttttggattaagggatattcaacctgtacttattttcttaaaacatccgaatcctctccaagtatattgtgaacccttgaaaagaagagtctcatttgtgaactcaaactagaattccttgttgtcagttcattgggagagtttcgggttggcaggtattctccagtgacctaggtggtgctcaaaggggtcagcagtaactctgtaatccctgaatcagtgaccattttaattgccgtcttaagggttccaaggtgttttaggtactgttctgtattttgctaatgattgattcatttaataatttttctatttatgtaccactgttacatttcagttagcggcactggtagtatattcatttcctagggctgccatagcaaattggctgcttaaaacaaatttattctctcaccattctggaggccagaattgtaaatcaaagtgtcaaaagggttccttctagaggcactaagggagaattgattccatgcttctcccctagctt

SEQ ID NO: 14411 - DNA, 1674 bp, Homo sapiens
tccccaagtgtaatcaagtctacttagtatattctgtgtatcctttttattgtaatcctactctcactgctttaatttcagacactctttttggtaggagaccactagttggtctttctctagggccttagtccctatcaatttattcttcatactactgtctttaacttacctacctagcctctacttagttcagtttggcaagaatgtaatccttaactatattattaattgtattttcctaattacacattctctctcttgccggggaaacttcatatatattattccccatccttggaatgtcttttgtcctattttcctggcaaacctctatttcttcttctaaacttagcttttgctttactaaccctctgacataattatcagtatagacttaggtactccttcttgtttctttcatgtgtatacttaaaatactcacatacttttacacagtattgtagttttatacctgtatacctactcactagaattccttgaagtcgaagctgtcatgttttttggtacataataccaaatgttgtttgtatttttggtacatagcatggtgtttggcatctataaagcaggagttaactatctgttaaataaatgcatgctactagtttttactggggactggctcttctttccagtaggcttacagtttcctgtttccttctgagtaccctctgtctggtgcttctgtatctgtatttgctatagcaatgaggataggttttatacttctcccgttttgggaagaaagctgtcttagagattgagttaaaaacagaaccagtgatgatttttatgtaacatttaaaccccatttctagatgaggtaactcaggagtttcatttttttctcacattttaaagggcaacacaacatttagtaacattacacagtaagtaaaatgacattgcacaataagattgaaaaaaatatatgggtgatgtaaagctaagtattaattagctttttttttaaccattggaaaaaagaattatagattttagcagtgggataacttagtttataaggacaaagtttgagaacccactagcatagaaaatgttttcataatatattgttaaaaatagcacatgttctgttacataatatatcacctgataacagatttaaatcattaacagtagactttttattttccactgtaggttcaagcaataaatgcgggagtgtttttctttaggtgtacaatatgcaataatagtgacatctttcagaaagagatgttgagaatgggaattcatattcctgaaaagtgagtaacatttagccttatgataaaaaaaagatattttaaatgtaggatttaatagcaatggaaatgatcacttatgtctgattcagtgagcatggacaggtagccatttcaaatggtgaaatgcaaaaccttctcctcccccacatggccagttcttggaaagcagggactgtgtcataaatgtctcattcattgatttataatctctttataagtagctcagctatgtccaattttaattgattgactttgtacacttataataggcttcaaaatgtataaattaagagaatcaagatgtgatttaaaatatgtaagaatttttttaatacttaaacatgaagaatccagaaataatgatagtgaacttaaaatt

SEQ ID NO: 14412 - DNA, 1067 bp, Homo sapiens
aacagtgggtaattctggcattctcttttaggggcttttatactacttttgctgtaataggaaatttgaaagaaaatgagaaggcatttcatttcatttgaatttcctactatattttctgtaaacatcctaaccattgcctaaagcatcatttttactctgtatagttcacacagtttaattataaactccctttaaaataaaatgtaaaaataaagaaaaaactttccaaatagtaatgttaactcaaggcagctttggtatggtggagagtacgtgaatttaaatcacagaatctgaattcaagtttgtacacatctagttctttacatccttaataactaactctctctggatctcagtttcttcatctgtaaaatgtgactatgaatatgtagcttgtaaggttattacacaggtattgttaatgtcacttattaataagttgctttcaacaatttaaaaattaaggaaaaatttacttgttttggcacatcaaagttgctaatacatttgaaatgacaattttaattcaagctctgacagtaaggtaagacagcatatactgttgggagtaaacttgtgcctttgggaaagattatttagtgatatagatcaagaaccttaaaaatgttcctatcctttgacctactaataccatctgtaggaatcctaatcaaataaatataaacaagaatatgtgagtatgttgactgtaacattatgtctcataaagttagaaatatcacttagccaggatagccagggggatggtttgcattatagtacatctctaagttagtctaaatgcatttattaactgtagatttgagtaattttgagtagtatgataaaaagtttacaatataataagtggataaagcataagtcaaactttttatatttatatacacaaagaggtacaagtacagtcatttgtcacttagtaacagggatatgttctgagaaatgtgtcagtaggcaatttcatcatgcaaagatcataaagtatacttacgcaaacctagttggtgtagcctactacacaccaaggctctatggtaaag

SEQ ID NO: 14413 - DNA, 1144 bp, Homo sapiens
catttattctagaagaatatttcttggtttacttttactgcacccatatgtactaagaaatttgagtataaattaacaagtatcatttgaaatgtgcatgtcactcaaaagtaaatgagtaaagtggctgtattttctccttcattacagataaatactgcaacaactgtagctgacttaaagtcaataataaatgaatgctataactaccttgagttaattggatgtctcagacttataacgacattaagtgataaatatatgttagtaaaagacatacttggctaccatgtaattcagagagtccacacaccctttgaaaggtaagttgtttctattaatatatggctctttcaaattacatgtttaaagtggttaattatcttgtaatgtgagatatatttggtaataagtgagatgtttttctcagaaaaaaatttaaatgctatttttaaataataacttaagcctttttaggatggttactgttctgatcatttaataagcattgtgtaggtcgggcatggtggctcactcacacctgtaatcccagcacttcgggaggctggggcaggcagatcatttgaggtcaggagtttgagaccagcctgaccaacatggtgaaaccccgtctgtactaaaatacaaaaattagccgggcgtggtggtgggttcctgtaatctcagctacttgggaggctgaggcaggagaattgcttgaacccaagaggcggaggttgcagtgagctaagatcatgccactgcactccagcctgggtgacagagcaagattccctctcaaaaaaatgaaaaaagaattgtgtaaatgtatgatgctttcatagaaataaccactgcttcagattataatttttttctaaaaaatattctttttaaaactcttaccacatgagccaactattctgtctctgtgcattcatttaataactatttattgagtaccttttatctgctgggtaatacatatattgaccgttctttgattaacaaggtatgtatgattcctgctgtcctttagtttagaacactggtctaagttagacaacttatgtatctccttacactcttacaatttttttaaacaatggaaatacacatatgaaagtctgtaatcaccatccag

SEQ ID NO: 14414 - DNA, 1051 bp, Homo sapiens
tataaagagtttcaagaaaatatggacttcaccataagaaacactctaagactagaaaaggaagaaagttctcattacattggacattaaaatgtttccttgaacaaagagaagcttctttaaaagctgctattgataactctcttttatttcactaaccttttcatcatcactttgaacaaactagttagcttcttgacctaataaaatttatgatatgaatataaaggaatattatagccacttaggctaaaaaaaggttttttttgttaaagcatactagtcaaaattggtgataatttctcattttcttgatatagatacttcataaacctcaatataaatactctcaaaatggttgtatggattttatttaggtatggtagcatggttaataaaagtaaaaactgttttactcacattttttgtaaattaggattacatatagaatgccacaatttctctaggtttattcaattttcaaattattcctcattttattttaaagcattaaatagaaaagctaattggttaaattttgttatataaatcagagtcatatattctgggatttgtgttactatgcatacttttctaggatgtcaccaaattagttgtttaaaatgtttttagattactgatttatattaagatgacccacactgcaattagattatgcctagtgggaagtattatataaaaagcagaattaagctgggcacatgtgcttgtaatctcagttataagggaggctgaggtgggagaatcgagatactcagccagcctggcaatgtagcaaagactccatctcaaaaaaaaaaacagaattgcacaaattttctggaatctatggacattccatgagcttaaacacttttgaggtggataacatttagttgaaaatacctaagaaagtgtgtcttctttaaagccttggctttaatcatgggaaattgttgttgttgttgttgttgtttgtatcctatgtttggtattctgtatgtctgatccataatcattttagatatttgaatgatctctgtggattggt

SEQ ID NO: 14415 - DNA, 1072 bp, Homo sapiens
ggcaataagggttcggcacaacagtatgtacacacacataagtatgcaaatgtatcactgaagtacaatctgttcagtaatagcagttttaacagcattatacctacctcagcaagcaagcatttaatagaagtttttcttgtgagtgaatgaatatgctgtaagttgatattcaggtgattttagtattacatagttctctcgtaggactttggagtataggttattctgtattacttaaagcctgatgcaaatgtttttaacaatcaaccaagtggattttaaggctgtcaattttataaaaattaaatcaagaaattacaactagtatactctcttgaatatttggccatctcagtttcacgaagaagtatattaagggattttcattttctgtaacactgttacagatgagtgataaataacacaaaatactgtaacagacccgtaactgtgatttttgatgttgtatatttgcttagctggaattatcagttatctactatatgggaaagtctgttttcccaagggacatagaattttaagcaacttttcggtgaatctgacaggataaattgtttgtaaaatatactcttacataactatagacagatctgtatgaaggttttgtatatgaaccaattgaatatgccatggataattttgtttttagaaagactgatccaggccgggcgtggtggctcacgcctgtaatcccagcactttgggaggccaaggcgggtggatcacctgaggtcgggagttctagaccagcctgaccaacacggagaaacctcatctctactagaaatacaaaattagccgggcatggcagcgcatgcctgtaatcccagctactcgggaggctgaagcagaactgcttgaacctgggaggcagaggttgtggtgagccgagatcacgccattgcactccagcctgggcaacaagagcgaaactctgtctcagaaaaaaaaaaaaaaaaaaaaaagaaagactgatctttctcactaggccactcacacttaaaaaaaaaaacagacagacagactgatccttctcactagaccactc

SEQ ID NO: 14416 - DNA, 1094 bp, Homo sapiens
tcctaagttgaaccattgtaagtcagggagtgtctatatttttttaaaaaaaaggaatatctaattaatcattaatatgaaaaatttaagtgactatgaagtaatgactgttaatcaccatagtgggctatctgtgttgtcttaactgttaagtttgtgtgattatattgcttctgatatgtttaataaaaataaaacaaatgcagtactttatgggcttgcctagtagaacatttggagaaggggccaggcacagtggctcatgccagtaatcctagcacttctggaggcccgggtgggcggatcacttgaggtcaggagttcgagaccagcctggccaacatggtgaaaccccgtctctactaaaagtacaaaaattagctgggcatggtggcgtacccacctgtaatcctagctacttgggaggctgaggaaggacaattgcttgaacccaggaggcagaggttgtagtgaaccgagatcgtgacactacactctggcctgggcagcagagcaagattctgttgaaaaaaaaaaaaaaaaaaaaaaaaagaacgtttggagaaggactgtgttcatggatagatactaatacttctgtatactaaaagagtccaattttatggtgttctaagctatttgcattttgttctatttatgatgttataaccaatttttatgatatcatatattgaattgaaatgtactcttactgggaatatagttttagattttcgataagtaacttgacagaatctggtttaatcagctcaaattcttcagttgtataatgagcatttgttaatagactgttatagtttgtcaattccaaatgtccttttttacatttctgaaattaggatctatcttatcactgatgatatgtcataactggcagcatttttatttctcagtagtatataaaatatattttaaaaattatgttttaaaattgttaccaccttgggtttcatgaaatacggtatttgatgagttttcctttcatttttatgtcagactgaaataagcaggtttgctttgataatgtgttaatttttatggactgaagtaaagtttaacttcatgctatcctt

SEQ ID NO: 14417 - DNA, 1072 bp, Homo sapiens
gagggacatggactgtgccagccctgactgttgattttgatcaggaatttaagcctttccagaaactcccagaagacctttatttatttctcactaggtagaatcagttacaagggtggctgcaaaagtcaatatttagatgagtcaccccaaagaaaatctagcaagattcttttagcaaggaaaaggagaaaagtagatattggataggtaagtaacagtgtcttccacaagtcacaacatctttgttattgactgttgaatcaaattgctatttaaattgttagtgacgtttgcaaattttgtgtcctgtgtagctttatgatgcccagctttctcttttaccctgcgtaaactcaagtatgctattcatgaaagaggtaccacttgcaatctcttcttctttcattatttaaataacacctttattgaaattataatttacataccatacaattcacacatttaaggagcacaagtgtatggttcattggtttttaatatagtcacagagttttgcaaccatcaccacagtcaattttagaacattgtcattacctcaaaaagaaacctggtaccatttatcacatcctcaaccctcccccatcctcttccatccctaagctaccttctgtttctgtatatttgcctactctgaccattacatatgaatgaaatcctataatatgtggtcttttgtatatggctgatttctcttagcataatgtttccaaggttcatccatattgtagcatgaattggtaccttattccttttcgtggctgaatatattccattgtatggatgtacgaaattttattcatccttttaccacttgatggacatttggattgtttctaccttttggctattaataatgttgccataaatattcatgtgcaggtttctctgtggacatgttttcaattctcttgtggccgtaaacacataggaataaaattgcatggtcaaatgataactctatgtttacctttttagtaatagactgttttgcgaagtgtggttgcaccattttatattcccaccagtagtgtgtgagggttctgatttc

SEQ ID NO: 14418 - DNA, 1421 bp, Homo sapiens
atggggaaccacatgggattctaatatacatttgaagactgtcactctagctgttatactgaaaatggactccttgggggcacaggaagagcaagatcggttaggaggctgttgcagttatcttagctgagatgatagcagcttatagcaggacagaaatggtaagggctgtgttttttatactgactgtagagtataggatttgctgataagttagatgtgggagttagatgtagagagagagagaactcaaagatgactccaaggttttagcctttgcaaatggcaagacgttgttgtttagtgggatggaaaaggcagtttccccagggaagatcagatgtttagttttgggtatgttaaatgtgagatgccggccaggcatggtggctcatacctgtaatctcagcacttggggaggccaaggcaggaggatcacgtgggcccaggagttcaagaccagcctggcaacataaggaagcaccatctttacaaaaaataaaaattagtgacttgtggtggcacacctactcaggaggcttaggtgggaggatcagttgatccccaacaggttgtggctactacagtgaactgtgatcacatcactgtcctccagcctgggtaacagagtaaagaccctgtctcaaaaaaaaaaaaatgaggtgcccattaagatatcaaaatgtaaatgttgagtaggtagttacatgagtctggagttcaggaaaaaagtctggtcctcagcctcccaaagtgctgagattacaagcatgagccactgcacccggacagaaaatatttttaaatgacggaaattacaacatgtttgtatactaatgggaatgatccaaacagcgaagttaatgatgcaggagataagagcgtcctgcaggtggcattagtgagcactgtggaccaggatttctcaaccttggcattattgacgttttggacctgatcattctttgttggggggcagggggagctgtcctgtgcattgtaggatgtttagcatcattcctggccttgactctctaggtgccagtggaactccctcagttgtgacaatcaaaacgtcttacacacgccaattataccccgggtggcagaaaggggcaaaattgcccaattgagaaccatggttacaggctgacaacatgagtttcaaagctagttttaggaaagagggcaagtaaagagtctgggagtagcaaggaagacacctaattccagtctcagatccagtggtatgagctgtgagaggttaaagaaaaaaaaaaatcaggttcccatttgagaaggctccaggggttagccagttggagttcaattagagcaagaaagaacagggaaagtttagagaggatgttcagaataggagattttgctgatgactgagtatgggttccagaagtgatgac

SEQ ID NO: 14419 - DNA, 1016 bp, Homo sapiens
aggcaggagaatcgcttgaacctgggtggcggaggttgcagtgagccgagatagcaccattgcactccagcccaggcgacagagactctgtctcaaaaaaaagaaggagggaggaaatgtgttttagaaatacagataacgcatgtttccattaatttgattttatttaaacctccaaaatttggaatcagaaagtaaagtgatagaaataatgatatttgggagccagattattttaaaataagcatttcacctgtattaataaatactgtaggtgttcaagtctagagattaaattagttgatagtttaattcgtcatcttgttactgtttcactgttctgagtttccacaggggaaacaccaggcatgagataaagtctatgtcattttagaaaatttattggttaatatttaattttttgatacttgcagttctttgccagaactccttgagaaaaaaagacttattgatctccatacaaatgttgccactgctgttttagaacatataaaggtaaatttaactttttcccccccacaatatgacttgcatttacatagggttttatactttgtaagatgctttagtattcattatcttattgagtccccactgtaacatgaagtataattatggaagacagcagtattatagttatttttttgcaaataaagtaacctaggaatccagaaagataagtgatttccaaggtcacatgtttagtaaatagaagtgggaatctatgatatttctattatattgcactgcctcaatatcactgctgtacatactactgtattaatagtagacttgtatctcagcatcagtaatagatttggaaatctcttttaccagagttctatctaaaatatccattaataacatcacttttatttatgtgactttgttctgaactttttaaatttagagaatctgttaacattgaagcttcttactgtgtatcattgaactgtgattttgaaacaagtatgttgggagttctatatattgtt

SEQ ID NO: 14420 - DNA, 1025 bp, Homo sapiens
ttctttttctcattaccgtgttcatgattgccccattgtcagcttacttaatcagtccttcagtattctgctattatttgttctccacacttggagctgaatttctgtggcagattgaccatatgctaaaacttggctaatattgacccctcctttccattttatatgatgcatttgaaactgtttaaaaagctgaatataattgctggctgtcagagaagttgataacacctgggatttattgagaaggtacttaaaggtattatttaaataattttaaaagccacaaaagcattagaaaggcactaacatagataatgggcagcatgcagtttaaacctgcataattactattacgccaacaacctaatttttttctttgtttcacatcttggtacttgatatttttcaggttcatacaggaatagaaacagaactgcagtctgtaggtgattctgctgatgttttcacttctatatgtagtgtctctgtgaaatggcaaaaggctgttcagatctgtttacctgaggtcattgtctcttgtggaggtgatacagatacagatatagatgtatagatatatcaccaggtgaaatacaacagagagctatattgagaatttccttcaggtcggagactagaacttatagtttgagaaaattttggttaatttacttattcaatcatgtttattgagtggctctatgtatattgtactaggccctgaagatactgtagtaaacaagacagacaagttctctgttctcttgaagcttatattgtagtgacagtaaacagagtaagcaaattagaaaacaagttaacttcaggcattttagtgacatgagaacaacaaaaacagcagggtgatgtgaggcaatgggatatgagaatggctgagaggcctactctggagtaagtctgcaagtgaaatcacctttgatgaggtgatgtttgagttgagacaggaatcacagaaaggagccaattagtgaagatctcagggccaaccatgccaggcagag

SEQ ID NO: 14421 - DNA, 1047 bp, Homo sapiens
acctcaggtcttcatatattgtggcagctgctccatggatggcccctacccatgtgaaaaggtggtctgattcagggaaggcagaaatgcccttgctgccacacattatgagtcatgagctcctgttgttttgcccatgggacccccagcggcaccccagcttggctctgctcctttgtgggaggctgcgatgctagtggtggctgggtcgcaattttgggaggccatccaggcggtgctggcagagacaggaactcgggagagctcatgactgcaactggggggtatactttcctatagatattacgtcgtaggtagatttctgtctcacaaaccctatctaattcataatctggaatattcctaacatagcattgcaacatagaaaggtttatcattccctgtacctcctgagaagtagggagaaaggaatattgagttcttactggtagaaaggaggtataactctttattcccttcttgtctttcttttcactgctgaatggttattggggatagaattggggctgaagaagagggaaagccaagaagtgtcactctagacttggtcatcaacccagtcattagactgaggtaagaaatgggaattatcgctagcagcaaatggagttccagaacagtagtgtctatagctagaatggggagagaaatagtaaaaagaaggaaaaatccctgcaattacttataggaaggaaaagggaatttcttttgtgtcctttcttggtcgtctggcaaatgtcccaggttatggattttcaaaaagcaaacgatgtgtacttacctgtacttctcagataagtcttttttagagacaagtctatgttacccaggctgctgttgaactcctgggctcaagtgatcctcatgcctcaacttcctgaatagctgggattacaggtgcatgccacagtgtccaactttagcgtcagataggttttaagattattcccttttggtgagagaagggacaaactagttttagaaagtgctccctttgttctttccaaaccctgtgggctatagcca

SEQ ID NO: 14422 - DNA, 1033 bp, Homo sapiens
cacaatctaatgttaaagcatttttgtcacctcaaaaagaaaccccctacctagtaccaatcacattaagttgtttttggaccctatttccattgttcattagaagctgatgttaataagtaagttactacatcaaaaagagcaaaatgaaccaaatgcctgtacttacataagtcagtgagccatgtttttttactgatttatatagttccagaaattagaatctgctatggcatttagcatactttatttatttatttatttatttatttatttatttatagacagggtctcactatgtttcccaggctagtctcaaactcccaaggctcaagcgatcctctcacctcagcctcccaagtacctgggactacaggaatgtgccactgcaccttagcatactgagttttacatatgcagtcacaaaatactagattctttacgttttccacttctagaagttcgttcatctatttttatgacttttaaaaatgattacttggtctgtatacaccccgttcttagtttcgaaattcagcaaatgcaagtgcttgttataagccaggtggtggtagactcctagggttaaacaattaattaaacatgctctaaggagtttacagttttagaaagacacataaacaaaggacagtaatatactgtgatctttgttattatgatgaggtgtataaagtgctgttgatacacagataagggagtaatgagttattttggccaaggaggagactgggagagggtcagaaaagggagagagtagggattgaaggaagagttgtagaaaagctacagagaaggtagacgttgaatgagtagaattcactgagtagatggtaaggaggaatatattctgcaaaagctgagagaataacttgagcctaagactagagaattaaaagcaaacacagtatttaatgacaagttaaagtttaatgaaataactatttgatgtgactagcggaaactgaatttagtgaatagtgataaaacagaaaaggttagctggatcagaggg

SEQ ID NO: 14423 - DNA, 1022 bp, Homo sapiens
tgcagaattactgctgaatttatccatcaaatatggtaaacaaaataatctgttggtttttttctatattaaatatatattcaaaagtaagacactttaaattcttttaagaaatgaaagccaggcacagttgctcacacctgtaatcccgcactttgggaggctgagacgggcagattgcttgagctcaggagtttaagaccagcctgcacaacatagcaaaaccccatctctataaaaaaaaaatacggaaaaattagccaggtgtggtgacacatacctgtggtctcagctactcgggagactgggttaggaatgagcctgggaagttgagattgcaccactgtacttcagcctggtacttctgaactgtacttttgacctgtctgaaagaacatatcttaaaattgatcatagaaaatagaaacttataaggtgagtagatcattatgtattttaatgacttaatatattctcatctaatgtttattttgaaacaggcaagaaaattggatgtatattttgaatatgaagaaaaaataatgagcaaaactactctggataaatctcttctagatataatatcagaccctgatggtatgtaccaaaaatttgaggttaatgtaagtttcatatctgacgaaagcagcattttcaattgagtaaactttgaatagaattgttgtttttctgacagtcaatgctaatatcaagataattaaatgagctattttctggtaaaattttataacttagcagttcctacagtggaaaaataatttgcatttcatttcattgaacttttatttgatagtatttaggcacattttatattcacttgtttaaggtgatatatgtaaagcttaatatctgctggttccaggaagatttgaaggtataacattcaaagcaagtgtctctaagtgattcgcttcctaattactttggtctaccctcaatttcctgaaaagatgtatctaaaactaaattctgttttacatgtttagggagtttacttttaa

SEQ ID NO: 14424 - DNA, 1025 bp, Homo sapiens
atcattatgaaagaatactgactggcataaaatgtctatggtgtgccactaaaatgtgttataaaacagtgtatacaatatgatgctaattttggtttttaaatcatatatgttaaataggcatatgtcctaagattagaagactatacaccaacatcttaacaggggttacctcaaagtggtaggattcttctgggagcattttatattttctggattctctacagtgaaaatactctcagaataaaaatattttttaaggcacatctaaatgccatctttctgcccatccttcatcaatcgtattgtttagttacagagattctggacatttagaaagagttgaaaataaacaactgtatgcaattaagtgtaaaatctgtggtatataatataactaaagggaaaaatcattgagtggtagagttagaagtgttaacaaagaaagtggttttgaacttagtcttaaaaggaaatgtacagtttctattgaagaaggtagtgaatttatactccctaaaggacagcatgagcaaaggcatgtacctggaaacaagggagcatagaatgtaggaaacaataaaaagactaaattattacatggttgttcttttaagccatcaagtctctacatcagttctttttatttaaatgatcagatagaaatgaagaaaaataggaagtttggaaaactaatgcatttgtgcttctttaagaatttcaggctgggcgcagtggctcacacctgtaatcccagcactttgggaggccaagttgggaggatcacttgagcctgggaggtcaaggctgcagtgagccatgatggcaccactgcattccagcctgggtgacagagtgagatcttgtctcaaaaaataataataataattcagtgttttagtactaattgtagtgtacttgtattcgttgaaaaattctcttttcagaaaatgtctgcatcatagaagttagagttagtcagtagatattttaataccgtgacacccagagttagttctaataat

SEQ ID NO: 14425 - DNA, 1027 bp, Homo sapiens
ctgccttcaagataagcgtcctcttacaggaggtccacatagggctttttcattctccagggctctgataatcaagacagtagcaattcttgtcccaatcccactgccagcttcgacatcagagtatcatctgaagcccagggctgcaagggaaaagttacaaatagtcaccatagatcagttgtcaatataggcaacaagtggctaattctaagagaactcaaaggaaaaaaaacacttccctattttggttatagaactatattatatttcttagttgtcttttttttaagtttttgtgcatattttattttgttttgtaatacaccatcagaaataaagttaccattgtttttacctaagcttttccggtgactaaaatcataaaacacgactaaagtcataaaatgagttaggatttttggaaatagatttctcactatatttttttcagataaagttcctagttcatgtatttgaaatttgaagaactttaatttaggatattcctgtgtataggactctgtctctcaaatctatatctataatggctttctaataaaaatttagttgctaactatacaataatgttttccattttatttctaaacaacaatttctaagaacaaaaaatatgcttgagaattcttacaacaatggagtttttcatttgataaaattttatttataccccttttactgaagcacacagactttttatgtttctaaagacacataagtaacactatttgttgagcaaagaatattgtatggttttgttctgatgttttccatgtgctaatatgttagctgctaaaatccggtttttttaaccagtaaaacttgattaacctggtatgtaaattattctaaatatataattgattttttttaatgattaagtcaattcaggcctttatctaggcaaagaatgaaggctagctagagcattagctggtgacagatctcaaaagttgtttcctgaagtactctttcctacgttttaaagacattatgtattttttaa

SEQ ID NO: 14426 - DNA, 1050 bp, Homo sapiens
cagatcacgatgcctttcctcttctttgtgttttctgtttatatccttaatagcacctaccacattgattagtaattgatagtttaatgttctgtctcttcaaacataatgcaagctctttcaggtaagaaaatgaatcattgttgttaaagccttaacacttgacccagtatatatttaataaaaatttttgaacaaacgaaaaacattggccaaatgaataaatgtttcctaataatgttggtaaatgttggtaagttctttcactatcaatcgtatcataaaatttttcttaataccaacttaaatgccattttgtgtatagaaaaatccctaaaagatcctagaggttatccactctgggcagaggtgcatttaaaaactaaagtttttccttctttcctttctgctgtaggccccagtggttactgtcaaaatgggcaagttcctgaaacctcggaaagtggtgtttgtcctggctggatgctactccagacacaaagctgtcatcgtgaagaacattgatgatggcacctcagatcgcccctacagccatgccctggtggctggaattgaccactatccctgcaaagtaagagctgccatgggcaagaagaagatcaccaagaggtcaaagatcaagtcttttgtgaaagtttataactaatcacctaatgcccacaaggtactctgtggatatcctcttggacaaaactgtcattaataaggatgtctgcagacaccctgctcttaaacccaaggctggacaagaagccaagatcaagtttgaaaagaggtacaagacgggcaagaacaagtggttcttccagaagctgcagttttagaggctttgttttggtcattaaaaattaaaaagaaaaaaaaaactacttttcttgggttttgttcattgtatttctttttaatcttcagagaagaaaatatataaccatccttgcagatgtatttcaatttcacaaacctttagaattagaaaaattcctcctcctagctacagagtctccatccaaatatgtacatgggcttgac

SEQ ID NO: 14427 - DNA, 1046 bp, Homo sapiens
ccttccttctcttccatggaatgtaaggtacctgtcaccacaaagggcacagaggagggtgcttgtcacaggcaaggtactcagttggacagtatggccagaaagtattcctctgccttggaaaaaaaaggtttttaaaattaatatatgttttaaaaaggtttggataactacaacttcccatgtttgaaaaatagcatttaataacattaatctcaatttagtatcgacagtaaattcacaaattaacatgttgtattatgttatcttgttacttgttgccaagagcttgtctcttcctagcatcatttatagtaaaaactgattctttgttaggttgacagtgtaaaacttgagaatattaacagtgctttctaaaaatgcatccgctgcttgataaatctcactggacagatctggagcagaaataatcaggttcaattaagataaaaatgctgtattctgaagggattcacttttctgttttctgtccttcgggagttgtagaatgttgtttgggcaaattaaccccacggctttaattttctcatctataaaatgaacaatcaagttagataactttctgtgaatctaagcatctttttgttggcttccttaatgtgtgagtttaaggatctgcatttgtaggctaactaggataaatggtcctatgaaggaaaggatggctttgatttgtgcacatgtctatgaaaatgttccacaaaggctcaatccagatttactatctttacctcaagcaactgtgtacatagcgtcatcaaagttgagatttaaaaatttttttttttcttctggagacaagatcttattctgtaacccaggatggagtgcagtgatgcaatcatagctcattgcaagcttgaactcccgggctcaagcaatcctcccacctcagcctctccagtggcggagagtacaggcatgcaccaccacgtgtggccatttaaaaaaaattttttttttttagaagagatgaggtcttgctatgttgtccagactggtcttgacctcctggactcaagcaa

SEQ ID NO: 14428 - DNA, 1083 bp, Homo sapiens
atttttttattttattttatttatttatgtatttttttgagacagggttttgctctgttgcccaggctggagtgcagtggcgcaatctcggctcactgcaagctccgcctccggggttcacaccattcccctgcctcagcctttcaagtagttggaactacaggcccccgccaccacgcccagctaattttttgtatttttagtagagacagggtttcaccatgttatccaggatggtctcgatctcctgaccttgtgatccacctgcctcggcctcccaaagtgctggaattacaggcatgagccaccacacccggcctggtttttatttattaaaacctcaattagttcataggaataaagactgatattatcagatgatatttactactactttatttactgtttatctataaaaacatttaatataattatttgagaaatttgatcttgcctttctggttttgtttgtttttgtcttcaaggttccagttacagccatcccttgtcataacttttgaactgtatttggaaaaatactggccaggaaagaaaaatgataaaatttttcctcatggtgaataaacaagggcagactcgactttctaagtactatgaacatgtggatattaataagcgtacacttctggaaacagaagtcataaagagctgtctctctcgatccaatgaacaagtaagtctctggttctctcttttatctctgcattcaactcagccttggcagatttgttattagtgagtctcaggggccatcattttctttgagctatattccttcaacagctactaaagaaaataagtgatgtgaaatgaaaaactgaaagaagcatagctctctttacatccctttaagaaaacaaaaacaaggaaaacctggaagaatcttggcttcttatttaagtcagcatatttgtctcaatgcaccttggaaacgacagtaaaatttccttctgctaatagacacacctcttcttttttcattcctatgaattcagcccttgaaactctcatgagtgcctgtatcaggtagctttctataagccaaaaaatgaagatcagatg

SEQ ID NO: 14429 - DNA, 1050 bp, Homo sapiens
gaacaaaactattataggatcctgaaggagagagcaattactatgaagtacagctgggaggctcatgaagggtttaaagagatgacatttaaaatgggctttgaaggacacataaggatggatgagtagaatatatgctattagatattgaaaaaactctggaccttttagcaggctcaaagcagagaaagaaattcattttgcctgagtacacggtatgagaataacaacattagaatttcagaattggaagggatattatgtatcgagtccaactaatagttttacaacagattcaaagatggctccagactttaagctaagtgactaagagaatgaaattagaaggtggagtttggaggggaagataatgagtttaattttaaacatttcacatttgaggtgacagtaaggcatccaaggggaaatgagggactacagcttagaagaggggtcagagctagagaagaggagtcagagctagagatgtagaatccgaatttttccacctggtgctaacaactgacagcactctgaaacaaacaccaatgttatcatcttaaccaaatggaaatgtgtcccactgttcaactaccattatagtttgattatactttgtttaattttaaatggagattttgagtcacaataaagaagctgtattataggtagcagaaagaacatagctttggaattggtgacttgcgttcaaattctaattacaccacttagtaggcatgacctagggaaaatcacttcatatctcagaagctcaatttcctcacttgtaaagtgagaatactatctccttccctgaggtgttctaaggatttgagatataatatataactagcatgttatatattacttacagaaggtgctcatcagatatttgatgaaggaatggagaatttgatatacttcctacttattttatactcaccactataaagcattatactgcattttctaggctttgtataacagaaaaattttcccaccaataaatgaaacatttttagaagtataacagttggtatttaatggtat

SEQ ID NO: 14430 - DNA, 1061 bp, Homo sapiens
tgataatattttatagaagtaggaaactaatacatataggaagtaaatttgcttatttctttaatttccaaaagtgtctttaatttatattcgttatttgatagcttaactagattctagttaactataaaattccaggttcaaaataatttcctctctgaactttgaaaacaacataccgtttttttctagcatgctaatgaaatgtctgatgatagtctgattcatgttcttttgtaataaccagtgttttccctctcaaagagtttaggttttctttatgtcttttacatttaaaagtgccacaaacatgcgtctagttattggcttaacctgcgtgggatttggccctgcagtatcaagctttgagtatttttcagcataggaaaaatttcttctgctcattgattatgttttgtgatgtgtttgttctgtctccagaaacctgttaggtagatactgacctttatgcttgttaatttttctgtcatattttgatctctttgtcttttgctctgtgttttgaaagatgtctttgactatttttcacattgctgtattggactttagttgttattaggttcttctgattttgtttttcatttggaaattatttttttttccaatttttccagaactatttcttattttccacttgctgttccaaaaaaaaggttgtaccattctcttgaatctctccgaggatgctaattgaaattaataaaaagtgtttttcttagtgacctctgcttacttaggatggttcttgtaatgtggctgttgaccagcagaatcagctttacctgggaacttgttagacatgtaaaatcttgagccccaccctaggcttactgaatcagaaaccctggggatagagatctgcaatctgtgttttaaccaaccctctaggcgattttgatgcatgccaaagttaagaaccatggatctagaattttccacttctaacctgctaatgtcaccctcttttgttttctagtgtggttatggttttatttagttttagactattttgtttccttgtcatttcaatggaatttgga

SEQ ID NO: 14431 - DNA, 1032 bp, Homo sapiens
gttaactgtagtcaccctactgatctattgaataccaggtcttatttctttttgtttttttgtttttctttttgtttttgagacagagtcccactctgtcaccaggctggagtgcagtgacacgatctcagctcactgcaacctctgcctcctgggttcaagtgattcttctgcctcagcctcccctgtagctgggactacaggtgtgcaccaccacgcccagctaatttttgtatttttagtggagacagggtttcaccatgttggccaggatggtcttgatctcttgaccttgtgatcctcctgcctcaccctccctaagtgttggaattacaggcatgagccaccgcgcctggccaatcttatttcttttatataactgtgtatttatttgtactgattaatgaacctctcttcatcactcccttacccccttttttcatcccttcttggcctctggtaaccaccagtctactactctttatcttcaacaaatccatattttttaacttccacatatgagtctgaacatgtgatatttgtctttctaggcctggcttatttcacttaatgtaatgacctccagcttcactcatgttattgaacatgacaggattccattcttttttatggctgattaatattccattgtgtatatatgcataatattttgtttatccatatgcctattgaggagtacttaggtttattccatattttaggtcttgtgaatgatgccctgataaacgtggaagtgcagtatctgtttgatatattgattttctttattttggatatatacccagcagtcaaattgctggatcaaatggtagttctatttttagttttttaaggaagctccacactagtttccatagtggctgtgctaatttacattcctaccaacactgtaggagggtttccctttatttacatcctcacctgcatctgttacctcatgtccttttgacaaaagccattttaactggccgttttatactgtgttattgtggttttgatttgcatttctct

SEQ ID NO: 14432 - DNA, 1720 bp, Homo sapiens
ctgtgggggattggttccaggaactctataggtaccaaaatccatgaaggctcaagtctcttacataaagtggtgaatgtggtattcgcatacaatctacactcagcctccctttaaataattgctgtattacttataataactaatacggtgtaaatagttattatactgaattgtttagagaataatgacaagataagtctgtacatattcagtacagatgtaaccatccaattttttttctgaatatttttgatctgcagttggttgaattcatgaatgtggaacccgtggatatggtgggccaactgtacttttactgcattgctggattgaatttgctagtgcagatattttgttagacttttgcaatagtgtttgtgaataatattggtttgtaatttatttttcttgtaatatttttttcaagtgttatatgagagttagcctggcctcaaaaagtaagttggaaagtactttcctcttctgttttgtgaaatatcttgtgtaaaaaatttattagctttggtttaaatgttggtatttgaaggaatttatcggtgaaacccaggcttggcgtgctttgttttgttttgggttggtagaacatttttgatgactaattctattcagattttaaattttatcttgttttaattatgttaaattgtgttttataggaatttgtttcttttactttaattgtataatgtacacatgaaatttgttcataatattttcttatgtttttaaatggatatgggatgtagcagtgttccctccttatttctaatgttagtaatttgtttatttttctcttttattcttgattgttcttgccagatgtttataaactttactggttttttttttcaaaaaaaccgacttttcacccttagacgtttttctgtcatatgtttgtttcttatttcattgtttctgcttttatcattattatttccttcctttcatttgtatcaggctaatatacccttctttttctagctcttaaggtaggcagttaaataattgatttaaatttttttttaaatacaagcagttaaggctataaatttatctcttaggcgttgcttaaactttcacaaattctgatacgttggtgttttcattgtcattcagttaaaagtagtttctaatttccttcttttgcctacaaatatttttggtatgttgtttaatatctgaacattggaagatcttcttaataacttaatggcattgatttctagtgtaattttgttttggctagagaatacactctgtaatatttcagtgttaaaatgttttgagattttctttttgtggaccagcaccagcatgcgatccatctttgtgaatatttcatacgcttttggaacgactgcatttttaaattattttggttaatgttctttaaatatgatttaggtcaggttggttgacagagttcacatttttttgtaactttattgatttgtctagttactgtataaattaatgagagaggagtgttaacatctccaggtatgattgtatatttgcccatttctctctctatttcaatttttacttaatatattttggagttctgttatactctcatatgttttgaattgttatgtattcgtggtgaatttgcccttttgttgttatgaaatactcctctatatctctggtaaattcttcatattgaagtctactttatctgatactaatatag

SEQ ID NO: 14433 - DNA, 1814 bp, Homo sapiens
gagggagaggtgtgggtgggaaccgaggttgcatgtggcccttgcaggccagcgcgagttccgggtgggcgcaggctcggcgggccctgcacttcgagcggccggccagtgccactggccccgggcagtgaggggcttagcacctgggccagcagctgtggagggtgcgctgggtcctccagcactgccggcctgcctgcactgcacttgaattcttgccgggcctcagccgcccctccacagggcagggctcaggacctgcagcctgccatgccccagccccctcccccccaccaccgtgggttccctcacggcctgagcctccccgacgggtgctgccccctgctccagggctcccggtcccatcgaccgcccaagggctgaggagtgcaggtgcgcggcgcgggactggcgggcagctccatctatggccccagcacaggatccactagacaaagccagctgggctcctgagccggctggggacttggagaacttttatgtctagctggaggattgtatgtgcaccagtcagcactctgtgtctagctcggggtttgtggatgcaccagtcagcactctgtatctagctaatctggtggggacttggagaacttttatgtctagctagaggattgtaaatgcaccagtcagcactctgtgtctagctgaaggtttgtaaatgcaccagtcagtgctctgtatctagctcatctagtggggacttggagaacttttatgtctagctagagaattgtaaatgcaccagtcagcactctgtgtctagctcagggatcgtaaacgcaccagtcagcaccctgtcaaaatggaccaatcagctgtctgtaaaatggaccaatcagcaggatgtgggtggggtcagataagggaataaaagcaggctgcccaagccagcagcggcaacccacttgggtccccttccgcatgtggaagctttgttctttcgctcttcgcaataaatcttgctgctgttcactctttgggtccgcgccgcctttatgagctgtaacactcactgcgaaggtctgcagcttcactcctgaagccagcgagaccacaaacccactggaaggaatgaacaactccaggtgtgccacctttaagagctgtaacactcactgtgaaggtctgtagcttcactcctgaagtcagcgagaccacgaacccaccagtaagaagaaactttggacacaccatctttaagaactttaacactcactgcgagggtccgcggcttcattcttgaagtcagtgagaccgagaacccaccaattccagacacaatagtttcacctaatgtcaagtattggattactttcaaatcatttttattccctgtgaacaaatagatttagagagaaccctttgcaatatgtgaatagtttaggtcaaataatggtgttaaagagcatagtccccatgagactgcccttacttttgacattgactgcaagtgtaggggttcccaagatcacccttaagttcaataatttgttagaaggactcaactcactgaaagatgttatactcacacttatagtttattacaggaaaagagtacatattaaaatcagccaagggaagaagtgcataaggtggagtctggggagttatcaaatgcagagcctctgttgtcttttcccctcagaatcagtctgttagtctcctggcattgatgtatgataatacgggtgtagcattgccaaccagggaagctcatgtgagccttgatgttcagagtttttattggggctccgtgataggggcatgattgattgtccatatggctgatc

SEQ ID NO: 14434 - DNA, 1036 bp, Homo sapiens
ttgaggaaaaatggatgaagatcagtcttctgtaactgctttctgctgacagaggggtggtgttggttctgtgagtattggcctcttgctagctctcagggcaggagggtgactctttgggtggtaaaagcagtatctatccaggtccaagggagacaggggcaggattttgccttcttcctgtcccactgatggacattctaggggtcccctttagaagcctgcctcttgggtattgagagaacagtatctctcactgaggatttttatacttatattctttctgatagtcatagttactgaaagtataattggccaggcatggtggcccacgcctgtaatcccagcacattgggaggccaaggtgggcagatcacctgaggtcgggagtttgagaccagcctgagcaacatggagagaccccgtctctactaaaaatacaaaattagccaggcatggtggtgcatgcctgtaatcccagctactcaggaggctgagacaggagaatcgcttgaacctgggaggcggaggttgctgtgagccaagatcatgccactgcactccagctctaggcaacaagagcaaaactccatcttaaaaaaaaaaaagtgtaatccttctctcattctcttctttgttcactttttttctcacttgttaaagatgttggcacttcctgttccctctagttctacccaccaccttggataacttcagagttcacatagacaataaactttaacatcccagtgtgtctggaattggtgggttcttggtctcgctgacttcaagaatgaagccgcggacccttgtgctgagtgttacagttcttaaagatggtatgtccggagtttgttccttcagatgttcagatgtgtccggagtttcttccttctggtgggtttgtggtctcgctgacttcaggagtgaaactgcagaccttcgcggtgagtgttacagctcttaaaggcagtgtgtctggagctgtttattccttccagtgggttcgtggtctcactggcctcaggagtgaagc

SEQ ID NO: 14435 - DNA, 1041 bp, Homo sapiens
tgacatgagctggcgcttgttccgggcaccctcagtcctgttgttggatcatctggttgggggcctctgacccagagaacctttgttctctggggcagtgcaccttccagtgattgccttggcatagcagacatggacgagggggcggcttgtttctcattggacaatcttttttaaagtgtcctagtaaaccacactgataagccctaccgggtgattggcctgctccattttctgtcctctctgaaccaccaaggtttgtttgtctgagggccatgactaaggctgcggtctttctctgatcttgcttttccttttgggcctgttcctcttggtccctgttatagaatactgaggttgccaggtttaataatgtctccaaattttgtttagggcccagggcttgcttttggaactttctcctgatatctgtggctgattgggtaataaacttatcttttagaatcaattgaccctcaagtgatttggttgacaggggagtatattttcttaaggcctcccatagccgctcgagggaggcagaaggattttcttcctttccctgagttatggtggacatcattgaataattcatgtactttttcctaattctccttagtccttctagaacacaggtcaacagatgtttgcaactgcagtccccatgatctgagtcaaggtcccagtggggatccatactggggacagcttgctgaccgttagggattttgcccctttcttcagctgtcattctgtcatttacttgactaagataccaagtatctccaaactcttgggctgcagctaaagctgcattcttttcattaaaggccagggtttgatctaacaatagcatgacatctctccaaatgagatagaagatttgtcctagaccctgtaggacatttatgtacctatcaggatcatctgaaaaattccccaggtctgccttgatctgctttaaatcagagagggagaaggggacatgtacccaggttgggccaaattcccctccccctacagcttgaaggggacataacc

SEQ ID NO: 14436 - DNA, 1031 bp, Homo sapiens
aaattgggggtttattatagcagggaagaaatgtaattatgtgtgggaaaacaggaactagggaggggtaaggaagaggaactggttaacgagaagcaggtgaccacttaggaacataggaattagggaggggtaagggagcaacctgatggatgaagggtctgccatctcattgtctggatgtggtgatctggtgagtttcagttctttgatactttttgagaaggctgaggatcatttcctgagaaaggaacttaaataagacaaacgttagttttaagctttaagaccagaagggtcaatttctatatttattttaaaaaactactgggttggtttcactagcctttttagtttcttccctttctcaacttgagtgcccttgaactccactctcatggcacaccaggaattttatccccttgaagtattcatcttaattaccttaccatagtttttcgtctttgagttcttttattaaggccattatatgtcagattccttgactgtttcactctttctgtacctttcatttttttcctaacatgtttatatatggcacattatgtcactggcttgctgataatttcagctccttcgtatctttccctttcagttgtgccacaaacccattggtacattccttttactctaaacccataaactccagtttagaatggattcagcattcgactttctctattcttacgcttgggctgctgggtgctgctagagatgtccttttaagtggcatgtggatggcactatgaattaatgatttctagccttgctcaacaacccgtaggaaatttttcttctattttttttctctcttgcttagaaacctgttattctaggcagccctctcttttattctccgtaggaactatttaaaatctgctttgttattctgaagacctctgtccttctacctctccctttacttttaatgcatgattccattttctgtttcacaaagaaaattaaatttatatggtgcaaactttctcaattaccagccagcctcctta

SEQ ID NO: 14437 - DNA, 1050 bp, Homo sapiens
actaagcattttgaataattgatattcagaatatcatttgtcatctatgaagatatttgatgaaatgaatttgcatttaaacattcgtgatgattctgagtaggaaaaatacacagaagaacaaagcacttaattatgtttctttaaaaataaacgccacaaaaagcatttaaaaataagataaaatatagtatgtagagaacaactatatctcagaatttagattattttgtaactgtatacaggataatagaatatgtattttaatgtatacattatattgaaagatttgtagaatcttttttttttttttttttttttgagatggagtctcactctgtcacccgggctggaatgcagtggcacaatctcggctcactgcaacctccgcctcctaggttcaggtaattctcctgcctcagcctcccaagttgctgggactacaggcatgcaccaccacgcccagctaatttttgtatttttagtagagacagggtttcaccatgttggtcaggctggtcttgaactcccgaccttgtgttccatccacctcagcctcccaaaatgctgggattacaggtgtaagccaccacgcctagccaagatcttgtagaatctttaaaaaaaatcttcagacacagcttaaatatcactcttttaaccctttgtaaatgaactcagtctcctttctttcaaagttccctttaggtctaggttatttctttttttttatttttatttttattattatactttaagttctagggtacatgtgcacaatgtgcaggtttgttacatatgtatacatgcgccatgttggtgtgctgcacccattaactcgtcatttgcattaggtatgtctcctaatgctatccctccccgctctccccaccccacgacaggccctggtgtgtgatgttccccttcctgtgtccaaatgttctcattgttcaattcccacctatgattgagaacatgtgatgtttggttttttgtccttgtgatagtttgctgagaatgatggtttccaccttcatccatgtccctaca

SEQ ID NO: 14438 - DNA, 1037 bp, Homo sapiens
tctcccaatttggattccctttatttattttatttatcttgcctaattgctctggctaggacttccagtactgtgtggaataagagtggcaagagtgggcatccttgtcttgttccagttcctagaggaaaagatttcaacttttcctcattcagtaagatgttagctgtggttttgtcatttattgcctttatcgtgtttagatacatactttctgtacctaatttattgagaatttttatcacgaatgactggcaaattttgttaaatgctttttctgtatttgttgagatgatcatatagtttatgttctttctgtcaatgtgatgtgtcacaatttgatacaaatggtaaaccatccttgcattcctgggatgaatcctacttgatcatggtgtatcatcttttgaatgcactattagatttggttttctaatattttgttgacaatttttacatctatgctcatcagggatattggcctgtagttttgcttttttgttgtgttcttgtttggttttggtatcagagtagtgctgataccagactcatagaatgagtttggaagcattcctccacttcagttttttgaaatactttgagaggaattggtgttagttcttctttaagagtttgaggccgagcatggtggctaacacctgtaatcctagcactttgggaagccaaggtgggtggattgtttgagctcagaagcttgagaccagcctgggcaatatggtgaaacactgtctctacaaaaaatataaaaattagccagatgtggtggcttgtgcctatagttccagctacttgaggggctgaggccagaggattgcctgagcttaggaggcaaagattgcagtgagctgagattgtgccactgtacttcagcctgggtgatacagagagagaacctgtctccaaaaaaaaaaaaaaaaaaaaagagtttgatagaattcagcagtaaagcgattcagtcctgggcttttctttttttttttctgagtcggagtctcgctgtgttgcccaggctggag

SEQ ID NO: 14439 - DNA, 1049 bp, Homo sapiens
tataaataatatgtatgtacatctatatatagatataactgtatctctgtgcatacagagagagacatacacagagttatgtatataactgttgtatgagctctgcacagaatgagataaccataaaagaagattatcacatttggctgatgtaatttcaattaaaagcacagaaacttggtagtttatctgtcttgtatatttttaaagtgttttatttatgttcagtttttaaaaatattcgtaataggccaggtgcagaggctgaggtgggaggattgcttgaagccgggagttaaagaccagccttggcaatacactaagaccttgtttctacaaaaaataaaaaattagctgagtgtgctggcatgcatctgtagtctcagctacttaggaggctgaggcaagaagatcgcctgagtccgggagttgcagtttgtttgaggcttcagtgagccgtgatcacactactgcattccagcctgagcagcagagtgagaccctgtttcaaaaaaaacaaaaattcattataaatcacagaacctgacaaaatatttttgtgcatctttagacccttaaaagattaggtaggagaactaccaaaatagcttctacagtcaggctttaattttctagagcagcactgtccagtggaaatataaaccatggaaatacgaaccacaaacgtagttttgaagtttttagtagccatattttaaatagaaagaaaagaagaagttaattttaataatatatgtaccacagtatattcaaaatattatcatttcaacatgaaaaccacataaaaattattgaggatcaaccaaaaaggaattgtatttgaaaaacactaggaattcttacaattcagtaaggggaagaagacatataatcaattgaaaaaataggcaagagacccgagcaggcactttatggaagaggatatacaaatgacaaaaaaatgtaaaacatatagtcaactttattaataattatggcaatgcaaattaaaaccatagtagaaaagatagctgggcacagactccaga

SEQ ID NO: 14440 - DNA, 1050 bp, Homo sapiens
ctcctttagttcttctactccattaatgtccctgcaagtactctgcttaaagcctagctttttgtaggcctttgtacttgtttgtagaattaaacccaggtgtcttggagtcatgtggattaaacatttggttatgtgctgcttgtgtttttctccagatgatttctatacctaagtcttgtcatacccactaggtggcagtcttcttgaccgcaggtctgtgtggtgggaaagcacagatttagaatcaacagcacaaagttcaaatcccagttctgacacttactaaattagtgttacttaactaaagttagcaagtgacataatctaagtcttagtccctcatctgcaaaatggtggacagtatctgttttcattaggttgtgctggtgaagtgaaatgatatcataacatagaacctggtacttaataggtgttaaatgacaagcttaccttttcctttctttattttctatctctgtaacatatcttttcataccaggaatgtgtaatattggcaacctgacttaccaaatagagtagctgtggaatccttttaggagagaaactgaaatatctttatacaatgtcccttctccccaggcacctagaacattgggtacaccaataacactttaaaatatatatataatgattggaactatttctaaagaggaaggtcatcttcagtgtatgtagacatgagctgccggatattctgtcagaacaatagctattcattgtgttagtttcaaagctggctccgacaagctagtatttcagtgttattcccacacaaacaaatcttgagcaaaatttccatgacccaatagattggtgtaaacaactcgctgcaagaactttttacatgtaaacccatgtcattcattcaaatgttcagtgctttcagggagttttgtaagtgcagcctaagaattaatgatttttaaaaaagcaaaaacaaaaaacaaatgctcatcaacccctaccctcaggattgtgttttgttgcagagtatatgcggtaaatagctcagttcctcccaccata

SEQ ID NO: 14441 - DNA, 1544 bp, Homo sapiens
cttggctaggcacttcacattttaaaaaatgatttatagatatagctctgttttatagatgaaggaactgtcttaagaggtgtagggctttactgttgtcatcaactagtaaatgataggagtcggattttgaaattagttgtatttacacgtggtttctacttccttgtattgccacttcaatatagtaatatttattacaaaagtgaacctaatatatattttgtttgactgtcagatggctgactgttaaagttaatatttagttgaggttgatggaataaacttctaaaatatgagaataaatctgaaattttatttttaaaaattattttatcagaaatgttagtcaagattttaaattatgagcacagtttatcttcaccattagttagtgtaacatatgttcggtgtaattgaaatagatgtttacttgcaacagaggtcagtggacaagcaggtatttgtgggagaggggaggaagtggtcttttcttacttttcttagattttttttgttctttattttgtctggattgaggatacttttcatatgtgctgatgtacgttgctagtgattttttcctatcttatgaaatttggaggtggtggaaatgatgcagttcttttaatttggcctcaaaagaatgtgaaaaatctctaaaaacttttttaaaagaccaatttattacctacatgaaaacaagtaatcaaaattaaattttatgcaattcttaaaagttatcttgtgttgctagtatatcaaataattctaaaagattgtctcagatatatcattttaaaattatttagcttggtgctactcaaaatgtggtctttgtgccctttgtaactattatgagaggaagtatatccagaaattaagagcgtttaggaacagtttggcagttttaagtttcttgaatctaataaaaaatcaaggcttcgatgtaaaaataaatttcgttatattttgcagttggtcttataggtttgaaataaaatttggtccttagtttaagaagcagtgatctatgtaaatgctatcattatttgtattaagtgttcacttatttctgttttctcttaagtatttaaatattcttaattttgggggggtataacatttggtagattttttaaaaaagacttgaaatttattgcaaaaaatttgtatattctaaaatcttatcaaattcttatgaaattctgttttaaggaataagttttaaggaaccctataatgtaaaaagcaggttgttttgtatttttaagttgtgagggagttgcaagtcaactagtacattttagttatcaccagcatcgcctccagtgacagaaggcaggaaaattaagggagtggaaaggactagctgtttcttcaaactcataggaaggggtaattagaggtaaaatgcacatttggtttaatagaggtttattttaaagtttgtgagacattatgttagattttgtattttgttaggtttgccttaaattttgaggtcatcttgtatttataacagtaaatcataaactgtttat

SEQ ID NO: 14442 - DNA, 1028 bp, Homo sapiens
tcggcctcccaaagttctgggattacaggcgtgagccaccacgcctggcctctttgatttttttaatttcaagaatcacatgtaagaaaatagagatccagttttcttgtttccacagctggttctttgagagcctagtaaactgcatttcactgctcaagttttgttcaatttttggttactggtgaagcatttgaggtgtttggttttttaaaaatgttactgtagtatttatttgaagatgttgctgaggtgaccctttgtgttgctggtattaagtaggaagagcagtttctggaaagggctgttttcttcttcctagtcatgtttacgtatacaaatgagagtttttaatatgttggacacttaaagagatgtaattgctgaatggaatgtttgttttactgtgatgtgcttttgcagataagaaattcacttaagtggctagaaaaaagacggcatttgcatttaagtagaagttcagatatgaatgaatgtagtaatgaatcaaaaattggattttcggtagggcgcggtggctcacgcctataatcccagcactttgggaggccaaggcgggcagattacgaggtcaggagatcgagaccatcctggctaacgtggtgaaaccctgtctctactaagaatacaaaaaaatagccgggcatggtggcagggcttgtagtcccagctactcaggaggctgaggcaggagagtgatgtgaacccggaaggcggagcttgcagtgagcagagatggcgccactgcactccagcctgggcaatagaacaagactccgcctcaaaaaaaaaaaaattggattttcatacttcagaatttgttttccactggcccaattattttattagaggtaccatttctaactaaaggtttatcaaaaactagatataaacaataaaataccatgctactaatttttctcttacatttcagaactttgatggcattttatagcaattgtaattatctagtcttagtttatgaaataggtttctagttacataaa

SEQ ID NO: 14443 - DNA, 1017 bp, Homo sapiens
atttctatttcttgaatatttcttagtagttgagtgattcggtttgaggaaaataaatgaattccaaatataggataaaatgcaggtctagtccaattcttaaaacaacttgaattagtttaggtcaactctcaggcgatttatatatttaagtgctttggtagaaagataacatagactgtagaatagaataaaagattaaactagttcttttgttgtcgttatagtatattgtttgattttattactgattttaaaactattaagcagttttagcagaaattcctaattgcctacgagattgtttgtgtcttttgagaaatttgttcatttcatctaaatttcatcaatttacagctctcaaaatgaactgtagcataaccttcttatatttaaggttcaacttgtaaatatattgcagatactcattacttaaagattgtgatattttgctgtttatagatccttagatgtagtgatataaatgatcagtaattgtgttgttataatcagtcctcttatttaaaagactaacctttcttgaacaaccatgaagaaaatattgacagttttaagaatcagctttattgatgtaatttacatacaataaaatttgctagtttgaatcgtacagtatgaatttttataatctatagtcatgtaactgccaccacaatcaagatttaagttattttcattcaccgctaaaagcatctggtgttttattattttattaagtataatgttagctgttggatttttgtagatgaactttatctggttgagaaagtactctaacattcctagtttgctgagtttttatacaaaataggtgttgattttgtcacgtggttttctgcatctgttgaggttatcttacgattgttttttgctgtggattgtgaattacattgatttttcacattaaactaaccttacatccctgggataaataccacttggtcatgttttatcctttttatgtattgctggattcattttctaaaatgttaagga

SEQ ID NO: 14444 - DNA, 1048 bp, Homo sapiens
aagatattttcttagattagaattctcttttatgtaatagctttattgaaatataattcactttatacaatacacccatttaaagtgtacagtttattcacagagttgtaccagcttcaccacaatcaattttagaacattttcatcatcccaagaagaaatactatactgattaagcaatcactttctattccccactctcacccccccatcaactttctgcctttacaggcttgcctgttcctggatatttcatataaattgaataatatataatgtggtcttttgtgattggcttctttcatttaacatagttttcaagttattcatgttgtatcacctatcagtacttaatttctttttattgctgaataattttacattgatggacacttggtttgtttctactttttaacttgtgaagagtgctgctgtgaacattactttcagagtttgtgtgtggacatatgttttcacctcttgggtatatacttaagagtggaattgttggatctgtgtttagccttttaaggaactaccagactctttcaaagaggtggcaccacttgacattcccatcagcagtgtgagttccaatttctccacattttgccaatgtttatttttctttttgattatagtcatataagtggtaatgtgaaatgtatctcatatgattttgatttgcatttccctgatgactaatgatgccgaacatctttttaagtgctttattggctttttgtgcacatctttgaagaaatatctattcagatcctttgccctctttttagttggattgtttgtcttactgttgagtttaagggctctttgtatattttggatacaaattgttttcaaatacgatttgctaaaatattctccattctgtgggtcattttttacaacttcttgaagatatgctttgaaggataaagttttcaattttgatgaagaacattttgtctgtttctaaaattttgtcactgtgtgcatggtgtcatgtctaagaaggtttttgcctaatccaaggtcacaaagatttatt

SEQ ID NO: 14445 - DNA, 1668 bp, Homo sapiens
gtggagccctaaaacactagggagaagaaaaattttactaagaagcatgattatcaacatttgaatgagaatgatttttttacattgctttttctgaggtgcaattcataaataacataaaactaaccattttgaaatgtacagttcagtggcaggtagtatattcacagtgttggataaccaccacctcatctagttccagaacattttcatttaccccgaagaaaaccctgtacacattaagcagttatttcttatttccccactactccagtccctggcagtaaccaatctgctttatggctctctgaatttactaattctggatatttcatatcagtagaatcacacaatgtatgaccttttcttctgcttcttagcattattgttttgaggctcatctgtgttgtaacatgtatcattatgtgtatatacatacatacatgcacacacattttgctttttcaatcgtttggtggacatttgggttatttccaccttttggctattgtgaacagtctgctgtgaacattcatgtgtacaactattcgttcaagtacctgttttcaattattttgggtacctaggagtagaatactggatcatatggtaattctgtgtttaacttcttgaggaactgtcaaattgtttccacagtggatgcaccattttacttcccaccaacaatgtgtaagggttcaaatttctccatgttgttgccaacacttgtatgtgttctgtatgtgtattaattttagctgtcttatcccttttgataaggtttccttttaatcactaagtaggttactttgtcagtattgtgattttagcaatattaagtcttcgaatccatgaatgtttgatgtcttttttatttgtctttaatttctttcagtaccgttttgtagttttcagtgttcaagtcttgccttggttaaatttattcctaggtattttattggaatgttattgtaaatggaatttaatttaattttcatgtttatggatgtttatggtggtgtgtagaactgatttttgtgtgttgatcttgtatcctgaaattttgccaaattattagctctattttttgtgtgtatttgggggtttttatatatgtttgtcttctgtgaatagggatacctttactttcaaatctgaatgctttctatttctttgtcttgcctaattgctgtggcttgaacttccagtgcaatgttgaatagcagttgtgaaaagagcacacgcttgtcttgttccttatctcaggggaagcttttattatttcatcatggagtatgatatcagctgtgggttttttttgtttgtttgtttttttgagatggagtctcacagttctgaacgctagaagtctgaaagcaaggtgtcagcagggccatgttccctctgagactctaggtaaaccttccttgcctctttcttgcttctggtggtggctgtcaatccctggtgttccatggttggcagctgtattactacaatctctgcctttggcattctccatgtgcgtgcgcaggtgtgttttctcttcttttcataaggacatcagtcatattgggttaaggacctcaccctactccaataatgaccacatcttaccttaactaactacatctgcaatgatctattcccaataaggtcaccttctaa

SEQ ID NO: 14446 - DNA, 1050 bp, Homo sapiens
ttagaagcactaagtaaaatagataccacagtaaaggtacaaaacagctagggaaagcctgttttctttacattagcaaggaagtcactgattacttttagagcctttgaattaaggggacttggtactagggatttataagaggaaatagatgataagaaacttctaaaatacaattgcaatagaagaaaagattgaaaacgaggcagttgagtcaagaaaatacaatattgtataaatttttaatgtaagtatgaagacagaagaggatttggtaaataagaaaggaggtactggaaaagcaggcattcagtattgaagcaaagtccatcaggcctggaaggaatggaaagcagtagaataaattttgtttttgaaataacaagaaactatctcttacactaagactgaagggaatactgtacaatattttgatatcagattagatattttatggagcatatactccgagtttcttcccaaatttcgtattcctaatacattaaactatctcacaaataaaagactgtgactgaacctgtataaatccatcaccagatttagaaaagcagtaatttgacttatgattgatcggcatcttagccattaggagtaaaaaaagccgaattttctactcatattcagtaaattctatatgcgattaaagatttaaacgtaaaaaatgaaaaccataagtactagggagaaaaatgagtgaatatttttatagtcttagagtaaagaaaagcctaaacttgatatgaaacctagaaagcatgaacccaagttgatagactggactatgtacatgctaaaattttacaaaaatgtaaaaattctgtatgacatgtggctaaaacagggtgtgacatacctagcttaagtaattcacatcagaagagagcaaccaataaatacatgaaaatatgcttagcctctattaatgataaaaattaaaggattatatttatttgttttatttgaatgaaaagaattgttagagcgtaagtaaacatgtatcttgtacgctgttggttgtaggtgcctttt

SEQ ID NO: 14447 - DNA, 1044 bp, Homo sapiens
atgtcaccggcgaaatatcggtgaaaacttccatgtttgggggaagacccctgcccgacctagtgacctagcgggccaaccgcctccccagctctcagagagacttcggggagacgccaagcgctccaggccggccctgtcctctgcgctccactgctgccgcacggactgccagactcccggcatgctctgcggactgaagtccgcggcacgagaaatcaaagccccggggcctgggtcccacgcggggtcccttacccagggtgccccgggcgctcatttgcatgtcccacccaacaggtaaacctgacagatcggtcgcggccagatacggcctggcggtcagagcaccaatcttacgagccttgtgatgagttccgttacatgaaattctcctaaaggctccaagatggacaggaaagcgctcgattaggttaccgtaaggaaaacaaatgagaaactcccgtgccttataagacctggggacggacttatttgcgtgctcgcttcggcagcacatatactaaaattggaacgatacagagaagattagcatggcccctgcgcaaggatgacacgcaaattcgtgaagcgttccatattttgcgcggttcaacgaaggtcgttgggcaagatacggtggtgttcctagaggttgttcaagatctctcggggcctgcattttcctgctcgcgagcttggcccagtagacacctacgatgctgtccgggcctcccaccagtcctgtcgcacagtgggcacacttcctcgacagcctccatcttcgaggcgcctagttacgttactattaagttacctaggtgatcctcgtatctgcgtccaaatacttgttttcattgattaaaatatgctttcaggctgggcaatgaacattcctcctaatcaaatttcccatcacagaatctgtccgatttatgtaaatcggccctttctaagtacttcttagaggatacatgaaaacagaagactcgtgaaaacagatccagatgggcttgctacttgtggccagtattcacatgggtc

SEQ ID NO: 14448 - DNA, 1045 bp, Homo sapiens
tttctgaaaacactagtaggaggaattaggaaccccacaagcaaaataacattaccttggaagaatgaatggtatattcagttttacctctacatctttttgttgctctgtgtgtgtgtgtgtgtgtgtgtgtgtgtgtgtgtattcacatgtgcttgtgtgtctgagagagagaggagagagaaaaagaaagagagcgagcgagcattatgggatttgggtagttttggaaactttcttttgagaatactgagaatgattgggggaaattaagtgagtggttgaagtactattgctaattgttgcttgttttaggaaaagatgatgtcagacacaatccttggtagaaattttgagagaatttttgatgtttcagagtctgacggttctagctctttataatataaatttcatttcaaaatttatggcttttttgggggggtggggtataagtgtaactgcctaagggattcaccttgcctgctgcctagacagagccgattcatcaggacaggggaactgtaatagaaaaagagtaattcacacagagccagctgtgcgggagaccagggttttattattactcaaatcagtctccctgagcatttggggagcagagtttttaaggataacttggtgggtgggggaagccagtgttccaggagagccgattggtcagagatgaaatcatagggagttagagctgtcttcttgtgctgaatcatttcctgggtgggggtccagaagatcagatgagccagtttattgatctgggtggtgccagctgatccatcaagtgcaggggctgcaaaatatctcaagcactgatcttaggtgcagtttagggagggtcggaatcttgtagcctccagctgcatgactcctaaaccataatttttaatcttctggctaatgtgagtcctacaaaggcaatctagtccccaggcaagaaggaggtctgctttgggaaagggctgttactgtctttgtttaaactgtaaactaagtttctcccgaagttagttcagcctatgcccaggaatca

SEQ ID NO: 14449 - DNA, 1057 bp, Homo sapiens
ggtgggggcaggagcactgtggaagataggaaggaaggagttataaactaaacctttcaaaaggcaacaaccgcaaacttggtcccttatccaaacagttgttttatgccccaagggttcactttgttgtcagggttttaaatgctcttaacactttaagtgtaaacattacacatgtaagttgatttggctttgtaatgagaaatgggaaatcagatgatttgtttaggagggggctgtttttcatacttgcttcaagtaagtgagtaattccacctttatttgcacattgtgcctagaacttgttggttaacaagtatttccttgtagcagttgaacacaaatatgtttataaaagatgactttctgtggatatgttttaaatggtatcctcctatttatttaaaaaaatgttttcaaaatcattgatttcacagaggcatttatggacagtttattctttactgcttttcaaatatattagtaatctgaaacttacagagaaaaatatatcttttgaattgtctcatttatttatgaaatgtctaacctgtgtatagtaatacagtaccaaagtcatttccttatagtaatgtttataatgtaaatttcagaaaaataagctcgttcttgataatgtctttggttactatttagtgctccttacatttctctgaattacatatacagaaagtgtctctttagagcctgaaagaacaagttgaaaaccttgtgtacataaacttgtttgattttctttaaacgccaatagactgcaaattatatagcactaccacaaagtttttctactatgtggatgtataaccaaaaaaattagacagagagaagtgtcaagcatgtgatatgcccatgctgatttgcaaagcgtatcccagtagcacaaggcttttggtttaaaaagtaaaggtggtggagactggtttttggaggtatttctatctacagtataagcttaaataggggtgataaatgattatatgcattgtctaacacttgcttatatatataaatagctccacaagattgcttaaatgat

SEQ ID NO: 14450 - DNA, 1033 bp, Homo sapiens
ttttaattaaagtcttcagtgctgtaagtacagatggttgccaaatttaaaatgacccatgctgaatccagcaggttgcccctgctcacccattgctctccctcttattaaaatctttgctttgtctgctgtggaacctactgtaggaggggggaaaagagaaacactttgtcacagagtagatccttcatatttctttgttgaacaaaatacattttgttagaagagtcatcaagaaccgggagttcaggaactggaaatggatagaagtgatagaaggattggaataggatagtttaccctcagattccattcatttcaggattactcacaaaaaagcaccctctctcacacacacaatggacaaccgctactgtacctgaaatactcagctcattttaatggttagcacatatgctgtttttacaaggtagatactgctggaaggcattcttgcagattagtttggtcacattgccttctttcttatatctgaggtaaagagagttttgcattgactgttagggtggggaaaatgattttggtggtggtggggctttgtcatctagagaatgggaatggtgattaagatttgaataaaggcactttcagcttagtatctaagaaagagaagactctacataaaagagacattctaagcacacattcatctgtttggagattttgccttgagctaacaccaagcccaaacaaggagtggggtagtatggggtttttgtctcttattaatttttttaaaatttccttttcactgacttagtctttattctgggaatacatggtccattattctgccatgttaaggttaaacaggcatctggggctgatcagacacctaactacaatctaaaaagtcatttgtttgaaaacagtgttccaagtttcatctaaaaatgtactttcagaattttgttagtaagtttggaattgcttgtaaatgcaattctgtttatagttctatgagtatattttgattttttttttttttttttttaagacagagttttgctct

SEQ ID NO: 14451 - DNA, 1049 bp, Homo sapiens
cgccactgcactccagcctgggcgacagcgagactcggtctcaaacaacaacaacaacaacaacaacaacaaaacaaaacaaaaaaaaccttgtattctatgcaatgaattttgaccattattttctacttcctatcacaatacctgtgaattgaattaagctgaaacaaatacaaagatcagcttgggagtgagctagttagatttgaatttcagaaagatgactctggtagtgatgtggaggagagaggaaggaggtgagattcacggaaggagatatcagtgtgaagctcttgcagttattccaggcaagacttggtgcccccattgaaagcagtgtgaataggggtggacttgataaattataggaggcaaatctacacaaactaattagtgaatggatatgaggggtgaggataaaggagggagtcacgataagcaaaggttgggttctactcagtacactgtgtttctattccctgaaacagggaatgtaggaaaaggagcaaatatgtgccagaagatcatgagtcctattttggatgctttgagaccaatgtcttccatgaaaacgtgaaatggcagaaacccagatatttgcagactaatccagaatatgaaaataatggaatgtatttgataagcaagtgcttattgaatgattgaatgtgtgtgattagccttcaattcattacattttaaatgactattattgacttgctatgattattttaaaatcatacagcacaacaggaagcattctaattattataaaagtgaaaagataagtggcacaaacaactctttttgtggctttaaattttccagataggttgatgtgactatacataactctatacttaaagttgattaatctagatgctaccattattcctccttccctcattgcccatttttttgaatgttttagtaataatggaaggctaccagtgggcaaatccagtaggtagaggaataactggaagagaaatgaccaatcaaaaacttgaaaactaggagtaagtacagattttaaaaagtcaggccag

SEQ ID NO: 14452 - DNA, 1118 bp, Homo sapiens
ctgagattacagatgtgcaccaccacgcccagctaatttttgtacttttagtagagatggggtttcaccaagttggacagtctggtctcaaactcctgatctcaggtgatccgcctgcctcggtctcctaaagtgctgggattacaggcgtgagccactgcgcctggccagattctgtgtttttaaaagtgtcaactttgcttttaaataacggtggcaaatagcaatattctttcttttaataatattctagactaatttatgggaaccacacttcctttggaaaaggacgtgatttaaaatttcatttagaaaacaacttcagttgttctagtattatcacagagcagtgtattagaaatcactgtattatattttgaaatttagatcaacctataatatgaacacgaaaaacataaacatgaaaatgtaatttaacaaaggtgaatttttctttacgatagaaatacactgaaagcttttgccagttaaagaacagcgtgggctactgtccttgcctctttccctagggaacccaggatctaatctggattagattccaaatgaacatgtgttaggtggtcccatcataaccctgaatggatattttgctacaccacaaaactagaacataatttgacataaatctttgtttagaagcgaaatagcaggggatgctgtgggtcagggtggaactggcagggctgcgtgggaacctgcccacatagcctggtgtctagcagagctggcacttttaggcctttggtttccttgaaattataggtaatgaatttaacatctagtctctctttctctgggacagtaaccttggtacatagtgttctttcatgtcgacttgtgacccatatttttggtatttcatttataagaaaaatatacatatatataatttttaaagttgcctaataattgccacaacttaaaaaaaatttttttactttattatgtttgtaccctaacagaaaatagaatgggttaggcaagcattatttaaatgatggtgatgccatcactgctgggttttaatattccattttaatcactgggcaaattggtcgtgttttatttggggaaaatggaatatgttgagggaggat

SEQ ID NO: 14453 - DNA, 1039 bp, Homo sapiens
gacacatgaaaaatgctcatcatcactggccatcagagaaatgcaaatcaaaaccacaatgagataccatctcacaccagttagaatggtgatcattaaaaagtcagggaacaacaggtgctggagacgatgtggagaaacgggaacacttttacattgttggtgggaatgtaaactagttcaaccattgtggaagacagtgcggcgattcctcagggatctagaactagaaataccatttgacccagccatgccattactgggtatatacccaaaggattataaatcatgctgctatgaagacacatgcacacgtatgtttattggggcactattcacaatagcaaagacttggaatcgacccaaatgtccatcagtgatagactggattaagaaaatgtagcacatatacaccatggaatactatgcagctacaaaaaaggatgagtttttgtcctttgtagggacaaggatgaagctagaaaccatcattctgagcaaagtatcacaaggagaacaaaccaaataccgtatgttctcactcacaggtgggaaatgaacaatgggaacacttggacatgggaaggggaacatcacacaccggggcctgttgtggggtgggggaagggggagggatagcattaggagatatacctaatgtaaatgacagtttaatgggtgcagcacaccaacatggcacatgtatatatatgtaacacacctgcacattgtgtacatgtaccctagaacttaaagtataaaaaaaaaaaattgcccaccaccttacaaagctagtcatcctcctttagaaacacacttttggggggaaaaccatctatttattttcatctattcagataatttacaactaaggttaaatattctctgttttcatataacccactatatggacaataaataatgattagaaaatgggaatttaaagatgcatttgggcttttagttattcaatttattatctttaaaaatatcttctgttttatttatggtaaaccaatattttaatatcgaataattt

SEQ ID NO: 14454 - DNA, 1102 bp, Homo sapiens
aaattgttaccagagttcaagaaaatgaagatcttttgcaagatagaggtgtgtgaatgaagaggcagctatggaattgagatagaatcattagcatgtggcccataattagaggtgaaaggctagagaatgacaggatttaatcatcaccacaagttttctagtttggctgctagctgtctgattctactacctgagagaagtcgagagggatggtctattaaatagccaagttgatatgaggtaggcacttggaaacctaagtcctgtttctgcagagcaattctcaggctaggtctggaattactgatcactggtgtatagatgaatgatagttcaaattaagaatgggttacagccctatggaaatgatgtggagcaaagagagggttaaggagagcccactgtggggtatgtcatcatttaagaggccagtaaacatgagaaaggaatggacagaaagaaaaagcaagccacaggatttgattttggtggaggaaggaatagtaataatgtcaaggtagctaaggataaatcctttagtagggcaaatcctgaagagatgtcataggttttgtggattgaaacagtcgctgtgcggagtaagtgtagaatacagacctaaagagtgataggaggtaaaggagaagaatctgagtgttcatggtaaagaaagggtgggaaatgagaagttatcatcaagagaaatttgtgtttttcatgtagtgagagtatgtttatatgtctgagatttatgggatcaagcattttgtgcatattggaaaagagatgaaaacctaactcttggccaattatatgctcttcagcaatctcctttaaaaatcagtatctcatggtcatgtctgtgctgagaaaggattggttttcattattattaatggctaaatgccattctatactatggatgtatcataatttatgtaaccattttcctgctattgagtattttgattacatctaaaaatgttcatatctaatgcatatatcaacgtgtctatgtgtgtgtgtaaacgcaaagagaagataaaatattgaaaagcatattttctaaaaagaaaagcctagtctggatggatttcag

SEQ ID NO: 14455 - DNA, 1064 bp, Homo sapiens
gcttttttttcccagaggtgagccagaacaagtactaatgccagtatattcagagtgtaaaatttgagtccttcgttcaataggttgtcaggaaatacctggtaaataaaaaaatgaacaaagaaatcttacctggcaaggtcacagttaacctcagagccagggccttgtctcagctccgtgttagaagcttagtttgtatccacatctccagacatgggagagtatatgacagattcattatgtgcgtggatttgggcatccagccaacatgagtttatatccccagttgttcatttattaactgtgtgcacctacaatggtctcttgccctctctaagccttagttttttcatctttaaaatggagaaaatagtagtgaaagttttcctggctggcagattgtgaggactgaacaaaatagtttagttgaaagtgcttgatacagaacttgacatgtagaacacatttgagaaacatctgctagtatttctgttcatgtgttaggtagtccagaataatgtgcgagtttttaagaaaaatcctgatgcttatcagaaactttattacttcaggaatataagaacattatcaataaaattctctcaggttcaaaacaagataaatattctttattgaacatgacataaattgcttacattgatgtatccatttgacagttcaggtttagttcagagtaaaaaattttatatttggtgataacaatgtatttttaccttgagaatgaaaattcttctcttaaaaaccaaagaagttgtcataatactctcattggcaacttagaagaaactgaaaaagagagagtttataaagggactccagaatcaaagtctcctttggactaaagtgtgacatgccattactctccttatcttattacgtgacctcctcaacttgctcagaaaaaaaatgaggataaacacccaatcagaaatccagaagagctagaaggtagaaccagccatcgaccattgctataaattatgctggtgaaacggtttaatgcacatatgcttctccttgtgcacattgcacgaaatcca

SEQ ID NO: 14456 - DNA, 1025 bp, Homo sapiens
gaacaaaatgtgtccccagattttcctcattcctactctttcagacttgtttttgtatcgtcttgtacacactgagttatttgcccatttctaaatgaacaattaacaaaggagaatgcagttatcaaacatggtttacatcaggggtaatgaacctgcagcatcagcacctcacgggaacttgttagaaatgcagattcctaggcttcatctcagtcatactgaatcagaaacttgggtgggacctagcagtgtgtttcaaacaagctttctaggcaagtgatacattgttcaaacttgagaaccattggtttagactcatcaggtcatcttctggtgctagagagaggacttatattcactgagcttactgctttcttatgcctgttgcagacacagaagagtgtttgccaccactgactgtatttcaacatcaagtaatcagccagtaaagggacagaatgaagataagacagggatgaactgagaaaggagatgagagtgcaagagattcatgaactcagattccacctccatgttaagaagaaagcatgaagaaaaatgtggatgcagaagcagataggctgctaggagcaagattgtaacttctcttgcattgggctcagatgaagcctcctggcagggagggaggtgtggtggaggtaagagctaagattgtggagaaggtttaaatctcttcagagaagcagggagcttgctaacctggaaacctctgaatgtagatgagatcatggacctccctgcgttggtaaacctgagttcggagtggactgagctgcctggctatgtcacatgcaacagaggacacaggcttgtagctgaagatagtttgattactttagggttgaggctttgccaagaagagtgtaacagaatatcatgagcgaggatacttaggatattgttaagggagagattgaagtgatgaaccaaggagttagtgctgaagaggagggagagtgcagatggggtacaggggagggttagtctatgagcccaaagtc

SEQ ID NO: 14457 - DNA, 1125 bp, Homo sapiens
aaagctaaaatttcttccctattgcagatgcccttggggactaaatcaagagtctgagggcagagtgaagctcaggattctctgcagataaatggctcatctggtcagctcaatagggatgtgaccccttcatcatttagatacaagggggtgttgttagtgtcatttatggagctgttggtctagaaaatcaaagcgtaatctggcttggtattttaaaaacctcaggaaaacgaggcttgatgaggattgtaaaataaaaggtgcttgttgttgctcttgcaagcacttagatcaacccagggtcaaaatccagtggtataggacaaagagcagacccagtttcctgcctctatttcttccccttcccctcccccattcttcttttcctccgccttcccttcagttcttctttccttcatttttctctaggaaagcaaagagtaaaatattttcctaggagtagagaataaactggtaggttatagttgtctttgacttgttaacgatcacactggctctccttgggtctttgggtcatttatcatgtggtcctcgtctaggatttgatcagattcttagagcatgggtggcctagcagagtacatgttatggctcgagttctaataggatttttccttctcccctctcccaactacactcccactcccggggtgtctgcactgtgacaagacaactgttcctcacccagcagtttgaaagcactgattttgctgacactttgatattattctagagacataagccaggcaacagaactggcatcagatctcctcagacactaacgtgagtgcccagggaaggttgtagatgcacatttgatttccacatctatcttctccctgcaaattaaattattaattttcccgcatgtcttcttgtttaatgagaggagtggtggcctttatctgtgcacgtgtgcaaacaaaacatcacagcaggggctcctgaactgcccagagaagctgaggggtttaagcagtcagatgcaactgtcttggtacagtcagtgtcatttgccaaagtctgtctggctgttggcatcataaacatggaagcatgcagactccagtgcatatcctcacatacatatccgaagatgaa

SEQ ID NO: 14458 - DNA, 1035 bp, Homo sapiens
cttattagttggttttgcttgcatttcataagaatatctggccttaatcactttatattttcataggacaagtattatgaaaatctcattcacttgtaaatacatgaaattacaatctctaggaaaatggtttgtaaaaccattggctggtttggaataaatctttgctaaacctcaatataatttattaaaagtaccatgttgactccactttgaacagtggcctcatttctcatgttctgtttcaaaggagccctctgctggacagctctgtgtgatatcacatgcacgcatatatttatatatgatttataggctatagttaatataacccaaaagccatttatgattgaaactctatcgttgcaaattgaatgcatcactgaaacctgttttgtcatcactttttcatatttaatgaacaagcagttgtctaaaaataaaatgttcatccttaaagtttactgtaaatcactgtacatcagcatattcccacacatgagataatcgtactaaatgaacattcattaccaataattttagtaatgaattattcagctgatatgcaattatcacacacatttctaaagcaattactttattacataggtattccatgtcattgattttacttgtctatattacatatgtaaatatagaaatctttgcttttaccatacgttcaaatgcaaagggatttttaatgtttatttgttcaatgtcatcaagttgtgaggatgtatggttagtattaactacattttaagaaacttgcaaatgtcagaaaattgctgtgataaaatgaggcaggaacaaataaacacaacccaaaaatcgtggaccatgaggttatagaaatggtatgtttttctgagtagcttgtcagtaggctcatattattatcaattatatttttaaagctgctgttattcaaggcaatgataaataacgacttgaaattatagtcccatgtacatttagcctgggaaacaagatggtatagggaaaccacacagcatcataaagcaaacgcag

SEQ ID NO: 14459 - DNA, 1050 bp, Homo sapiens
accttggcaatccactttagacctgacttcatatcccattttttatttgaaaggtaatcaaatctgagatacggacattgatctgagactataggtataattgactaaaatgataagcataaaagtgaaaaatatggtaaattaaccaattgttgttggtgtgtctgtgtgtgtgtgtgtgtgtgtttcacttctgtgatgactaacaactaatttaactagttgttttcccccctaccaaattggccgttatttttcattgaattgactggatgtctttgtgtcatgtagacgtagactcattttaatctcaccaggaaattggaacatgtgttgaagcctctgtttttgccaaaaaaaactggccagttcttagatcgctactgcttaatagcatcagatgtttagcctccagatattcttttaccctgctatggtgcccaaacctcctcaaatattttagtaagtacatgaaatctgaacctcatgttaaaaatcacaatcccctttagtgaggaagtaaaggatatgcgtagacagcaaatgacacatctattcagaaatagcactgggtactttgaaggacagaaaagaatccattctattctgaatatcaggaggtatcccagaccatagtggaaatctgtggaatctgaatctgtaaataatctaagtccataagctggactcctcaagaaaataatttccatccttactagtcattatggtatttgtgatataaggaaaagggagcactgagcatggaggtagaactggatttcataaatcttgattgagtggttgttagatgccagctagagaaagataaataaggcattgcctcactgttgagaaattcagtgattcagaaattctctagttgagagctgaataagccaaccagaggcatacaatgccataaatgctttaataattgtatgggagtgaagaagatttaatcctggctctgccactgactggccatctgatcttgtctggccacttagcctctctgtgcctcagtttcctcctctgtaaaatgaaggttta

SEQ ID NO: 14460 - DNA, 1055 bp, Homo sapiens
tttttaaatgttgttcatctttgctgtatccacttgctgcaagattacatctgttcagtttcatttcggcactgaactttccctgcctgcaaactaatcctcctcattctctcgttaaattattgtgattatttaaagaaaaaaaaaatgtgctttttctgtccgaattttcctctttataaaaaatgctaatggtattgaccacatttactagacaaacagttgctaacagttttcaggcatgaatgtttttgcggaggggtgttgcatgaatggcaccaaatacaaaaatgttgttggtgttctgaattcatcgtatgagagaccattggatagacttgaaggatgcttgctgctgcttttcatgagctgctgtctcctctatggactttggaaaagattttgtggctcatgggttattccctttttccttttcaacccaaatgtatttgtacattatcataggttcctgtcttaattcataaaggtaaccagatttttgttccccactcaaaaaaaaaaggacgtgaactgatgaaagcaaactaagggggctatattctcttctcggtgggcttggcaacattaacattaatgggagttataagtgcatcaagaagcaagttcatccctaagatgtaagagctccagccatttgaaattagcctttgtgggtctcctgtgttccgcagcaccaggggctaattcttattctttttcatctttcccctttcttcactgggcactgatgcctcattacacactgttcctcccattctgcagcgccgagtctctgactctgtctgactccaatcaggagttcgcaagcatcatcccccagatgtcctaatgccagctgtgggggacattgttcgaagctggggttttaaattgttcatttgtttatttaagtctttatctttttaaccaaatgtagtgttacctaaagagaaagttaacagagatctcagttcaataggagggttgttgtctaatcttttaagtcattttctgactatcactaacttagtgacagccacttgctttacatttcc

SEQ ID NO: 14461 - DNA, 1035 bp, Homo sapiens
gggtgtggtgatgtgtgcctgtagtcccagcttgggacccgaggtgggaggatgacttgagcctaggagatcgaggctgcagtaaaccaagagcacgccactgcaatccagcctggctgacagagtgagactgtctcaaaaaaaaaaaaaagaaaattttggtgattggatatcactggtatattctcaccacacacacacacacacacacagacacacacacacacaaaatgaccaaattttaattaacaaaacaaaaccttacataacatcaaatctaaaaattcacttggtattttcatctgcttcttacatatagagctttaaagcttactaaaagacttttaaaaagaaacatactttactcatttccatcccaatctttccaaacaacatactcacctttggtgtggaaatttcttgccttgctaacacttactggcctagtattttttgacattttcattctcagtggggcggaatggctaagtgtgtaggtggtggaatcagaatgcctgggttttaatcccagctctgctgcttaccagctgcgtcactggagcaagttgcttaacttctctttgtttcctcatctataacatgttggtagttacagtaatacttcagaattgttgtgaggaataagagttaatacaaagaaagcaaagtacctggcatattgtgctccataagtgaaaccactaccatgattttaataacttattcagcctgggcaacatggcaaaacctcatctctacaaaaaatataaaaattagccaggtgtgatggtacacgccagctactcaggaggctgaggtgggaggatcgtctgagtctgcagtgagccataattgtgccactgcactccagcctgggtgatacagtaaggccctgtctcaaaaaaaaaaaaaaaatttctttatgcttagactgaacctaaaatgcatttttatttttatcatctttttttcttgtgcattatttttgatgaaaatatattgtcctgtttgatggataacttaaaaaattctcta

SEQ ID NO: 14462 - DNA, 1028 bp, Homo sapiens
ccagaccctgtctgggggaaaaaaaaattccatagactactaaagtttaagaacttgtgaaatctttttactatcagaaatctcttttgttacatatgtattactggccaagacatctggaagttcagagatacaatgctgataatctgctttccagatttggtttacaaatggtgggttttatttggtctgccatagtcttgacactgtactccagcctgagcaatagagtgagaccatgtctcagaacaaaccaaaactgcttaaagatttatttctttactacaataaacctaccaaaagtttttcacgtgtaatgaaagaaaattaatctcacttgaaactcattttcttaaaatatcgttgatatagatgagtaacgaaagaggctttgaaaatgtagaactgggagtcataggaaaaaagaagaaagtcccaaggagagtcatccactttgttagtggtgaaacaatggaagaatatagcacagatgaagacgaagttgatggcctggagaagaaagatgttttgcctactgttgatccggtaggtttgatattgatgattctttcctcagtgggctttgttttgatttattttttttccctaaacattgagtggaagggaccttttgaggtttaaatcaactatattcttattataaaattatgtatggtgattttgatagaaaataatatttttacatgatatggacggaaatatttccagcatttcagtagcctgaaacagcttgtttttcagtgtcagagtactgtgttagtatggatagatttaagattgatcagccaggcgcggtggctcacacctgtaatcccagcactttgggaagctgaggtgggtggatcacctgaggtcaggagtttgagaacagcctggccaacatggcaaaacgccatctctactaaaaatacaaaaaattagctggacgtattggtggacacctgtaatcccagctacttgggaggctgaggcaggagaattgcttgaatctgggaggtggaggttgc

SEQ ID NO: 14463 - DNA, 1031 bp, Homo sapiens
ttgggttagaccatcatctgttgaagtcaatcctattatactggggcataataagtgcacttaaactaaaaagatgcttattctttctgtaagtgcttccagaaaactatgttcaagtagactgccatgaaaacattgtagtttctcacaacttttctagtcaagagagtttagagtaacttaagattatttacagattttcttagtatcacgttaactgatttgtgtatattgaaccatccttacgtctcagggataaatctcacttggtgatgatgaatgatctttttaatgtattgttgaatttggtatgctagtattttgttgaggatttttgcatcaatattcatcagagatattggcctgtagttttttgttttttttttgttgttttttgggttttttttttgctgtgtctttgtctggttttggtatcaaggtaacactagcctcatggaatgagtttggaagtcttccctcctctattttttggaatagtttgaataggattgctattattctttaaatgtttggtagaattgagcagtgaagccgtcaggtcctgggcttttctttgctgggagactttttattatggcttcgatctcgttacttgttattggtctcttcatgttttttatttcttcatggttcagtcttaatatattgaatctgtctaggaatttggccatttcctgtaggttttccaatttattggcatatggttgctcatagtagccactaatgatcctttgaatttctgcagtatttgttgtaatgtcttctttttcatctctgattttatttgggtcttctctccttttttcttagtctggctaaaggtttatcaattttgtttaacttttcaaaaaaccaactttttgtttcatgatcttttgtatggttttcttaattccaatttcatttatttctactctgatctttattatttagtctctccattttgggtttggttaactcttgcttttctagttctttaagacgcatatttggccgggcgcgatggctca

SEQ ID NO: 14464 - DNA, 1042 bp, Homo sapiens
ttgacagagattatcacaaaaaccacccaaatgtgtgataatgccaaaagaaactcttttttctctgtcttttgttttattctttcctctctcttcttttcttttttgctctttctttgttttggatgcggggagaatatagtaaggattgggagctctaaattccctaatcccgtcccgattgcgtagtaatagctaacatttattgagtattttcccatgtgctttgtgtctacatacattatctaaagtaaccctcataataacccaattattatttctactttaccaatgatgaaacaggctcagagaggaaatgtaacttccccaaggtcacacagttggtacatagtagaattagaatctgaacccaggcagcctgatgccaaagcttgtgctcttaattatgattattgaactattaagtaatagaagttggaaaggtctctattatgtgtctatccagttttatttatgtataagtccttccaccgcagagctgcatagattgcttaaaacatgaactggagatgtctaaggtgtctctccctccctcccttcctcccttcctttctcttactattttttctgcttccagtcatccattataaggtgtctttttatatagccaggtattttatatatttcgaacagacagtactttaccagaaaacagaatccataaccatagtgtacaactgtgtggggctttgtagcaagacaaaagctgtgtaaattagtgcagccatggccaggctacacaagttttcaagcttctgaactccccactcatcttactctttctcttctagtcatgaaatggagccctttgatcctgacagtattcatatactttcccagagtgagcaaattattccttatatatggactggacctagaaccctagggtgaatttttaataaaccttttgagagtggaaatttaatcaaattttgatatttccatatcaaaataagttagtttaatcttcctgaaattagttttcagtcttcagaatacctatcctttcttgccttacagg

SEQ ID NO: 14465 - DNA, 1097 bp, Homo sapiens
ggacctcagaatcacctgtaaatgctttgcaacacctgatgagtgacataaagggaatatatatctctgctgttgttctcacagcctgagctgtgtacagtgtgagccattgtcttgcatcgtgtgcctgtcctgaacattttgccaccgtgccttttatgtttagccactgtatttttctagtatacaaatgaatcccagagaaattgaggaagtgttggggaaaatggtagggaaggaaacaaagcaaataagatattactatggaaatgacatttctacatacaaaataactgttgataccattttgtttgagcaaggaagcaatttacttcctaacctaatggtttgttgttgggttcaaccatgaaactgctggtctttgactaatttttaacctgtaaaaatggcagtttcgtgtggttcaatctaatacttaggtattttactgtgtatttaagatttagaaaattgggggcttggagtcgagtttaatgcattataatttttcccatttaaaaactggaaaatggggccggacacagtggctcacacctgtaatcccagcactttgggaggccgaggcaggtggataacctaagtttaggtgttcaagaccagcctggcccacatggtgaaaccctatctgtactaaaaatacaaaaattagctgggtgtggtggcgtgcccctgtagacccagctactagggaggctgagacaggagaattgcttgagcccgggaggtggaggttgtagtgagctgagatcgcactgctgcactctagcctgggcaacaaagtgagactccatctcaaaaaaagaaaaaaaaaaggaaaaggaactatgacttattattttcttgcataatcttggacattcaagaatagtttactcagttttagagttctgtaagtttccaaaattttagcccaaaccaaagtctttgatcatgtagtgtttaagtactgttgccaacgtttgaatcctgactttaaaaaataaatatcattttaaaatgctgcccataaactattatttttatctttatttctttattattattattattattttggagacagagtttcactcggt

SEQ ID NO: 14466 - DNA, 1034 bp, Homo sapiens
tttatagtattctctgatggtagtttgtatttctgtgggatcagtggtgatatcccctttataattttttgttctatttgatccttctctcttttcttctttattagtctggctagtggtctatctaaaaccagctcctggattcattgattttttttgaagggtttttttgagtctctttctccttcagttctgctccaatctttgttatttcttgtcttctgctagttttttgaatttgtttgctcttgcttctctagttcttttaattgtgatgttagggtgtcgattttagctcttacccgttttctcctgtgggcattcagtgctataattttccctctaaacactgctttagctgtgtcccagagattctggtatgttgtgtctttgttctcactggtttcaaataacttatttatttctgccttaatttagtgatttacccagtagtcattcaggagccggttgtacagtttccatgtagttgtgcagttttgagtgagtttcttaatcctgagttctaatttagctgcactgtggtctgagagactattatgatttctgtttggcatttgctgaggagtgttttacttccaattatgtggtcaattttattttttatttatttttttaaattttatgttattttattttatttttttttgagatggagtcttgctctgtcccccaggcgcaatctcggctcactgcaagctctgcctcctgggttcacgccattctcctgcctcagcctcccgagtagctgggactacaggtgcctgccaccacgccagctaatcttttgtatttttagtagagatggggtttcactgtgttagccaggatggtctcgatctcctgacctcgtgatctgcccgccttggcctcccaaactgctgggattacaggcgtaagccaccgtgcctgggctatgtggtcaattttataataagtatgatgtagtgctgagaagaacatacatcctgttgatttggggtggagagttctgtagatgtctgttaggtctcctt

SEQ ID NO: 14467 - DNA, 1049 bp, Homo sapiens
agttgagaattagagattatttcaggtattgaaaacacctctaggagaaattgttatccctcatattctttatggtcttagacattaaaaatttgttagagcagctaatggttatactttactgtctttgttatggagttaatcggtaatattgtatatattaaatagataccaaaatatattttcagtctgaactcagacttctttcttcctctttttttttttttttaattaaggcaatggctacattggggccacacagagtgaaaacggaacgtaagtcatttagtctgagttgggaaatattctctttggagacttgttgaatcagggttgttatctacgtactaaagaactcttgaatcagtggttttatttcatcagtgaacaccgtgcctgaaattatgaggaattcttctggagtcattgcttcacgtaaaagtttcaaaatttctgaatgtggtataattatttcagtgttcagctacattcttattgctaataatggatcagtaactcaaaaaagtatttatgcagtgttttttatgggctctgtcattctataggggaggtatttggaatttgtggattggcttcagagattctgtgaatcctctgaaattatgtgcaaaattctgcatgtgcattttctgaggagagagatcagaatgctgatatgccttagtaaaattcatatcaagttacacttccttgattttttttttggaagtctaaaatcactgccaaaatgtgatggtgtttaggataagtttctctgtttctgccttctttcactataggtgagatttcctaatccttctaaggacaatgaagctagactaaaaagaaaaacatatttgaaatacttaggaaaggaatttctagtcacatttaaacagcttaagtaatcgataagagaccaatttctgtttaggctgggcatggtggctcatgcctagcatgatcccagcaatttgggacgctaaggcaggaggatcacttgagcccaggagtttgagatctgcctgggcaagatggcaagaccccat

SEQ ID NO: 14468 - DNA, 1044 bp, Homo sapiens
aagaacatcctatcccccacactcatacaaacttcaggttctatactattccttgttgtttctctacattttgcctataccttataaatagtccctatattgaaccctagtcaagttattcaatttgagtatgcttcctgtatcctgctgctactttggctactacctctatccagatttgttagtgtatacacaaacacacacacacacacacccctcacattcatttttttaacaaggtacctgcaaagtatgccagctattgtatagctgtatcaaaatataaacaaattaatatattagaaatttaaattgtttcctttttctattctaaataatgatgcaatgaatatctatatacatatatatgtaccttttccctcttgtttatattagtgccgtaaaatacattcttagcaggagtatttctgagacaaaggacctgtgcatatttaaggctttagatattgccaacagtcttccatacaggtcatgattatattcacttccccatgtagtatacaagaatgcccaaacgcccatccactcactaaccctctgtattagtccattctcacgctgctaataaagacatactcgagactaggtaatttataaaggaaagaggtttaattgactcagttccacagggtaggggacgcttcaggaaacttacaatcatggcggaagaggaagcaaacatgtccttcttcacatagcagcaggaagaagaagtgctgggcaaaagggggaaaagctccttataaaatcatcagatcttggctgggtgcagtggctaacacctgtaatcccagcactttgggaggccaaggtgagcagatcacctgaggtcaggagttcaaaaccagcctggctaacatggagaaaccctgtctctactaaaaaaaaaaaaaaaaaaaaaaaaaaaaaaaaaaaaattagccaggcgtggtgctgcatgcctgtagtcccaactactcaggaggctgagggaagagaatcacttgaacccaggaggtggaggtcacagtgaaccaagattgt

SEQ ID NO: 14469 - DNA, 1049 bp, Homo sapiens
gccgcagacttttccttggagaaggagaaggggccccgcggaatctgtacttagtgaatgctgaccccgcgtggccgggagtgatggggctctctcgaaggtcagtgtcgtggggtcctcaggtggcagacagctctttctgggtatggttttggtattgtctccagtttcctaatactggacctgagcagctgagcatttattcaagggtgtattttttttgtttttttccccttaagtcgcggttagtcagaaggttccagtcctcgctcaacctctgatcgactctgtgcccatgagagagtcgttttatatttcatttctcacacgtggaagtgtgggcgaagaatgaggggcttctttaagcgcgctaagccatgctgtaaaaagatactgttagaatttttttttttcttttttgattcacaatgtccctggacctggtgcaacgtttgggaagcattttaagctctatggatggagggaacaagacagccgcattattagacaaggatggtagaaaggaacaactttccacaaacacacgcgtttggaaaagctcctttgagcattttatgcaggttaaatcacagtggtagtagatagaaataagccaaaacaaagggccaaacaaaactacatttcaaggaggtgttcttttcttccccagataacttgaatatactatcacaaattattggcgtttcaaagtttttccttgtgatctggtatggagttcatctaaaatgacaattacataatcattctatgcaatcgtatgccaataaaattaattaaaacagtttaatttttaatgtgaggaataggaatcaagacatgtcattgatgggaggtaatgatggcaatcagcaaaatgaatgggagatgtatacaattttccttcaaaggagtagagtttatagagatatttttattgcgttaatatttaaagtataaagacatacagaaaagtgcatgaatcgtaagtgtacagctcggtgaattttcacaaagtgtaaatacccatgtatccagtatctagatcagga

SEQ ID NO: 14470 - DNA, 1034 bp, Homo sapiens
catttgggtaagtgaactgcagcttagaaagttcatgtacaaaaatgcactgtcacaatttccttttgattctttataagtaagaaactggttttaggatttcagcatcttaatttctattgtctttatttcatgcaggtaattaattttcatcttattttaaattaaaatctacctacatgtctctatttgtttatttgcttattaatagagagtctccctctgtcccccgggctggagtgcagtggcatgatcatagcttactgcagcctcgaactccttgtctgaagcaatcctcccacctcagcctcctcagtagctaggaatacaggtgtgcaccaccacgcccagctaattgttttaaaaaagttttttcatagagatggggtcttgctgtgttgcctaagccgtaccgacacatatttagatgcctatgctttgtttgttaatttttttttttttagaattaaaatctcatttgaaaatattttgtctcatgattactaacaggttggttctggaagctcaggttctacatgtaaatgtacctgccttagttcatcttgtgttgctataagagaatctcacggtttgggtaactgatcatgagcagaaacttatttgacttatggttctggagactggaaagtccaagagcatagtgctggcatctggcaagggcctttgtgcttgtcatctcatggcaacaggtggaaagatgagaacaagagcaggcccattgaacaaaactactcttgtgataatgttattaatccattcatgagggtggaaccctcatgacctaatcaccttttaacagtcccacctgttaatactgtcacgtggtgtgttagtccgttctcacattgctataaagaggtacctgagactggataatttatgaagaaaagaggtttaattgactcacagttccaaaggctgtacaggaagcatggctggggagacttcaggaaaccaacagttatggtagaaggtgaaggggaagcaggcacatcttcacattgtggagcaag

SEQ ID NO: 14471 - DNA, 1047 bp, Homo sapiens
tttagtcagcattgagggaagtaggctggcaatctctttaagttgtgtaccaggataggagagactatcttgcacttataacacccaaataatttttggtgtttcactcatacagagtttggcttagagattaaagctccttctatcttgtgatgccaccatcgcaaggttctcaaggttgttgtgggagaagagaaggctaaaggagctcatagaatgcctttaatggtaagtcctgaaattcgcttgtatcacatctgcccacactactttgtctacaattcaagtgaccaaaatataaataaggctaggaaatatgattttcctgcacatttaataggaactgctatggttataatccaactaggatggggatttggaaagggatagagtagaagaggaaatgatggttagatctcatctcttttcattactccagcaagatttttaccctgccttgacagtaccatttggcacttgctgcttgggctattgctgtggatttctgtattggtgggacagacaatgattgacctaaggcaacatcagggacttaagaaccatacacattacacatttttctctcacctattctttcagcatcaccagtgtctacctttcacctgaggtggcccccaaccctatttcaagacagttgacacagatttcttgaagtttttggttggttcctcaggtcaatgatttctttcttttctttttttttttttttttttttagtagttccaggtggattttggggaagagaactgacagccttttgcagttcattgtcttaaggggaactggacaccttcctgacttctgattaaaacatttttaggacaaaaactccaaccttaccttacctaaaaaaccgtttagtttcttgtcctcgtaaatagaacaaacagtttattgctagggtctagggatgatggtagtgacatgatggcaccatgacccagagaatagcagaaaactttgtattgggttacctatgaaatgtagttctttctttaggaagcaaattatctttctttcaaccac

SEQ ID NO: 14472 - DNA, 1049 bp, Homo sapiens
cacgttgccctgaaatacacttctattagcaggagttaagaatggacttttattaattgttttctttttttaagtttttgaggttttttttggttgttgttttgttttttaatagagatggggccttgctgtgttgcccaggctggtcttgaactcctaagctcaagcaatctgcccaccttgaccccccaaaatgctggaattacaggtcttaggcacggcacctggccaggagtgaatttttaaatgcaaaaaagagagatagggagtgggctgatacaaagtttgtcaggaactgtaattactttacaagaaataacattaattagtgattggctatacattgttaagctatagggtgtgggtcatagtgtctggtatggcattattaggttaatttatagctacttgtggcaatagcaagcagtttgaagagatgaatagaggccggacatggtagctcacacctgtaatctcaacactttgagagactgaggtaggaggattgcttgagtccaggagttcaagaccattgtgggcaacgtagtgggatcctgtttctacaaaaaaaattatttaaaagatgtagcctgacatggtgataaatgtctgtagtcccagctactttataggctgaggtgggaggatcgcttgagcctcagagatggaggctgcagtgaacctatgcactccagcatgggtgacagagcaagatcctgtctcaagaaaaaaaaaaagatgaatacatagctcagagggtggcaagtaggacatgattgcagtctcgttttcattctttctgggcctgataattaaaagggcttgcattcctcagataaaagttcttttctcatatgaaagaaagaaagaagcactttaaaactctgcttttttcattatgaatttcacattaaaaaatctgtaaaagttgtattcatttctatagccacgttagtttttatagccaaagtgtgccctgttgtttaatcttaactttaaaaggattgaataatcattgctggaagttttatcatagatggcatttttat

SEQ ID NO: 14473 - DNA, 1048 bp, Homo sapiens
cacgcagcttgagatctgagaacgggcagactgcctcctcaagtgggtccctgacccccgagtagcctaactgggaggcatcccccagtaggggcggactgacacctcacacggccgggaactcctctgagacaaaacttctagaggaacgatcaggcagcagcatttgcggttcaccaatatctgctgttctgcagccaccactgctgatacccaggcaaacagggtctggagtgggcctccagtaaactccaacagacctgcagctcagggtcctgactgttagaaggaaaactaacaaacagaaaggacatccacaccaaaaacccatctgtatgtcaccatcatcaaagaccaaaggtagataaaaccacaaagatggggaaaaaccagagcagaaaaaccggaaactctaaaaatcagagcgcctctcctcctccaaaggaacgcagctcctcaccagcaacagaacaaagctggatggagaatgacttgacgaattgagagaggaaggcttcagaagatcaaactagtccgagctaaaggaggaagtttgaaccaatggcaaagaagttaaaaactttgaaaaaaaattagacgaatggataactagaataatcaatgcagagaagtccttaaaggacctgatggagctgaaaacaatggcacgagaactacgtgatgaatgcacaagcctcagtaaccgatgcgatcaactggaagaaagggtatcagtgatggaagatgaaatgagtgaaatgaagtgtgaagagaagtttagagaaaaaagaaaagaaatgagcaaagcctccgagaaatatgggactatgtgaaaagaccaaatctacatctaattggtgtacctgaaagtgacggggagaatggaatcaagttggaaaacactctgcaggatatcatccaggagaacttccccaatctagcaaggcaggtcactattcaaattcaggaattacagagaacaccacaaagatactcctcaagaagagcaactccaagacacgtaattgtcagattcaccaaagttgaa

SEQ ID NO: 14474 - DNA, 1029 bp, Homo sapiens
cactagtaaaccttagtaccttccccaaagtcattttaaatagaaaattaaagccatgtatagctgtttcaaatcacctcttttctgaaaaggcaagttgtctaagttttgtgttgttttaagtgacacagtatgtgatatacttactgtagacctgaatttcattttctgaaaattatttttgttgattcctaatctttaactagatattgaatgatctagcttagaaaattatggcaaatattccaaattggcacttaacagtgcattaacatcaaagatctagtctcattttccaacactctgtatcaaggatttgcaaagtaagaacttatgttgaaattcagcctgctacctgttttgtaaataaagttttattgggatacaactacacttgatcacttattgtgtatggctgcttttgtactatggaggcagaatttagtagctatgataagagagcctatggtaaagcctaaaataattactatttggccatttgcagaaaaacttggctgatccctactctatataatctacttgagactaaattatgacataatctatctttaatatctgtgatatccgtgatatttcctgaaacttttaaaaaaatacaagtagagaaatacaagtatcaactttttctctttccagactcatgtttgtattgaaagttacttgcatctatgcagattttcaaatcttgaagtaatcatttttttattttaaccagttatatatttttttcctggccatttatcactataattatatcagttataaagaataataacaaaacaagattgagatccaaatgctaagtggctgacttagctcacttacgtcctgtgtgtcagacctagcacagcagccttaccaaaaacatacttgaaattcacttatcggcaaaatgacaagtcagtatatattatgtgcttttagcagcaatcacacaaattatttaaagtctgaatactaaattcatgtgccagggatctggaatagcccttgataagaacttttgat

SEQ ID NO: 14475 - DNA, 1024 bp, Homo sapiens
gacattacaggaattactgaacagaataaacaatgcagacacagggatagctattcagaagaatggagctataattgtggatagaatctacaagaccaaggaatgtaaaatgagaataactgcagaagaaatgagtgcactaatagaagaacgggatgctgccttgtctaaggtaactctgcatatatctgtaaaagcatatacttaccattttcctctctatttttttaaccattaaaaactgactttggcccagatattcttaattcacattaatttttagcacataattaataccacagtgattagctatattaaaataattatgtattttattatactactgttcaaaatatgaaacctcattttaaataaaatttaatgcagtctcatttcttaataaaattaaacttgttttattacagactaacttgttatagaaattgttatattttttcaactaatcacttttatatgggacttcttacttaaattacagttttctgaaggctgagactatgtctatattactgttttattcccagtgcctaattcagtaccttttagtaaaccttgattaatggatcaaaattattcatgtatttttttctgaatgctacttacaccttcctgctctacctgaaacctgattacctccctcaggccactgcttccagtgcagtcctttcaactagtggctgtgctctctctcataccagttataccactgggcttggaggcttgtttcttgttattttatttatttatttatttatttatttatttatttatttagtgtgtgtggagatttggtatcaccttgtttcccaggctgctcttgaactcttggcctcaagtgatcctcctccctcgacctcccaaagtgttggggattacaggcatgagccaccacacctggccttgttagtgttttcagatcaatgtctttttcactccctaaatacctccagctctgaaactcatgcatcagactgtaccacccagtgcacactattgttgtagt

SEQ ID NO: 14476 - DNA, 1036 bp, Homo sapiens
actccaattaaagacagatactgtgacatattaaaggtagtgaaaagtcaggactcaattatatatattgtctgtaagaagcatacttgagacaagacacagataagctgaaagtgaaacgtggaaatatataatatgtgagctataaatataagaaagttgctatggctatattaatatcagatgaagtaggcttaaaggcaaggagtattaccagagataaagagggacatatcaccagaaatacataacaattctaagtgaatatataaataatagcagatcatcaaagtacaagaagcaaaaactgagagaactaagggaagaaatacactatttggcaatcattattggaggtatcactgctgttctttctgtaattgacagacgatttgaacaaaattcattaccgttagagaaggcttgactttgcaatcacctgttgacaactatagaaatacagtcgtctcaagttcacatggaacaataaaaaagataagactatatgctggactttaaaataggtcacaataaatttgaagattgaatttataggcatatatgtctgtctacaagggagctgaatgagaaattaactagaaaagatatttagaataggaaattaagcaacaccttttaaataattcaaggatcaatgtaaagtagaaagggaaatttagaaaaaatataataactgaataatatacacagcttcatgctaatacatttagtaacccagtgtaaataaatttactaaaactatttagcttttccgtttcttgtgcaagttttgataaattgcattttcaaagaatttattcatctgggttaagatacatttgaaataaaaatattgataattgaatatttttaattttatggagatatgagacctcgactgttcagacaatcttaaaaaagaatgaaatggaagagttatgctatctgattttaagaccctaaaactataagggacagtcaagactgtagcttatccatacgcaaatcaatggaactgtatcgacagtagaaatag

SEQ ID NO: 14477 - DNA, 1027 bp, Homo sapiens
tttgatatatgatttacaaatattttctcccattccatgaattgtcttctcactctcttggttgtgtccttttatgcacaagttttttaattttgatatagtccaattttatctttagctgcttgcgcttttagtatcatattcaagaaatgattgacaaatccaatgtcatgaaattttttccctgtattttcttctaagagtttcagagttattaggtcttatgtttaggtctttgatccattttgagctaatatttgtatatggtataaggtaagggtccaaattcatggttttttttttttttttttgcatgtggatattcagttgtctttgaactacttgttgaaaagactatcctttcctcattaaacggttttggtacctttatcaaaaatgacttgtctatatatgcacaggtttacttttagaccccactattctgttttactggtctacatgtctgtctttatgccaatatcacactgttttaattactatagcttcgtaattttgaaatttggaagtgtgaaactttcatgttatcattctcttttattattatataattattattatattattattattatataatgccctctttgtctcttctaagttgcttttccagctatgtctattccactcataagcccaacaaaggcattctttatttctgttatagtgtttttgatctttggaatttctttttcgttctttcttaaaattcccgtctccctggttatattgcccatctgtcttccctgatgtctactttatctgttagagcccttagcatattaatcacaatcgttttaaatttctggtctgataattccagtatccctgccatttctgagtctggctctgatacttgctctgtatcttcagttgtgttttttgttttttccttttcatatgccttgcaattttatctttttaaaaatttttttatttttttattttgagacagagtttcactctgtcgcccaggctagagttcagtggcatgatcttagctcactgc

SEQ ID NO: 14478 - DNA, 1062 bp, Homo sapiens
ctagatgtgcagtaggctataccatctaggtttgtataagtacatgccatgtttgcacaacaacaaaatagcctaattatgcatttctcataatgtatctccattgttaagcaatgtattcctgtatcgtgagtattaaccaaaatgtgacacagacacacccaatgagcacatgctattggaaaaatggcatcaatggatttgcttgacacggggttgccacaaaccttcaatatgtagaaaacatatctgtaaaatgtaataaaatgaagctacagtatgcctatagctatttttttgttttatatttctaaaaagagcgttctgattttagcaagtatgctagccttagaatgtgaaattaaaaggtgagaaatatttgcttaggctgttttcattagtttaccatagacattgttaggaatgaaggaactgggttaaaaggtaataattctgtatatcagctagttccttttttatctttgttaagtatttccttgtgtcagacctaagtattacttaaaaaatatctgtatctctgtttgttcaaagttctaatattattttttaaattttttttataagtttagatggggtctcactgtgttgcccaagctggttttggatacctggcctcacgtgatccctcctgcctcaacctcccaaaatgctgggactataggcgtgagccaacatctctagcccaaagttctaattttaaaatatcattaactttttctgtagttctagctgtttgagttccttttgctattgtacatgtatacatacagtaaaaatttgttgacaactgatttatactgcttgaatttgaatcctgcttattagctacttgactttagaggagttatttattattctttccttttgatttttttctcttcaaaatggtataataatatctaactcataaggcacacatcaagattaaataatttaatacatatatttggaacagggcctggtgcacacttatttctcaccaagagttgattgactatcataaataatatgcatgttggctgggtggagtggctcatgcct

SEQ ID NO: 14479 - DNA, 1141 bp, Homo sapiens
tggttgctaagaccatgggaaaagcacagtatttgggccggaatgtcccatttttccaggtacagtctgttactgcttcccttggctaggaaagggaaatccccctgaccccttgcgcttcctgggtgaggtgacgccctgccctgctttggcttacccactgtgggctgcacccactgtctaaccaatcccaatgagatgaactgggtactttagttggaaatgcagaaatcaccagtcttctacgtggatcacacttggatctgcagactggagctgttcctatttggctgtcttggaacagaaaccaagaaatttttgcttagaccagcttagaccaatgtcctagagattttcccttatattttctgtagtagtttcataatctggagtcttagatttaagtctttcatccattttgatttgatttttgtatatggcaagggttagttgtctagttttattcttctgcatatggaaatccagttttcccagcaccatttattgaagagactgtcttttccccagtgtatgttcttggcacttttgttaaaaattagttcactgtaggtgtgtagatttgtttctgggttttctattctgttccattggtctatgtgtttttatgtcagaaccatactgttttgtttactctgtctctgtagtataatttaaagtgaagtaaagagattcctccagttttgttctttttgcttagggtaactttggttcttctgaatctcttctggttccatatacattttgggattgttttttctatttctgtgaagaatgtcattgttattttgatagagattgcattgaatctgtatattgctttgggtagcacctacatttttacaatattgactcttccaatccatgaacaaggactgtcttttcattttttggtgttctctttaatttctgtcatcagtgttttatagttttctttggttaaattaatctcttggtatttaatttcatctgtagctgtgataaatgggagtgttttctaaaatttctttttcagatttttcactgttgtcatatagaaatgctactgatttttgtatgttgattttgtatcctgcaaccttactgaatttatcaattctaacagtttttttgtgtgtatgtg

SEQ ID NO: 14480 - DNA, 1032 bp, Homo sapiens
tataatttgaagtcaagtaacataatatactgtaaaaagcctctagttttgttttgttttctgttttttggggttttttgcttaggattactttagttattcatactctcttttggtttcataaaaattttaggattgtttttcccaattctatgaaaaatgacgttggtgttttcatagggcctgctttgaatctgcagatttctttgggtagcatggtcattttaataatattaattcttctgatcaatgagcatgggatgtttttccatttgtttctgtcagctacagtatctttaatctgtgttttgtaattccccttgtagagatcttgaccacctaatatgctgggattgcaggtgtgagccaccatgccccaccactgtggatttttcatagatgaccttttgtaggttgaaaaagtttcattctctttctactttgttgtgtgtgtgtgtgtgtgtgtgtgtgtgtgtgtgtgtgtgtgtctattgtaaatggaattgcattctggaattggctgtcagctgaatgttattgttgtacagaaatgctactgattgttgtatattgattttgtatcctgacactttagcgaagttgtttattacttccaggagccttttcacagagtctttagggtattttaggtataaaatcatattgtcaacaaagagagatggtttgacttcttcttttcctattaaaatgtcttttgtttctttctcttgcctgattgctctgactaggacttccaggacaatgttgaataagaatgatgagtggacatccttgtgttgttccagttttcaaggggaatgattccaatttttgcccattcggtatgatgttggctggggtttgtcatagatggctcttattatcttgagttatgttcctttgatgcctagtttgttaaggttttttatcctgaagggatgttgaattttatcaagagcttattaaacctgcacatgtacccccgaatctaaaataaaagctgaaattataaaaataaataaataaataaaa

SEQ ID NO: 14481 - DNA, 1063 bp, Homo sapiens
ttttatacaagttgatgttaagatttgaaaaataggaaacaacattgctgaccatgctaaccatgtggtattctaaaattatggctcctatccttttgattgaatttgtcaaccgtgtgccaaatagaatgttctttggatcaagacaaaagaatctttaaaatacttaaccaagtacttaaaattgtaccatattttgggcttctttcttacttgagccatgactttcttgtaccgattttgtttatcctgccttaaatttctgattacatttatttatttatttatttatttatttacttaatttatttttttgagacagagtgtcactctgttgcccaggctggagtgcagtggtactgtctcagctcactgcaacctttgcctcctgggtttaagtgattctcctgcctcagcctttcgagtagctgagactacaggtgtgcaccaccacgcctggctaatttttgtatttttagtagagacagggtttcgccatactggccaggctggtctcgaactcctgacatcaactgatctgccagccttggtctcccaaagtgctgggattacaggcctgagccaccgtgcctggccacctttctttttttttggatcttgtgcatcattatttcagctcttcccatcctgtcactcttaatttctgttttatgaggtctccctttacgccagggcagtccatctccctgttgctgtctagacctgtgtgtggctctccagtttgctgcacagttttcatcctaggatttgtcttctcttctgcattggtttggctgtgtctcagattctgtatcttctatcttgctttatttcctcttcaagtaatttccaaacagaaattttctgaatatagaattcatattttaacattacatcctttcaaaacttttaagatgttattctttctcttttcttgcttctagtaactgatttcagaatgaatcaatctttgtagacgttttctcatggaagataatttttttaatctcaattttttttcatttttgtattctgaaatctcataaggaggtgtctaggaatg

SEQ ID NO: 14482 - DNA, 1038 bp, Homo sapiens
ggaaagaaattgaaagatgcaaaggagatttatgtgtaaaacagcataattagattgtgaggtgagagataaatattaaggatgatgtataggtttctgcatgaacaactgagtagatggtgatgcctaaggaaaggaggaagaagagaaagagccaatttgcagaggggtatgaaatgagatcatgagttcaattttagacattgaattaagatatttgaagaatggtcacgtggagatgtttatgaggtggttatgaggatctgttgcttaggatagaaatctgagctggagagaaatacctcagagtaaaaggtcattagttatatagatgatcaagtgaagccacctgatatggcttggatttgtgtccccgcccaaatctcatgttgaatcgtgatccccagtgttacgggaggggcctggcgggaggtgattggatcatggggacggatttcccccttgctgttctcgtaatagtgagttctcatgacacctgtttgttttaaagtatgtatcacctcctcttcctctctctctcctgctctgccatgtgaagatgtgcctgctttcccttcacctttcgtcatgcttgtaagttttctgaggcctccccagccatgcttcctgcacagcctgcagaactgtgagccaattaaaccccttttcttacaaattacccagtctcaggtagttctttatagtaacgtgataacagactaatacaccgtcagcgtgggttgcaatcaggagagagtaggtagaatgagaagacacaagttaaaggttgagtagaggacgagaagcccccaaagaagactgaagagcatcaaggaaagtaagcagaaaccagaagtgtattgtcatggaaatcagggaaaaaaggcatttctagaaagaattggtctcaggtcaaataagatacttgtaaagtgtcttttaatgcaaaagagagtaatagacactggcaactccaaaatgagggatgttgggaggtgggtgagggttgaaaatttacctattggttatagtgttcac

SEQ ID NO: 14483 - DNA, 1029 bp, Homo sapiens
tttattgagtttaagagaaatgttatcctcttaaaggaaaccaacttataagacttcgtaagatggtattcatagtctccttaaaaatctgaaatcattattattagcaaatgttttagaaagttctttgaaaatatgtcagtattccagggaatttaaaatttaaactaaaggaatttcttcacaatcaaatttttcttcacaacgaaatttcttaaataactgtccccttttcccttcacaatcaaatttcttgaataactgatctatattcaccatctctaatttttcaattcccatttactcctctgctactcagtacagtatggctagtttgtatactgaaattgttcttcttaagatcaccagtaattttctaactactaaattcaatggctcattttaaacgatatttttattgtacaatgaacatatgtttatggtgaaaataaataaagaccttcatgtatcttcagcaatatagcataatggtttaaaatctcaagctttgaattcagaatgtataggtatgtgaacctggatataaaacactatgctaatgtggacaataatgcttctatctcataacgttgccatgataatttgatgagctaatacatgtaatgcttttagaagaatatgtgttacgtaattcctccttctcttggcatttcactccacactgtactatctcattcctcagaaggtctctgccttttcaggactaaatgcctttgtgtatattggttcctctgctcacgtaatattattttaggattttttttaaggttagcaagcatccaatcacaaatgcagtcaacttttagaatatttatcctacttgaactctcatcatttagtactgttcatcattccttcctgaagccttttgttttcttagattctgtagcaccatttttttctacctttatgacttccctgactgttcctactccatttctttcggggattacatctcccagctatccgaacataatggttgcttaaagattttatttttcttgtacc

SEQ ID NO: 14484 - DNA, 1063 bp, Homo sapiens
ctcgctctctctagaattctctattactattggaactccattttaattattattaccaaattattttagactttgctctttgagaaataaagacaaactttccactttcatagttctgtcccatgactagcccaaacaattgttactttgactatttgatatcaggtgtaaaagaaaaaaatgtggcccaaaatcattttaagaaccataataattttctaagcttcatttcctgagtatccccttgtgtttgggatagtgggggttggtagtggaaacaatgtgtacataagtattgaattgggagtcatcatttttaggtcaaaaactagactgataatgcaatcaatgcttttgctgaaagttggcttttttgctgaaatgtatctaaacaaaacctaggtatctactctgcttaaacttacataaagctctaaatttagcaacattttagtactgatgaaaattctcaaatctcatgactatcacaagatattggagatacctgaacacggtggatgaagtaggtagtaagagggccttttaaaatgcattctttggtttctacttaatctcaaagatcttaatatgaagattaacaaagagaagaatgcttgattctaagtatgatatccatgtaaactttcaatgccaccttagctaggctaagatttttaacactatcctttgtcaaggaagacacttatatgtatgatataagtcatagttgatagttactttggctttctacatccctgctagtgtcaattttttttgcattttctgtagtataatgatagctgaaatctgactttattattgttgtaatgcccaattctaggtaaataaattatgcccacagccgaatcaatcacaacccattattaaatttgagttttctattaataagattacaaatgttttagtctcaaaattgtgtaaaacaagatcaatttttaagttcctatccatttaatagtgaatgtgttcaaaaaaatatgtatttttaataaggcaaaatgcatgataccaaacacagcattgttaggttggtagtattttg

SEQ ID NO: 14485 - DNA, 1039 bp, Homo sapiens
aacaggctaaactcaagacaagacacagaaaaaaaaacaagtaaaaaaatacctattaggaagattaaaaactggggagagaatctgtcagttccatgattctgaggagacaaaagttggagtgcaagtctcaccaaagaggagaaactcagcttttgattcacaacctggaaaatctacatcataagagtaaggacaaattataactagattagcctcaactataccaaggtgatcttctcaaactcttaaaaaaattaaaatctctgtagaaaacaacaatatcagccagaacccccactattttcatacacaatatttatcattcaactgaaagttatcaagcatggcagacaataaaactaaattaccaaaaaccaacacaaacaaaaaaacagaaaatagaaacaaatccacgtgtgattcagatattgcagttatcagacatggactttaaaatcattataatcattgtaatcaaatatgctcaaaagtggattttaaatggaaatttttaaaaaattaaacggaaatcttagaactgaaaaatataagaactaagttaataattcaatagatggttttagtggattagacctagcagaaaagtgaactcaagaactgaaaaggaaattcagaaactgaatttcctgaaaaggaattcaggaaccgaaagagaggccaatggaaaatatccaaattggagaagagaaagaaaaaaagatgaaaaatctataaaacattgtaaaagatacatagaacatagtaatagacttggtgtgtgtaattggggtcccaggacagaaggaaaatgggatagatagaatcaacatttgaagagatattgaccaagaattttctaaaactgatgaacaatatgctactgaaacatgagattctaaaaacctaaacacacacacacacacacacacacacacacacacacacacacacacccctaggcatatcatagtaaaacagctaaaaaaaaaacaaatacaaatagacaaaccttcaaaacaaccagagagacagctct

SEQ ID NO: 14486 - DNA, 1357 bp, Homo sapiens
ttagaaagatgattgtatttctgtaatttaaaaaaatcactcttttaaaaactagatcagcatctcatggaatacttccgggacagaagaaatatttgttcaaagttccattatatgaacgtcaaatacggtgtcccagtttacctttgtatttaaattttgaaaaattcgtccaagctaagggaggaattccagaaaatattgatcctcggacatgggctcttgataggctcattgagtacaaagatgcgagcatacctgtaaaagagaaagatgataaaatatcagttcctgaagacccacctgaaagagtgaaagaaccaccaaaactaaaattaaatgattatgtggagtctgatcttccacaagaggtcattaaatattatgaatctgaagtgaagattttgactgaagaaataaatgataagacaaaatatcctgcatttgcatattgtaggcgtggagctatttataggaaactgggaaagttgcagagtgccatgaatgatctgcagagagtaagttttctttaaccaaaatagtaatattcaccatttacacttgcttttaattgtatagtaatttttgctgaaattttgaacaatgaatgtttatagtatagcatgtggaattattataacagtataattatttgcattttcaagtaattaatattaaaaacatgatttttgtttgtcagattgggaggttttattttatgttacgtacatacaaagccactgggatcaaccgtgttttaaaaatttatttgataggatatcctcctttaacaaatcaactttaactgaatttttacatatattttctaggtaatactcttggaaccattgtttctcaatgcctattggcatcgacatttaatttatcttttccaagacaaaattaatgaagctttggatgacttgaattatatacataaatataataaaaataatacaggtgggttgtctgtagagacagttatattacctacattttgacctcagcctttgtcatttattggtactataaggatacataaatcagtagatatatgtcctgaaaatgactttcctcagttaaatttttttactcttgttattgtaaatccggggctcgtacaatcctatagtgtttttaaaataccatggtttgaaaggttattgtccttgatatatattgcagtaagttggttccttactgctcatctcacaacgaaagaatatgaatttaaaatagttagttatagaagtaatttacaaatcactctttgatttgtgtgatttgatcacatctctctgagttagagttattgtgcgcctaggattacttggttgtatgaaatctatatctttgc

SEQ ID NO: 14487 - DNA, 1034 bp, Homo sapiens
taggaagctcctggttaatcttcagcatttactctgccatatacatgttaaatttagcttgcccaaggtccattaaaaactctcttgagattttgaatcttgagattgttttagggagaattgacatctttatgatattgaattctttagtttatgatcagaatgatgtattgccccatttatttcactttttcttttgaatagattttacatatccattgctaaaagtttcctagttttccagttttttttcatagtttttgctactattataaagggtatctttaaaaaaatttgtttgctgatggtttatagaaatgaaactgattttggaatacttatctactggctgaccaccttgctgaacttgcttattatttcttaaaatgtttagttctgttcttttgggtttataactaggaaaatatgtcatctataaataataatagttttatttttttctttctttttatgtattctgtttcttattcttgtctaactgtgctggctagaaactccaagacaatactgactaaaactagtgacaaagacacccttattttcttccaaattttaaaggaagtttaccctactaagaatgaagtttgggattgatttttgtagataatttaaacaaaataaagattacataatctttctatttccattttgaattttatcaaataatttttcatcaggtattgaaattattatgtttttatcctttaatatgttaatgtagcagattatatgtcacatatgaaattaagtaatctatgacattatttagtgttagaccaaccatgcattcctgggttaaaccaacttgatcagaatatataatctttttgtagacattgctaaatttgagttgcttgtgaggatctttgtgtctatatttatgagtgagattggttttgtgggatttgagtattgatctcataggattatttggagagtatttcttcttttctatttagtgaatgagtttgtctaaagattgtaaggatgtcttctttgaaagattatttaat

SEQ ID NO: 14488 - DNA, 1054 bp, Homo sapiens
ggttcacgccattctcccgcctcagcctcctaagtagctgggactacaggcacccccaatcatgccctgctaattttttgtatttttagtagagacagggtttcaccatgttagccagaatggtctcaatctcctgacctcgtgatccgcctgcctcggcctcccaaagtgcagaatttttaaagcagtagcaatcactagcaatattgtggtttcaaaattttaatattagctagagcagtttgtgtaggcattcttttgtttggtcctcagaccacacatgtagcagggaggatggagtgatggttttcagctccagggaccagtgaccaggtttggcctatattttgaaggcctgtgggctgcagcaaacctttttttccatttgtcttgatccagcatctacctgtgcaaactcttgtttatattttgtaatcttacctactctcttctctcctgtcggtttggtcccttttcaatgaggattcctcactggggagcagctagtcttgcggtctttcagtgtagtgtcccatcctctttctctgttacttgtctcactctccttattcctgcccatgtccatagtaaatgacgcattcttttaaaaggctaggtcacattcccgctgttctgtgttcacacactctccattctgtgaaacgtggacagtgaaatctgtttaaaacatttagtaatttagaaatgtacaagctttagaagggaagttgagaaacattgtctctacctgagaggatgtaaaattcctggtaaccagattatcaggtttcctccagaaatgttgataaatgaatagctaatttttaacaaggggattgttaagatgctaggagctgattgaaagatcatttattagagtgacctacacaacaggggcctttgaggattccctccccaaccccattcctgccggaaaggtaaccctgaataggaaaacaatgggctgggcgaggagggaacacccattgtattgttatctcagatatgcgaaagagccagtgccctgttaattaagaaaatgcaaaactaccta

SEQ ID NO: 14489 - DNA, 1126 bp, Homo sapiens
aaaaaattagaaagatcatgttctgaggtgggaacagtgctaattattatatgattaatatataggtgctaattattccacattaatatatggagtttaaaattctattaaaaatcttaatgagttacattttttagaacttgacaacagaattcaaaagtctgcctagacgaataaattgatcagattgaaaaatgcttaaaagcttgaaaacactaaaaactaatgaggccgtggagtgatagaaaccctgcttataggaaggtaaatgtacaagcactttggagaacaactgggcaatacctactatgaagttgaagatgtatacatccgacagcccagcgagttactcaagagatctttccacatgtttatggagataggaacaagaatgttttacagcaaaagaaactacataaaaccttttatacaaggctatgggcaaataatttaaacaatacatttcattcatacaatggaatattataaagcagtgaaaatgaaggaactggagctacatatataaattgcacaaacattgaacagcaacaaaaaataggaaacaggatattttcatttacttataagaagttttttaaaaatgctaaacaagtgtatatattgtttagaaatatgtgtgtagtcagggtataaataaactcgagaaagataaatgtcaaggacagtgacaggatagtaagaagctcttttttactgggggaagtgatttgggaagtgtacacaaagacatcaactgtactgctaatgctgaggaatggaattctgattaacagaaaaaatagaaaatcttcagtctgattcatatcatctataaattttggcatgcaattaaatgtaggaaacagtaaaaagggatggaatttttgctaagtagtgttgggacaactggatagctatttgcaaaacacatagggaaaaaccattactttatcaccatataacaaaataaatttcaactggattaaagaaatttacatgccaaattcataagaacagtataaaaaactttgagaatatttatataatcttgagcacgctagattttaaaaacttgacaccaaatccagaaattaaaaaagataaaggtggattgatttgaccatgt

SEQ ID NO: 14490 - DNA, 1352 bp, Homo sapiens
cagaaaccctgtctctactaaaaatacaaaaattagccggacgtggtggtgcacgcatgtaatctcagctactcagggggctgaggcaggagaattgcttgaacccgggaggcggaggttgcagtgagccaagatcgcaccagtgcgctccagcctgggcaacagagtgagactctatctcaaaaaaaaaaaaaaaaaaaaaaaaaagcctcattggataagccgcctaatcaaactaattagagtcaaacaaattagctttctttgaaagtttaaagaatgaggccatttttaacatcagagttgctttctaaataaacttaatgaaactcatgttgaattcatgttttattattaatacaactcttctccaccccctctttttttttttaggcaacagtaactagtgtcttggaatatctgagtaattggtttggagaaagagactttactccagaattggtagtattgcatgtttttcttttcataatgtaggcaaaaattagacgttttgggtcaactgtgggccacatatacaatggtgctcctataggattataatactgtatttttactgcacattttctttttttcttttctttttttttttttttttttttttgagacaaggtctcgctctgttacccaggctggggtgcagtattacaatcatagctcactgcaaccttgatctccccagctcaagcaatcctcctgcctcaatctcctgagtagctgggactacaggcgcatgcagccacgcccagttttttttgttttttgttttttgttttttttattagagacaaggtctcactgtgttgtccaggctggtcttgaactgagtccaaatgatcctgcctcctcaccctcccaaaatgctgggaattacaggcatgagccaccatgtgtgcggccttttgtgttttttaaatagagacgaggtctcaccatgttccccaggctgatctcagactcctaggctcaagtgttcttcccaccttggcctcccaaactgtttggattacaagcatgagccactgagcccggctcctttccagtatttaaatatgtttagatctggccaggcacagtggctcatgcctgtaatcccaactactagggagggctgaggcaggaggatcacctaaggccagggaggttgaggctgcagtgagccatgattgtgccactgcactgcactctagcctgagtgacagagtgagaccctatcttaagaaataaatatatggtttttttggatgcacaaatgtttaccattatgttacagttgcctacagtattcagtatagtaatgtgctatataggtttgtagcctaggagcaattggc

SEQ ID NO: 14491 - DNA, 1035 bp, Homo sapiens
ttgaacattttaaatttcaggcgtggattctcagatagtggaggaggacccccagccaaacagagagaccttgaaggggcagtcagtaggtaggtttaaaaaaagattcctgaaggcttctttagtttctgaggtaccacacaaatataaatgtttattaacaataattctgtttcagcaatattaaaattgagtggtatgccactccctgccccccccaagttctgttggtatttgactgaacagttgactatcagttccctcaaaacgcagttctgcactcatgataacctaaattttatccaaataaaggtcatgtgaagagtaaaattggaaaaattgtcaattagtaccattttttctgacttgtacttgaaaaacttaaccagtttgaaatacttagaaaatacaggagagcaaaattggtttgggcgttagttcacacattgtagtatcctttctctgctggaggaaagaataaaatgggatggagacttgatagaacaaagcttctggaaacgagtcctagaagagagggcatttgcccttggtgtgcagttacataaatacctcagtggtcatttaaattaatttttggccaggcacagtggctcatccctgtaatcccagcactttgggaagccaagaccagcagatcacttgagcccaggagttggagaacagcctagatacatggtgaaatcccatccctacaaaaagtacaaaaaagttacccaggcatgctggctcacgcctgtagtcccagctgcttgggaggatgaggcaggaggatcacttgagcctgggaggtcgaggctgcagtgaaccgtggtggcaccactgcacttcagcctgggtggtatagtgaaaccctgtctcaaaaaaattaatattttctatgacaggctgggcggggagcgtcggaccagaagagaatcacgccaggaaagcgacccggaggatgatgatgttaaaaaggtattgagattgaaagaacttaaatgaatgtagtaccttcactttactacatttaaa

SEQ ID NO: 14492 - DNA, 2020 bp, Homo sapiens
agacactgctaagatgatgatttatctctttgggatcagaaaaattaatatatatgattttatgccaaaactggttctgttttacagaagttttatttttcatcagacataaagattgatctgttttcttcatcagttagaaaatgtgtagttctgtctgccacaatttctagtatgtagatttcccatggatctttgcttttataattttatgtcagtttgtggttacttaattgccataatcttttgtcataactttacaaaaacaaattcagatgaagcttaatgacaatttgtgaccagttataaaattatggctttgaattttcttaatcggtaaattttacacatgtaaatttttattctttagctttatttgaaggtagacgcatcgaatttgcagaacaaataaataaaatggaggctaggcctagaagacaatcaatgaaggaaaaagagcatcaggtggtgcgtaatgaagaacagaaggcggaacaagaagagggtaaggtggctcagcgagaggaagagttggaggagacaggtaatcagcacaatgatgtagaaatagaggaagcaggagaggaagaggaaaaggaaatagcgattgttcatagtgatgcagagaaagaacaggaggaggaagaacaaaaacaggaaatggaggttaagatggaggaggaaactgaggtaagggaaagtgagaagcagcaggatagtcagcctgaagaagttatggatgtgctagagatggttgagaatgtcaaacatgtaattgctgaccaggaggtaatggaaactaatcgagttgaaagtgtagaaccttcagaaaatgaagctagcaaagaattggaaccagaaatggaatttgaaattgagccagataaagaatgtaaaaccctttctcctgggaaagagaatgtcagtgctttagacatggaaaaggagtctgaggaaaaagaagaaaaagaatctgagccccaacctgagcctgtggctcaacctcagcctcagtctcagccccagcttcagcttcaatcccagtcccaaccagtactccagtcccagcctccctctcagcctgaggatttgtcattagctgttttacagccaacaccccaagttactcaggagcaagggcatttactacctgagaggaaggattttcctgtagagtctgtaaaactcactgaggtaccagtagagccagtcttgacagtacatccagagagcaagagcaaaaccaaaactaggagcagaagtagaggtcgagctagaaataaaacaagcaagagtagaagtcgaagcagtagcagtagcagttctagtagcagttcaaccagtagcagcagtggaagtagttccagcagtggaagtagtagcagtcgcagtagttccagtagcagctccagtacaagtggcagcagcagcagagatagtagcagtagcactagtagtagtagtgagagtagaagtcggagtaggggccggggacataatagagatagaaagcacagaaggagcgtggatcggaagagaagggatacttcaggactagaaagaagtcacaaatcttcaaaaggtggtagtagtagagatacaaaaggatcaaaggataagaattcccggtccgacagaaagaggtctatatcagagagtagtcgatcaggcaaaagatcttcaagaagtgaaagagaccgaaaatcagacaggaaagacaaaaggcgttaatggaagaagccaggctttcttagccattctttgcagcagaagatttcttgataaaaaaggattacctttccttgtaaagaggatgctgccttaagaattgcatgttgtaaaaaatctttttggaaaatacagactgtttgtttaccagacattcttgtactttttgcataattttgtaagagttatttatcaaaattatgtgaggttccaaaatatgtaaaaatgataataataaaaaaagattaacatcccttgtcatcttttttaaatatcctatactcttcagtaa

SEQ ID NO: 14493 - DNA, 1001 bp, Homo sapiens
tttttatacagacttttggccagtcctccttttttccagtcctgcttatacccctggtatttgtgccttcaaatcatgaggctttctagggtatatcaaatcagcctacttttgggtgttcctaccttcaggcttagatttaagttctctctagttggttgagtctttttatcacacttccatttctttccattttctacttctacaattattttttgtctcatctcctattttcttttttccttgtgggtttatgcctttgaaaaaaaaatctgttttctgccattttaatagatttgagtagaaagtggtggtaaaccctgtgttaaatttgccatgttatgatcaaaagtggccttttccaccttggaaaatatttcacctagatcagtcttactctttacaactgttttcatctaactcccttgtaataatccaaattcttgaaacaaactgtattcactgatgccatgttctaatgcactccttctctaatgttttaatactgtatactgtgtacttaagtctctttactaactcatgagagatgacctaatcaccaaatgtgaattttttcttggattctcatttgtttttacctgtatcatctgattctgttttatatatatatatatatatatatatatataaagattagtttttcatgtgttcggaatacgctaatgaagccttagttttgcggagaaatccaataattactgtttggtagaacagagttttttttttttttttttttttttgtgagcaacatggctgtttatttcacctgggtgcgcaggcgggctgagtccgaaaagagtcagccagaacagagttttaaagactaaataaatttagactttttcatatatatgagccatttcttttgtgaattgcctgctcagtcttcttttttctttgcctattttttcttattgacatctaagagctctttgcttgctaaggttattaaccttttgctacaaatattatgagaattc

SEQ ID NO: 14494 - DNA, 1049 bp, Homo sapiens
ctgacatgaacgctccatctctgctcagtgaggacctgggcagccacactttgaatcttggtcttcctttttatctaaaagggtgaagtagatccccagctttctcagttctcccaccaggtcctcattctggcacatctgcagaagaatgttacagcccctgacaaactctccattgaggtatgcttgtgggatggtgggccggttggaatagtcttaatgccctgtcggagcttgaggtcacccatcactttgtaggccagattgtcatggagactgcgcagttgtaggatatgcaccaccgtgttgctgaagccgcattggggctgctccggcatcctcttgaggaagtccagcaccttgtccttcaccagcgcctctctgctgcccgagtctgtcgcacgtgctgcatgcccagcacagcagagccaccacttcgctgctcatccccacacatttgctggagcccacaatggcccaggccctcgagcattattttgaactgaaatacagtagacttgaaaatttcaagaaagactacttctggattctatttggataacttttcccgttgctttgatcttacagtcttttaaatagaaaactaacacgtggtccttgaagaaaagttggaaaacggtcagatagaagaaaaatcaataatccaaggccatcaccaaagcagaattgcattttgcatttacatatttccttcaaacttttattcaagtatcttttgaattgttgtaattatgtgtgtctggaattttacttttttttcctgaaacttaatcctctaacgtaaatcatttttatgttacgtagtcatttgtaaacttcacttttagtgtttgtaaatggtccattttgtgaatatagtttacttgactattcttttcttggtgagcacttacgctgttttcattttttaaaaggatttttaaatatatatgatgatgtaatattaaatatctttatttattcacttttgttttctggatttaggataagtttaggaatgtattcccagaattggggccagaatttgg

SEQ ID NO: 14495 - DNA, 1025 bp, Homo sapiens
atgtgtcttatttaggaaagtgtctattcatgtcttgcccattgtttaatggggttatttgtttttcgcttgttcagtggtttaagctcttttagattctggatattagacctttgtttgtggtgtagtttgcaaatattttctcccattttgtaggttgtctatttactctgttgatagtttcttttgctgggcagaaggtctttagtttaactaggtcccactcgtcaaattttgtttttgttgcaattgcttttgataatttaggcataaattatttcccaaggctgatgtccagaatggtgtttcctaggttttcttctaggattcttgtagtttgaggtcttacattgaaatctttcatccatcttgagttaatctttttatatggtgaaaggtaggggtccagtttaattcttttgcatatggctagctagctaccccagcaccatttattgaataaggagccgtttctccattgcttatttttgtcaactttgtcaaggattagaaggctgtaggagtgtggctttgtttctgggttctctattctgttcattggtctatgctgtctgtttttatatcactactatgttgttttggttactatagccttatagtacagtttgaaatcaggtaatgtgatgcctctggctctgttctttttgcttaggattgctttcactattcagactctttttttggttccatatgaattttggaatagttttttccaattctgtgaaaaatgacattggtagtttgttaagaatagtgttgaatctgtacattgctttgggcaatatggccagtttaacaatattgatttttccagtccctgtgcattgaatgtttttccatttgtttgtgtcatttataattttttttcagcagtgttttgtagtcctttttgtagagatctttcacctccttagttatatatatccctaggtttgtgtgtgtgtgtgtggctattgtaaatgggatcatgttcttgatttggttctcagcttcaacattattgg

SEQ ID NO: 14496 - DNA, 1050 bp, Homo sapiens
cagcagttcttgggaccagttatagcagcttctgtcaaagtgctggcggacaacaagttggtgatcaaacaagaatacatgaaaatcttcctcaagctaatgaaggaagtaggacctcagcaggtgctttgtttactcctggaacatctcaaacataagcattccagagtgagagaggaggtggtgaacatttgcatctgctccctgctgacctatcctagtgaggattttgacttgcccaaactgtcctttgatcttgccccagctcttgtagatagcaaacgcagggtacgccaagcagctttagaagcttttgccgtattggcatcatcaatgggctcaggtaaaaccagcatcctttttaaagctgtggatacagttgaactgcaagataatggagatggagtgatgaatgctgtgcaggccagattggctaggaaaaccttaccaaggctcacagagcagggatttgtggaatatgcagtactgatgccatcttctgccgggggtaggtcaaaccatttggcacatggagcagatacggactggcttttggctggtaacagaactcagagtgcacactgtcactgtggtgaccacgtgagggatagcatgcacatttatggatcttacagcccaactatctgtacccgaagggtattaagtgcaggaaaaggaaaaaataaattaccatgggaaaatgagcaacctggaatcatgggagaaaaccagacctccacttccaaggatatagagcaggtatgcttctctaattttcttgagtcgaaagtgtgaagaatttaaatgaaaatatgcccgtgatgacttaagggtcagcctgcttgagggaaacatgttatgctttgttttaaattgattttaaatccatctgaatgttggtactcattataatggtacagatcacaaaggaccatttaataggcttcctgcttgatagatttaattaaatttgagacacatgtgatatagacaataccaagattcagttttagttactgtagcatgtcagtttatctcattcatacaaca

SEQ ID NO: 14497 - DNA, 1398 bp, Homo sapiens
gagtcagaaagtattctccctgcttctatattctgaaggtaattgcagagaattggtataattttttctttaaatgttcagtggaatccaccagtaaacccatctgactctggtgctttctgttttggaaggttattaattattcagtttctttacagatacaggcctagtcagattatccatatcttcttgtgtgtgtttttacacattgtgtctttcaaggaattgatccattttatctaggttacccaatttataagcatagagttgttaatagtattcctttattatccttttaatgtttatgtgatttgtagtgatagtctgtctttcatttctgatattagtaatttgtttctctgtttttcttagcctgaccagaagcttatcaattttattgatcttttccaagaacccgagtttgtttttgttgattttctgttgatttccttttttcagtttcactgatttctatgcaaattttttattttttatttttctcctgctcactttggatttaatttgctcttcctttgttagtttcctaggatgtgcacttagatgatcgattttagatctttcttcttttctaatatatgccttcagtgccataaatttcctctaggcaccgctttcactgcataccgcaaatcttgatacattgtattttcatttatttcaaaatatttaaaaatttcacttgagatttctttgacttgtatgtaacttagaagtgtatttagtctacaagtatgttggggttttccatctgtattctgttctcacattgctgtaaagaactgagacaaggtaatttataaagaaaagagacttcattgactcatagttcctcatggctgggtagacctcggaaatttacaattatggcagaaagtgaagaggaaggagtcacgtcttacatggccggagaaggaggaagagagggcaggaggagatgctacacacttttaaacaaccagatctcttgataactcactattatgagaacaggaaaggggatatccaaccccatgatccagtcatcccccagcaacccctctttcaacattgaggattacaatttgaaatgagatttgggacaggatacaaacccaaaccatatcaccatcttaatttggcctgagagcaaatattgtatgatttctattcttttaaatttgttaaagtgtgtgtgtgttttttttttgcgatagaacgtggtatttctttgttagtgttccatgtgaatttaagaagaatgtgcagtctgttgttggataaagtaatctatagatgtcaattacatctagttgattatgatgttgttgagttcaactgtgtctttactgatttttctgcctgctggatctgtccatttctgattgaggggtaattaag

SEQ ID NO: 14498 - DNA, 1021 bp, Homo sapiens
atgtaaccaaaactatctttttttttttctgagatggagtctcgctctgtcacccaggctggagtgcagtggcgcaatcttggctcactgcaacctctgcctcccaggttcaagtgattctcctgcctcagcctcctgagtagctggaattacaggggtggaccaccacgcctggctaatttttgtatttttagtagagacgaggtttcacaatgtgggtcaagttagtctcgaactcctgactttgtgaaccgcccgtctcggcctcccaaagtgctgggattaacaggcgtgagccattgtgcctggctttcagatcctttttaagcggcaaaaataagcatgtgtgttaacatcatcccaaagcatatatgtatcctttaactcagcagtccccaatccttttggaatcagggaccagtttcatggaagataatttttccatagactagggggtgggggatggtttcaggatgaacctgttccacctcaaatcatcagacgttagattcttagaaggagtgtgcaacctagattccttgcatatgcagttcacaatagggtttgtgctcctatgagaatctaataccaccgctgatctgacaggaggcagagctcaggcaataatcccagtgatggggagctactgtaaatacatttgaagctttgctcccttgcccgccgctcacctcctgctgtgtggctgggttcctaacaggccaggaccagtagcagtccatggcccaggagttgggaaactctgctttaacctattcattggttattctatgatgtataaatataagacacaagagtaaattataaaaacaagtttgatgatcagtgatttgcatttttatcttaattagaaattgttcaggatctaaagagttttcattaattcaattttagtccaaaatcttaaagttagctaagggtctgaaaattacaatagaagctgatatattaagcattataagatttatggcattataagaattgacctatttttataaaggta

SEQ ID NO: 14499 - DNA, 1067 bp, Homo sapiens
aactgttaatagtagttaaattcatgtgtatcttgtgttaagaatttttgtgaactaacctgtaagtctttagttttataacatcacttctcagaaaatagatttagtaattagtagtcaattagaaaaagatttgcactatgatctatttagggtgagaactgcatgtgattcttcattatgattagtaaaactacgttgaattgtgaataaactgtaacaaattggtatatgatgtttagtttcacatgatctaatgtaaaagtcctaacaactttaagctgctttatattataatcaccttcctaaaaaactgtatatgtatttgattatttgctaagattttaaatttcttgctcttaaatgtgtcttaatctcaacccctctttgtaatccccactaccatggctttagttcacacttttcctcatttattacctacttagccgcctaaattttctccctgcttcaatctcacttactttgaaactgttccccacagtgcaaatctgactatactggccagcctgaattcattctggacatgctttcatgatctggtcccagcctacctctccagcctcatttttcactgccctctttgtatcttgtactttccctgtttgtatccagttaaatcagaccaccatcagtaccatttcctatctctttgcaaatgcacatactgttttttctggatgaaatctagaatccataccacaccctatttagctgtgaaaagagctcagttgctttctctgggaagccttccttaattcacaaacaagattattacctcttttgttataccattacatcttgcactgacaccttttataatgatactacaattgctttacttttctttaactctcagattcttgatccccaaagattatttcccactgattacctatcaaggcttatcataatcgggaatgtgtgacttaaccaggtgtgtttagtatactgccttgcataaaactagtgttaacaaagagatagctgcacttctaggcatacaaagacagtatataagtgctttggagtccaaaagatgagctgac

SEQ ID NO: 14500 - DNA, 1045 bp, Homo sapiens
tgttgtcaccttaaaagaaatctcatacttattagcagtcatgccccatttctcaacaatcttcccttccccagccctaggcagtttgtcttctgtttctatggatttgtttattctggacatttcatataaaggaaatcatatgatatgtggtcttttgtgactggcttcttatacttacgtttatattaaggcttatccattttttttaatcaaaatatcaagggctcttccatgttatagcatttatcaatacttcattcctttttatgggcaaatactattccattcatccgtatatggatatagcacacattgtttatctattcatcagtttggttttgttgtggacatatgttttcagttctcttggatgtgtaggagtggaattgctggatcatatgataactctatgtttaatcttttgaagaaccagcagaaagtttttccaaagtgccaccattttacatctcaccagtagtgtaaaagggttcaattttttcacatcctcaccaatacttgtgattatttcagtggctataaactagtatctcatttgacaaagttttttttttttttttttttttggagacagagtctcgcactgtcgcccaaggtggagtacagtggcgtgatctcactgcaacctctgcctcccaggttcaagcagttctcctgcctcagcctcctgagtagctgggactataggcgcgtgccaccatgcccagctaatttttgtatttttagtagagacagggtttcacgatgttggccaggatggtctccatctcttgaccttgtgatccacccacctcggcctcccaaagtgctgggattacaggcgtgagccactggcttctcgcccgacaaagattcttctggaccaaactgtagacttgcttctctaagccctattttcaattcggccttgaccttgggccctgtccttgacctgcctaacccagtcttagcaaggtatcctgctagctcatctctccttcctttgatatgttatcacccttgatatctgatcaagttcctcacc

SEQ ID NO: 14501 - DNA, 1025 bp, Homo sapiens
gttgcctgggctggtctggaactcatgggtgatcggcctacttggcctcccaaagtgctgagattacagacaggagccactatgcctggcccgttttatttctttcttttgatagctattctgtaccctttcccattttatgttgctagttgaaaattattggttgttgttaagaataaactgataataattgacatataaataatatgttggagtaactcattaaaaaataactttagtgtattcttttgactctgtgatttgtgaagtaatcatcaaaatgatctctataagcataaggttgatgttcttaaatctttttacaacactgtgattgcagggtgtggagtaattgacaggctctgaagatgcaggggtgtggtaaatttgctgattccagaagaaacccttatgtctcacctaagtgtgaaattagaatagggtagctagttaatgactcagaatgtatcagcctacagtcttttttgtattttgtttttagactgagctctgaaatacaaaaccacaaactagtgactaatttgcatttggaaaattaatcttcaaacgtatctttttctttaaaggaagagggaaaaagaacaaaataaatttacaagttactttgccttttcctagggcctgaagtgattaaacttggaaaagttgatgacattaatcatacattgaactagaagggaacttattttttctggtagtctactactttggactctcttttattatgcattggctagatttgctttttctgtaattttttctcaaattcttttgtccataatatggctccatgctactttgcttttacccttctacttctcaataccaacctcttcattctggtcattctgtgtctctcttatcttttcagtcatcatttctaccttcttgtctgctgtcaaggagagttgtttaatgggttgttccacattctagaatagtttaccattctttttctattattccataatttttcaaagttaattatatttcatgttttcatc

SEQ ID NO: 14502 - DNA, 1030 bp, Homo sapiens
tgattatttccatagtataaaatatgtacagttgctatttggtacactcattattttgatttatgtctttattagtaaagatataggtcttttttatgtttattggtcatttgcatttcttcctttgcattattgtctttaaagttttagtcatctttttaattaactactattaatatattaagtagtagtatattctaagtatattttaagagtaaatcagttttatggtctgcttaattttgagaataattcctcattttaaaaaaaatgagacatgccctataatttaatgatttggtttccatttaagctgttagtggaagagatgaaggtaattatgaaaatataatgtggtattaccttaaaggggtaattgcttattaccttatagccttaaaaattagatgacataattttaagtatattatgtagttattatccagactgtaagcctttctcaaatatgttttttagaggtagggtcgtgctctgttgcccaggctggagtatcgtagcagggtcaatgcttacagcagccttgaacttctgggctcaggtgatcctcctgccacagcatctcctgagtagctgggactgcagctgtgtgccaccatgcctggccccttaaatgtgttttaagtaacatttattcactttaaaaattactgtttaattttttaaagccataatttatatcttatataataaagttgaaacctagctgtcaggatttataaatcgtaagtatatagatatatttaagcaatatgattttatcttttctaaaactttatcctgagccaagtgatgagcttccttttgaaatgtttatacccatgaccagaatttttgtcagttttacttttagcctccagaacagttgttaaagatatgccgttttccagtgattgatagcaaggtaacattcaggcaccgaatcagattcttacctaaataagaaacattgaattttaaatagtatttcttcattgggtagcaggcagtgtacttatttgttgtttgaatg

SEQ ID NO: 14503 - DNA, 1049 bp, Homo sapiens
ggatttttaacatcttccatcagattattattatttttttttttgagacagagtctccctctctcccccagggtggagtgcagtggctcgatctcggctcactgcaagctccacctcctgggttcacgccattcttctgcaccagcctcctgagtagctgggactacaggcacctgccaccacgcctgactaattttttgtatttttagtagagacagggtttcaccgtgttagccaggatgatctgcatctcctgacctcgtgatccgcccgtcttggcctcccaaagtgctgggattacaggcgtgagccaccacgcccggcccagattcttaatatccaagaatctttcttgttctctgagtgttcctttttttatactctccaattcttgtttcatggctgcatatctttttgttatttctttgatgatactaaggatagttgagattttcctctgttcccaggacggtttcctctcaaatttttctgtttacccattttcatctctgagatatgtgatctctggatttttgttcctattacagattagatattaacaagctatatgagccaggcacagtggatcacttgaggtcaggagttcgagaccagtctggccaacatggtgaaaccctgtctctacttaaaatacaaaaaaattagctgggcatgctggcaggagtctgtaatcccagcttctcaggaggctgaggtaggagaattgcttgaacctggaaggcagaagttgcagttagctgagatcgtgacattgcactccagcctgggtgacagagcgagaccctgtctcaaaaacaaacaaacaaacaaacaaacaaacaaaacaaaacacaagcatatggaagcactgtgtgttttgtatggggcattgtcagttggcctatggtgtttcacagtagtgtaatcatgtggccactctttttgctggtggattcccagtgatagtaaccttatatcttattcctgagccaagcagtttgtttagaaaaggataattttatttacttggggaatggacacctagcttc

SEQ ID NO: 14504 - DNA, 1033 bp, Homo sapiens
atgcttgcttttgacattttttcatatgccttatgaaatgtttagaaattttactgtttttagatagaagtttctccttattcattttaatggataaagagaaacaggaattctgtcttgtctaaggtagttcagagtaatgaaggaatgagaaaatagtacctaagttgagttatttatttatggcattaaattgacacagtgcctggcacatgatagatgcttattttttttgaaacttaatgatttgctaaatatacattattgtgattgctataacaccttatatccaaaacagtgaaggatgcattttatatagtaagtagtatctattttcaaacactcaggtatcattccattttaattttctaaaatgatttttctgttacaattggtatccttttattttaatgattactgttaaaacaactaattctgtgtcattatttttgtgttctgttttctgctttattcagagtatcccataaataaggatccagaaagtctttctgaacgagtatgaggactgtgtctttgcttttaaattggcatgttttctattttttgttataatttttatgagtagtattgtataaacttagtattttctattttttgttataatttttatgagtagtattgtataaacttaggtactttttaagtgagtgattttctaaattttttttttagtaccaaaagtagaagacttttatgaagcatttgtaaagtactaaggatcaatgtgctaaaggtagaagttatacagactcaggttagaaataggaagcatatagataggaatattctctctgctcttgatgaaatagaggaagcaggcaggtttctaaggtataacgacctaggaagacacttgctgaaagatgttaacacaagtaagaattggcatatggaaatgcttggtaaatagttaccaaacacataagtacaaaagtacttaaattacctgatgggccaaagagggtgtcttttcatagactagttcttctgtgatttaaagtataggaaaaat

SEQ ID NO: 14505 - DNA, 1023 bp, Homo sapiens
aaatgcatatatacttacaatagatattagtgggattatattacacatactgatctataatctgatatttttcacttaatgcatttagaaccactttccttatcagttatagtgaactcacaagtaatctttatgcagttcttatagtttatataagttaattcacatgactaactgctttgagaaccactgaatgttttgttttttttttccataacacatgcctctttcttaaagtcatttatttagcatttgctgtgtacctgttgataggctatttaagttgtaggaatgaaggcccaaagaagccatgtgtaaatagcgttgcctgtgagttggtcagaaggatagaggaggaggcgtgtgttaaaaaagatattctaagtggtatacagtaataatggaaatatttttattgtgcttgtgcattaggcttgtaccattggatgtaccctgcacattatctctgagataatgtctaatttaaatccttctttagcatgaggactttgtgatctggtctaacatccaggtccaatccctggtggttcctgagctctagacacacctaagtctgataacttcccaaagggcagtgttgttttatatctttatgactgtaataccttttcctctttccacttgtctagtggacttatattccctgagaccacacagttttgtgtcttctctgtgaaattttctctggttctcctatactgagatacctagtctgttatttgtgccatgactttacctacatttatttacatttatattagcaccagtaacactgctttgaatttatgtctcttatatcctcaacatgcctgtcagtttctgaggcttaattctttgtatctctaatatttaggaatagagctcaatatatattaggcagtcagccagtctttactgaataaatgttagctttataatacaaaaaactgctgaaaaaatactgcttaatattatgcacattttgtcactgttttaaagaagttgttacatgatgtagcaata

SEQ ID NO: 14506 - DNA, 1050 bp, Homo sapiens
agaatatggaatcatttcacagatatatgtatatacattgtagtcatcacagcaatcaagatacagaactcttttagcactccaaaggtccccttggcccctttccagccagagttcccctctccactcctagcactaggcagccattgatctgctttctgtcactatggttgttcaattttaaaatattcaacaaagtataaaatgttctgtacattaaaaagcatgtaattggcaaaatggcagaatagagagaaaatgtattatttcatttgtttgtaaagcttaaggaatttaagggttaattttaaaagttttttaaattatgaaatatgattaaaaattttaatcatcaattatatttaaaattatttgtattaacactgtacatgtgcatattttggtgatattggtttactttcattggcatgttacaatttcatttcagattaaaagaccttactttcatgtgaaacctttggaaaaggcacaactaaaaaactggaaagaatacttagaatttgaaattgaaaatgggactcatgaacgagttgtggttctctttgaaagatgtgtcatatcatgtgccctctatgaggagttttggattaaggtaagaaaatcatgtgctcttaaacttgaatatattataaacattgatctagtgactaaccttttttgtacttctgttgaatgttgttcatataactatatctgttgcattaggagatggtctgcttgcaaccagatttgactgctgcatatgccaacctcgttgcctctcttcgtccttccttacagaaactagtctagtggttcaataaaggtgctgaatgggtttaaaaatagaattttatcgttctgtcacaaatttaatggcttgttcaactgtaaattattcagtatttcctcttttctgtatgtagtatgccaagtacatggaaaaccatagcattgaaggagtgaggcatgtcttcagcagagcttgtactatacatctcccaaagaaacccatggtgcatatgctttgggcagcttttgaggaacagc

SEQ ID NO: 14507 - DNA, 1061 bp, Homo sapiens
tccagtggtggttcttggcttgcaacaattattgttgtggtatttgcctaatcattctttctctcttttatatgcattaatttgaattcttctgcaataaagattttttttccttctgtgggccacagtccaatactattttatcaattttattaagattgttccagctttgtctgttaggagctccttcaagctcctgtgtcctttagacatgcactttttttttttttttttaaacagggtctcactgagtcctccaggctggagggcagtgcacaataatactcactgcagctaaatttcccaggctcaggtggttctcccacgtcagcctcctgaggagctgggactacaggtgcctgccaccacacccagcaaatttttgtatcttttgtagagacagggtctcccattgttgcccaggctggtctagaactactggtctcaaactcctgggctcaagtgatccacctgtctcagcctctcaaagtgctgggattattggcatgagccaccataccttgccactctttcttttgatgcttctgtaactttctgacatcataagatacattatgctcctttagtattttttcggcccagccatggaatcaacagtatgtctgggaaattctggtttcctttattgaagaatggtaaaaatgcagattttgagacctgtcctataatattctgattttagtagctctgaacggtcttccatattgagtaaggatttttttttttttttttttttgagacagagtctcgctttgtcacccaggctggagtgcagtggcgcgatctcggctcactgcaacctctgcctcccgggttcaagccattctcctgcctcagcctcctaagcagctgggattacaggtgcccaccaccatgctcagctaatttttgtatttttagtggagacggggtttcaccatgttggtcaggctggtctcgaacccctgacctcgtgatctacccacctcagcctcccaaagtgctgggattacaggcgtgagccaccacgcccggcttgagtaaggattttattggataca

SEQ ID NO: 14508 - DNA, 1033 bp, Homo sapiens
aaaaaaattcaagacaacagaagctccattttctaagtatttaagtggatcggggtttaattttatgtttacaataaatccaaactaataattgcttgttatggataaattgttatttataaaagtaatataatctgacattttctatttgtttttacagatttataatcagagtcagtccaacaaaagaagtatatataaagctatttcaagtaacaggcaggtccttcatttttaccaaagaagtccacgaatggttcctgatggaatcaacccaaaattacacaaaatgttcatcacacatggtgtctatgaaccagagaagccttctcggaacttgcagcgaaagtcatctatcttttcctatagggatggtaaataaattttgcatttgacacatgcatttttcccctgttcttacttagcaggtcgtatcttgatataatatttcttgtttgaaaaactgaatatatgttctaattaatatattataggcattctctttggaaaggctgtacgagattattcatgtggcaaatggagagacactggtagtatagagtgacagaaactcagtgttggggaaaattaaacataccctaccaacccagagaatgttctccataaagtttagaaaagaaagaaaacagttttattttttaataagcattaaaccagattacaatgtgcgctgaagataatgtactaagataataccaagacagaaagaaattccctatatgtatccccaagcacttagaatcctttacatacatgttgtcaatattaatagtaacttgtcctcatgtaagagggcaccatttgctatacattccttcatagtttatcccatatttacctggtaattgaggtagccatttgtgttagctggttacctttctcaaatatcttgagatatttgcactatgaaagtgagaaaaaatgtttattttttggattttacttaatctctgaagtgggttttaaacaatcataaaaatcatataactaacatttggaaggaaccttggga

SEQ ID NO: 14509 - DNA, 1059 bp, Homo sapiens
atgcatattttacaaagattttctcctaccctgtgggttgtctgtttactctgctgtgcaaaagcatttagtttaatttagccccatctatctttgtttttgttgcatttgcttttgggttcttggtcatgaactctttgcctaagccaatgtctagaagagttttttcaatgtgacagaatttttatggtttcaggtcttagaggtagggcttcgatccatcttgagttgatttttgtataaggtgagggatgaggatccagtttcattcttctgcatgtggcttgccagttatcccagtatcatttggttgaatatggtgtcctttccccactttatgtttttgtttgctttgttgaagatcagttggctgtaaacataaattatgctttcataagcatccttgtaaaccaaaacaaaaaataaaatttttgttttgaaattatatttaaaactttaaatttgatgttattgtttattttgtttattattaacaaattctttgttaactttgtgaaagtcaagagaactgatcaaaggttgtagatgtgcctggagagctgggaaaacaacctcagaaaagatttcttttaaaatatttaactgtttgctcttaacatggaactatataaacaggaatattgtcaacttgtaagtcatataacagttacttaacaaatatattttaaagggcatctttctgctttatgaaattattttctttttttcttctgagattttagttgggagtatctaaatggatccaaattatgttaagctgattatatgtatattgagtgttttttaaaattagtttgtgaaatctcagtatgttttcatcatttttattactttttaaataattaaggctcaagaatcaaccactggaattcatcaactctctctctctgaatggagactgtggcaagatcatcctttgcctacacatcaagttgatcactcagatcgatgccgccattttataggccttatgcaaatgatagagggaatgagacacgaagaggtggggttttattgtaactttctcttgctggtatg

SEQ ID NO: 14510 - DNA, 1025 bp, Homo sapiens
gaagaatgtgctgaaattgttaaacaaactcatatcaaacctactaaaattgtttctttaaagaaaaaagtgtctaaagaaataaaaaaagatcagcttaaaaaagaaaataatcacggtattatagattctgtagataatgacagaaattccactgttgaaaatatttttcaagaagacctaccaaatgataaaaggacatcagatacagatgaaattgctgccacatgtactattaatgaaaatgttattaaagaaccgtgtgtgttattaacagagtgtcagtttacaaataaatccactagttcacttgctggaaatgttttagattctggttataacagtttcaatgatgaaaaatctgtttcatctaacttatttcttccattcgaagaagagctttatattgttagaacagatgaccaattttataattgtcactcattgacaaaagaggtactagctaatgtagagagatttttatcttattctcctccgcctctcagtggactctcagacttggaatatgaaattgctaagggtactgcacttgagaatttgcttttcttaccctgtgcagagcatttacgaagtgataaatgcacctgtttgctgtcacattcagctgtgaattctcaacagaatttagaattgaattcacttaaatgtataaattatccatctgaaaaaagttgcctttatgatatacctaatgataatatttctgatgagccaagtctctgtgactgtgatgtacataaacataatcaaaatgaaaatttagtacctaacaatcgtgttcaaatacacagaagccctgcacagaatttagttggagagaacaatcatgatgttgataacagtgacctcccagtattgtccactgatcaagatgaaagtttgctgttatttgaagatgttaatacagagttcgacgatgtgagtctttcacccttgaacagtaaaagcgaatctttacctgtgtcagacaaaactgctattagtgaaacgcctctggtctctca

SEQ ID NO: 14511 - DNA, 1083 bp, Homo sapiens
tcacaccttgctcttgttatattggcttctttttacaagcggcaagtagttggacccctattgctggttacaatttttggtggcccatacagggagccctgtgtattcacaggaggctccagacacacctatctgatcttctgttggatagggccatggagccacctgtgagtgccagctgctcatggctagctgaccctgtagtaagaacattaggggagcttccagcaatagccaaggtgcctttgtcttgcagaacctccttttctatttctgtcacagcatctgctgcttccaaagcttcactgatacaaagagaatgtgacattttgaagaagtcgacaaatgttggaaccaggtgagctgctgatgtgcacccagcctccctctgcctcttttagggtgttgctggggctctgctctgtttagacttagctgttggtgtcaccatttggccatttttttgcatttgtatttgtggcaccctcagggctttgctcacattggactgtcccctggggagggccgtttgaaactgaggcaaggagtttggaactctacccagccctcttaactggggatttgtttggaggcagtgcaccatttgtttgcagtgtaggtgtgtaaccttaatgtgtgtatgggccctaatctctctctctcttcctccatcttttctattcctcccagctccatcccactgactaaattggaaacaagccatctacagcctaaactcccctgggccataaacaccgttagcttcctccagctggaaatagctaaccttgactggtgacttgcagaagtgggaatgttacagcaggttaactagtcagggataagcaaggaatgagagggcctccccaccccccaccaggaatgttgttaggcgaccatcctgtgatggtcaggtggttgttaactgtgtctctaaaataatacttaatcgcagccagcaccagggaaaagcaatctctcaataaacagaaacacctaaaattggtgatcagcagcttcctcataagatctcagaaactgggcaagtgggctcaagcatgtgcattaagaggaaaaatggag

SEQ ID NO: 14512 - DNA, 1049 bp, Homo sapiens
tcatttctgaactctatcctattctattgatctatgtatttgtttttaagccagcaccataatgttttgattactatagatttgtaatatgatttgaaattaggaagtgcgatacctccaaatttgtttttcttaagattgttctggatacttggggtcttttatggttccatacaagttttaggatttttttctatttctgtgaaaaggttattgaaattttgatggggtatagggattgcattgaatctatagattgcttcaggtaatatgagcattttgacaaaattaattcttccaatctatacacatgagatagctttccatttatttgtttcttcttcaatttcttttattagtgtattatagttttcattacacagatctttcacttccttgcttaaacttatttcctaaattctttaatctttttgatgctattgtaattaggattgttttcttgattgctttctcgggtagaataatactggtgtaaagaaatgtaaaaatttttttggtgttaattttgtgtcctgctactctactgaattcatttattccaaaagttttgctgtgggtggcatctttgggcttttctatgtataggatcatatcacctgcaaatagggataagcttactcctttctgatttggatttatattatttctttttcttgtctaattgttcttgctagttcttccagtactatattgaatagaagtggcaagagggacattcttgccttgtactgggtcttagagtaaaagctttcagtttttcccattcattatgatattacatgtaagcttcttattaatgacctttattaggttgaagcacttttcttctatacctattttgttgagggtttctatcataaaggtttgttgaactttgtcaaatgctttttatgcatctattcagatgatcgtgtggtttttgtctttctttttgttaaagtggtatatcacattgattgatttgcatatgttaaaccaaccttgcatcccatggataagtctcatttgatcatgtatataatcttttt

SEQ ID NO: 14513 - DNA, 1038 bp, Homo sapiens
cataataataaaaaataaataaataaataaataagaaaaaaataatagaaaagtccttttctgtatttacgtctctactaaatgggaaaacaaaagatagacgaagaaggcagaattattcctgaaaaatggaagagaacatgtttcttatgaaagggaagagtattcctatgttttaatatgcacacaaagtatttctttatcaaatgaacacaaatgaagagaccgtctgtccacgggaacagaaaaccacatatggcatgttctcacttataagtgggagctgaatgatgagcacacacaaacacaaagaggggaacagacactagggcctactagagggtggagggtgggaggagggaaaggatcagaaaaaataactattgggtaaccaggcttaatacctgggtaacaaaataatctgtacaacaaaccctcatgacacaagcttacctatataacaaacctgtacaggtacccctaaacctaaaataaaaggtttttttttaaaaaaaaaaaaaaaaaaaaaaaaaaaaaaaaaaaaaaaaaggctgggcacagtggctcatgcctgtaatcccagcactttgggaggcttaggcaggaggattgtttgagcccaggagtttgagaccagcctgggcaacaaaccaagattccatctcctaaaaaagaaaaggagaccatttgtttttacccatcccttcactcaattatgttacttgcctggactctgctggtatttcagcttgagatcccagaccagagccatgcaggtagaaaacagaaaaatcacctaaatttcatgtaattgcccgcagtattctttattctttattacttatcgctataccctgccactggtgttaaacttctgtatgtttctgagcccaggagctatcttcgtcctctaagtaacttgtggcatctagagctcaaaggttttgtggcattgcgaggtggggccaggagcggtggctcaagcctgtaatcccagcactttgggagaccaaggcgggcagatcaaggtcaggagtt

SEQ ID NO: 14514 - DNA, 1062 bp, Homo sapiens
ggctccagtacagctgctggtgacccatcttgctctcagcagtgcaacgaggtaaaaggaagaagctggcccacgcatgcgctcttcaaatttttgagacagtttacccagaatgcagtgctcaaaggaaacgcgtgcgcagtgtggtcaggttgtttcgctgggtgagtaaaatgaaatcttagaggcgttgtgggctggcccagttgatgacgtcaccataccacagcttctagtgctattctgcgccggtatccgaccgccgggcgcggtggcgcgtgcctgtagtcccagctactcgggaggctgaggctggaggatcgcttgagtccaggagttctgggctgtagtgcgctatgccgatcgggtgtccgcactaagttcggcatcaatatggtgacctcccgggagcgggggaccaccaggttgcctaaggaggggtgaaccggcccaggtcggaaacggagcaggtcaaaactcccgtgctgatcagtagtgggatcgcgcctgtgaatagccactgcactccagcctgggcaacatagcgagaccccgtctcttttgaacaataaatacgttaattttggactctcaagagatgaatattctcatagtcttttttattgattaaaccttttactttcttttaattaaaacgttacacttgggaaaggagtttttcctcgactcaccagtgacacctactggaataaatttacaaaacaacttaaaatcagctgtaatgatcacgagtcaacggtagggtttgcttttattttgttaaagagagtacgttttcaaatttatttttttgacacactcctccaagaaatacacctacaccattccaaaaaaaaatgagattctttggcatttagtgtatttgattcttaaatgtaattggctgaatgtaaagtaataaacaagtaatgtgcagtgtatgttgctttgaccagataatttggtgacaaaacaagtaatgaaaagcaaatgcaaaaatgcaaaaaaccaatgtcaataaacgaatttctgctgaaagatacctacattccatatggtcat

SEQ ID NO: 14515 - DNA, 1029 bp, Homo sapiens
taccgagaaacagcgcccgacacctggcccttcgcagctctcgcctttcgcagctctcgcctaacaggaaagggaagaaacaggcggaagtgggaactgcacctgagcgacagtactgcaaaccaataggcagccggccacggcggtcaggcgccttcggtcgcgtctggaaagcaccaaccaacggtctaaggggcgggccggaggggtgtgggccggagggccgcggtgtgccgcggggcagttgcgggttgtcataacggtccccgccggagtgaggcgaggccgcgtcgctcagttctggccgtctagggcccctgtaaggatgagagcgcagaggacgcagggccgctggaggcgcaggtaacgaagctagggtgcggttgggaccgcggctgagctttttccgggacccgtggtgctgaatggagaggacggagacgaagccgagccgcggctcctagcggcggcgccgatgctcgagctgtagctgccaggcgaggatgtgtggagcgcaggcggcgcggggtaaatgagaggtctcgggccccaggacccccggggcccgggatgagttagcgagggcagccgcgggggccagttccgaccgtgacaggccaaggcgacggccgccgcccgcccgccccttccgtgcagaagcagctgctcctttccgcgcccgcccgcctgcgctcccggccctggagaccatgaggttccgcatctacaaacggaaggtgctaatcctgacgctcgtggtggccgcctgcggcttcgtcctctggagcagcaatgggcgacaaaggaagaacgaggccctcgccccaccgttgctggacgccgaacccgcgcggggtgccggcggccgcggtggggaccacccctctgtggctgtgggcatccgcagggtctccaacgtgtcggcggcttccctggtcccggcggtcccccagcccgaggcggacaacctgacgctgcggtaccggtccctggtgtaccagctgaactttgatcagaccctgaggaatg

SEQ ID NO: 14516 - DNA, 1091 bp, Homo sapiens
ttcgccacgttggccaggctgctgtcaaactcctgacctcaggtgatccaccctcctcggcctcccaaagtgctgggattacaggaatgagccaccttgcctagcctaaaaaaaagaaaaaaaaaaaaaaaaaaaaaactttgccctcgtggatctcatctggggtgagactagtgactccaaaatggtatctccagttctacctgaccactgagctccaagagactcacatgccactgccccgcagttatccacctggatgtttgatgggcatctcacattaacaattctacgtagaaatcttgatttttatatctaacttgttctgtccccagttgcactaaataataccgcctacccagctacttaaacctaaaacataagctgattcctctttccctcaccctgctgccattcagttacatagtcctgttgtctcttcttgtacactccaaatatatccacttctatttctgctctgagccaccatcatctccatcgcagacttgtgcaatagcttccaatcggtctcttcagctcttcccttctgacaatctcttttccacacagttgctttagtgatctttaaaatcaaatcaacttacatcattacctgctgaaaacctagtaacttcatatccaagttccttatgtgtgtctacatttaatccctaacacacttcgtattcaccatctagttttcttccccaatcagtctaatgtcagaatactcttgactcctgtgcagcctgggcacaggccatcgaacctcaagaccttaaatgatgtcaccttagtgactccctgcaacatgcttctcccacctccaacacctcatataaaatggccagcatcgttttttgttgttcttgttttgagatggagtttcactctgtcacccaggctggagtgcagcagcgcgatggcggctcactgcaacctctgcctcccgggctcaagcaattctcttgccccagcctccaagcagctgggactaaaggcatgcatcaccatgaccagctaatttttgtgtgtgtgtgttagtagcgatggatttttctccatattggccaggccggtcttgaactcct

SEQ ID NO: 14517 - DNA, 1060 bp, Homo sapiens
acttctccaatcatattatctaccatttaatacacaaactttctcttccttccaactcagtctatttatcatttccccaaagcactatgcatattaccccaaagaagcactcccctttgttaatgctaattctccttggagtctccctccttcatttacttaactgctaacatatctttcaaggtatacttctgatgttatttccccaaacatctgaactcacagcaatctcttactcttgaactactttatcactttcagacactatttacatatttatgactacttcctgaatccaggactcaaaagcttcttgaaggcatgagctttatacttcacctctttgtatactcagtaagtatctagcacagggctatgtgctcagaattctctgtaattgttcaatgattatgtttctcaaatgaaaaggctttattgtccattctgttctagggcctcttcctggagtgctttagtttgcttagtctttcccaccctacagtagttgttcccttcccttccgcccttcccttgcttctacttgcttcctgagacctgctattaaaaaaaaaaaaaaaatcggccaggcgcggtggctcacacctgtaatccagcactttgggaggccaaggcgggtggatcgcgaggtcagaagatcgagacaatcctgcctaacacggtgaaaccccatctctactaaaaatacaaaaacaaaattagccgggcgtggtggtgggtgcctgtagtcccagctactcgggaggctaaggcaggagaatagcatgaatctgggaggcagagcttgcagtgagccgagatcgcagccactgcgctccagcctgggccacagagcgagactccgtctcaaaaaaaacaaaaaacaaaaaatcaactattctgccttacataaaactttcctaatttcaggtattcatatttattcctgacaatatcaccctagaactagtctatgtaatacactgaaatcattattgtacatgtttatgtaataaaaggtcttattagagctagtcctcaaataacatcatttcattcaaca

SEQ ID NO: 14518 - DNA, 1077 bp, Homo sapiens
aagggtactcttagacaaaagaataacctgtatcatgaataggttgaactaaatgatctccaagatcctttaccacaataaatttcttggacattgctaccctttcaacaatgaaaaccacaactctgccttagttgggtatttccaaaaaccaagacagcaaaattagttgcataacttttgctgcttttattataatttgcacataaaaacttaaatacgtattatataacgcccacatagcaggtgctcattcttctgcaaaaggaacactgtctaatagtagtaacagggtctactgcctcacctgtaaaatgagatgccaccactcatctgacaaggatggttgtgagaatagaaaataatgtaaataggccaggtgcagtggctcatgcctgtaatcctagcactctgggaggccgaggtgggtggatcacaaggtcaggagtacaagaccagcctggccaagatggtgaaaccccgtctctactaaaaatacaaaaattagccaggcgtggtggcaggcgcctgtaatcctagctactcgggaggctgaggcagaagaattgctagaacctgggcggcagaggttgcagtgagccgagattgtgccactgcactccagcctggcgacagactgagactccctctcggggggaaaaaaaaaaagaaaagaatgtaaataaggcactttatacagtcccagggaaatggtgagcctcaatcaacaaaatcttgcagcacaacagtaatagtaaatgaaacaatgcaatattacctgtaaagaggaatgaccttagcagagagaataactacaaaagtagtttagtgggaatattttccctagtttcctcaggtaggcagatgaatttattccagcaactataattgctctctacttgaaacaaatattttattaaatcaagccaaattttcatatgagaaactgcactttataaattcatctatcacttgtaattcctaaacccaaaactaaatgctaatgcacatttacccgagtctacctttgttaaacacatttatgcattacccattaaatactgaagtctcactata

SEQ ID NO: 14519 - DNA, 1139 bp, Homo sapiens
atgctgttaaggtgaatagttagaatttaattgactgtgaggggtggtgtctttttttagttctaaaaaagataattttaaaaaatgacctcactttcatctgtaatattttaaaacagctaaaatgatcaaccttaatacattaatgttgtattgaattttttatagagtatattttaaaaaattaaatctacattaagcacctagcatggtgcctgccacagtaagccctcagtaagcatcaacgattatgctttctctcctttttttttaaagcagtttctcctatggttttaatattttcaagacatttggtatatacctattagcattttactgtgtaattattttgcttgaggggagaaaaaccttgaaatattcacctttctgtctctagagcctagaacactgcctgacactgtaataatcatcaaaagcatgcatccactggttaggaaagctgttctacatcctcttgtgccaccaaccagacccacgccatggcctggagcaagtcacctaatcccaaatgcaaaaacagataatactagcaaggaatgtttaattctaaaatttgtaagattctgagtctcatcggcgtgatgaaaaaagaatagaagtttttttgtttgtttgtttttttgagacggagtcttgcttttgttgcccaggttggagtgcagtggcatgatcttggctcactacaacttccgcttcctgggttcaagcgattctcctgcctcagcctcctgagtagctgggattaaaggcgtgcaccaccacgcccggctaatgtttgtattttcagtagagatggggtttcgccatgttggccaagctggtctcgaactcctgaactcatgatccgcccgcctcggcctcccaaagtgctgggattacaggcgtgagccaccgtgcccggcctagaagtttgtttaatcaaatccctgtgttagagatctcaacattcaaattatgtatctaattaatgtagttctgctttaatatataatggatctgccagtaacctcagtatcacaggaagtttaagaaattttaaacattaggaccaaaagtactagattgttcatctcttacattacttgaagcttcaaagcttcatcttttagtagaaactc

SEQ ID NO: 14520 - DNA, 1032 bp, Homo sapiens
aaatataaaaatcaagaaatagagcaagcaggaaatgggattttaaacattttgatttcaagaaatagaactatcttaaatatgatgctgaaacaatctgagaggcaggagataggactcaggcaacagagatccgaggaaatatatatgggcattttgtggttcatttttcttgtgtggcatgtggtacaactgaagcataaatctttttgatatcatctagttttgccagaggtatgggacagttcatattctgtccataagttcggctacttacataaactgaaatacaagtgcaactccaaacaggttttttcttttctggacaccatcatcaagcatggaagactggatctggaatttcccttcatatcttgccagttggcctcccagtttcttgcttatgttttctcctggtgtgttttcaacattgtaattgttttcaatcaactgtataagttttattttcttcaaagcatctattgattccttttttaaaatcatgtctcctagctcctttaaatgtttggaaaacggtagttaagtttcttggtatcacagtagtacttcttattatccaaagctggaaggatgctgctgccagttagctggggtaggtactgcaactaaaaatgcaaaacacagaattaggttcaaaactgtgccatgcatttttttcattatttagaatatatcacaaaagaggtaattaagctttttagtatagaagtactttttttgcacacaatccaggacttgagagaggattaaatgtttcaatttcgtcttggcttttccttttaaatgtttatattaaaaaggaaaaacattcacattaaagaagatttagagaatatgaaaaggggaaaatctacatgttaacattattgggaagaaaacatagatttacaggagttgagagcttgctgagatcttagggatcatttaagccaatgccttgtcttatagcggagaaaactgataaacagagcacctaggcaatttgcctactcactctcttcccttagttaa

SEQ ID NO: 14521 - DNA, 1043 bp, Homo sapiens
tctctttcatttatttgtaatccttggttgtttgctcatttttaagagcacaggactaaaagactaactgcaaggtctagacataatgcgtgggatggtgggattgccaactatgattttcactgtagtgtcatctagctgggcagtttagccgggacatgtctgacatcaagatcttaatgaggccttttcacttgcattggtcagatttcacagagaagactcttcggtattccaccatgggatggtaaagatctggctgccaggattcagtaagaaaaggaggattctggctttcttatccatcatgtaaatgtcccctgttttgaggatggttcccctgtcatctactgtatcccgtattcttaacatagccaaaataaacagccacacacttactgaaatcatatcatatgtgcatttttaaagaataaataactttatattccatttgtataacattttattgtttgcgtattgcatagtgaaaagaacagagtcagaagactcatggtcaggctcaactactaacttgctgtgtaaattggatagatctcttaaccttgctaaacccttacttcctcatctgaaaaatagagataatacttattttacagaattgctaaatactgaatgagatacttatactgttttcctcttaagtaattagtcaaaataattatagagtttgctattgctaaccccttgttcatcatctcaatgctgttctcaataaatgcattaagacaacaggtaccaatgtaacactttaattttgaatattaacaatagcaaaagaaaaacaaactcaaaaatgaccctaccctttattatttttagaatactggcttttaaatacttattgatactatcccatcaggaattcaattcatttaaatattttttttcttcttcaacctactcaaaatgaatacctacatatgtgaaaaacccaagattacatgtgtaattactttatagtttcctctctggcatagtataagtaaaatacatatcatgggcaattaaatacttccccctgc

SEQ ID NO: 14522 - DNA, 1048 bp, Homo sapiens
tcacctcccagacggggtggcggtcgggcagagacactcctcagttcccagacggggtcgtggcggggcagaggcgctccccacatcccagacgatgggtggcggggcagaggcgctccccacatctcagacgatgggtggccgggcagagacgctcctcacttcccagacggggtggcggccgggcagaggctgcaatctcggcactttgggaggccaaggcaggcggctgggaggtgaaggttgtagcgagccgagatcacgccactgcactccagcctgggcaacattgagcactgagtgagcgagactcagtctgcaatcccggcacctcgggaggctgaggcgggcagatcactcgcggtcaggagctggagaccagcccggccaacaccgcgaaaccccgtctccaccaaaaaatacaaaaaccagtcaggcgtggcggcgcgcgcctgcaatcccaggcactcggcaggctgaggcaggagaatcaggcagggaggttgcagtgagcggagatggcggcagtacagtccagcctcggctcggcatcagagggagactgtggagagagagggagagggagagggagagggagaccgtggagagagagggagagggagaccgtggggagggagagggagagggagagggagagggagaggaagaggctaaaagaactttaataaatgatgtctttttatgtgtaagctctttgtaaaccctcttttttggagagggtaatatttttctatcagtaaaacatacttattaaaatgtgtggaaatcttaagtttgcgtcgcaatgaatttctccaaatggatgatgactcatgctccgtagccagactgagctacagaacattatgagcagctcagaagcccctcctgtgcctgcttcctgtcactgtctcctaagggtgattgctaccctgatttccaatatggcagattacttttgccagttttaaactttgtataaatggaattatacagtatgtctctatttgtctgacttcatttactcaacattgtaagtttcatttat

SEQ ID NO: 14523 - DNA, 1045 bp, Homo sapiens
cctacaatcattcaacttaaaattgactttacgatggtgcaaaatgaatatgcgttcagtagaaaccgtactttaaattttgaattttgacctattctgggctactggtatggagtacttttgtgatgctgggcagattaggttaggttaggtgtattaatgtatttcaacttatgtaaggataggttagttgtattaaatgcctttttgacttatgatattttcagcttatgatgatttatcagggtataaccccatcataagtcaaggagcatctgtattatgttttgtttttttatattctgtcttcaccctcacataaatcatatggccgtcagaaaatccgttgtgtgataagtgtgcaactagcattggatcccataaatgtaccaaagtacctactaagtcatgtgatgtgcaggctgttactgccactgttgccaggtcgtcctcctgtctcccaagagtttactttgggagtctgcatagattgatttctctgaggatgtaggtgttggagtctgagtcatcttaccacttagagcaaacttgagagtgtctgagacttgcccgaagaacttgttcaaacagattgctgattccccaccctgggttttggactcagaagttctgtattggggccaagaatttccatttcttaaaattcccaggtgaagttgatgttgctggtctgaggaccactatttgagaacccctgtcttagagaaagtggttaccaatgggaaaatctataggccccggggcctgaaataacttgtcttttggtgttgaccatacaaactttttaaaagaatactgactctgatagaatcctttctgtgcaatatcgtggaatacgtaactggtgtacacaaagaggtaagtgttctcaaacaagatgggtaagtcagtgaataggcacaattttagaaactttaaaagagttgaacctaaggaaatgacagagataatactctacctcttttaggaagttacaagggaattcatttcttggaaatgaaatttttaaaatgacttggctaat

SEQ ID NO: 14524 - DNA, 2439 bp, Homo sapiens
ttcacaacattaatgctgattcattaatttcagttcagtttataaataggtgggtaattagaatgactttgataactaaaatggctcaaacaatttttatttttataatattcatggttttttttatcttatcttgaataactttccttttggacatccaaacatgataaatttatgccaaagcagttttggggcatatgagacattgtatcttgattttactctaaagcaaatctaatacatcaacaaaaatacatttttggtctttgtctttaagaaaaattattatcagaatctgcacaacctttgaaaaaagtggaggaggaacaagaggcggatgaagaagatgtttcagaagaagaagctgaaagtaaagaaggaacaaacaaagactttccacagaatgccataagacaacgctctctgggtccatcattggccacagataaatcctagttaaattttatagttatcttaatattatgattttgataaaaacagaagattgatcattttgtttggtttgaagtgaactgtgacttttttgaatattgcagggttcagtctagattgtcattaaattgaagagtctacattcagaacataaaagcactaggtatacaagtttgaaatatgatttaagcacagtatgatggtttaaatagttctctaatttttgaaaaatcgtgccaagcaataagatttatgtatatttgtttaataataacctatttcaagtctgagttttgaaaatttacatttcccaagtattgcattattgaggtatttaagaagattattttagagaaaaatatttctcatttgatataatttttctctgtttcactgtgtgaaaaaaagaagatatttcccataaatgggaagtttgcccattgtctcaagaaatgtgtatttcagtgacaatttcgtggtctttttagaggtatattccaaaatttccttgtatttttaggttatgcaactaataaaaactaccttacattaattaattacagttttctacacatggtaatacaggatatgctactgatttaggaagtttttaagttcatggtattctcttgattccaacaaagtttgattttctcttgtatttttcttacttactatgggttacattttttatttttcaaattggatgataatttcttggaaacattttttatgttttagtaaacagtatttttttgttgtttcaaactgaagtttactgagagatccatcaaattgaacaatctgttgtaatttaaaattttggccacttttttcagattttacatcattcttgctgaacttcaacttgaaattgtttttttttttttttctttttggatgtgaaggtgaacattcctgatttttgtctgatgtgaaaaagccttggtattttacattttgaaaattcaaagaagcttaatataaaagtttgcattctactcaggaaaaagcatcttcttgtatatgtcttaaatgtatttttgtcctcatatacagaaagttcttaattgattttacagtctgtaatgcttgatgttttaaaataataacatttttatattttttaaaagacaaacttcatattatcctgtgttctttcctgactggtaatattgtgtgggatttcacaggtaaaagtcagtaggatggaacattttagtgtatttttactccttaaagagctagaatacatagttttcaccttaaaagaagggggaaaatcataaatacaatgaatcaactgaccattacgtagtagacaatttctgtaatgtccccttctttctaggctctgttgctgtgtgaatccattagatttacagtatcgtaatatacaagttttctttaaagccctctcctttagaatttaaaatattgtaccattgaagagtttggatgtgtaacttgtgatgccttagaaaaatatcctaagcacaaaataaacctttctaaccacttcattaaagctgaagaccagtatgatttctggttgctttttgaaggtatgctttattactttgtatttaacgatgttcagatgagtagttgtgtgttcctatatatgtacttgatatgtgtaatcaaaagactgccttctttttctattgagatgtttaaggacagtaatgctcattaatcaagcattttttttttttagtgttctagtatatgtgacatggccaatttttttattagaaaatatgtgaccagaaagattctatagagtaaaaaatcaaagcaaaacaaaaaccacaaaaagacccctgtactatagaaaatgtaaagttggctgaacagatagggtcttgaaatttcaggaaacatataatctcacggttcttaaagattgtcactgtagacatctgagtaattaattttcagttagtaacaggcttatagaaactttgggattatttacaaatg

SEQ ID NO: 14525 - DNA, 1041 bp, Homo sapiens
aaatatcctaagagatcagtatttcttaaagtacactttgggagaatgttagtgtagtaacttctcctatgctatgctaccctaatcttgcatgggacttttctgtatggcaccttgtactttaaacttcctactctattgtaaaatcctgtcttcctgaagtacaccaaaataatcctattgatcactacattgacagcatattggtaatgtcttagagggagagcaaaggcaggatattttgggttccttggggctctggcttatggtgggtcttttcatttgggggcttatgcttagacaaatttgtggataggatctgaaagtgaatcttggccaggcacggtagctcacgcctgtaatcccagtgctttggaaggccaagtaatcccggcgcttttcgagaccagcctggccaacatggtgaaatccgtctctactaaaattacaaaaattagctagatgtggtggcacatgcctgtagtcctaactacttgggaggctaaggctggagaatcgcttgaacccaagaggcagaagttggagtgagccgagattgcaccactgcactccagcctgggcaacaagagtgaaactccatctgaaaggtaaaataaaataaaaataaagtgaatcttgagaagtagacattcattgctgtattctgagaaaggagtatatactttgatgagggtaagttcagtagtttagtgttcagataaatgattatgatatgttcagtagttgagtgttcagataaatgattatgactatgtcttgaaatgaacaaataaaattatttgcagatttaccttcctgggtaaatttcctagaatattaatgctatgtgaatgaagacagttgttgatattgacggtaaactgtgtgggtgcagatggtttcagcttttagtgtatccccttgtaacataatatgaaatatatatttggtctttgccccccagttcctgacacagagttcctaaaactcttgcaatttccttagtggtggggtgataggagtatctttttaaatcttatt

SEQ ID NO: 14526 - DNA, 1050 bp, Homo sapiens
tagatagggaactttctgattaagtggaggggccttgcaaagctctttaataacaatcctagaaaaattgggacccctgccactagagagatgtttgaattccacaggttggcaatatgacatcagataatattttttctaccatagagccatagctccctagcaaggaaaggcttagtctatcctgagaataagcaaacagtggacaggacatattaaaaactcactgcaggatgtacttgtatgaatccatttggaggtgcacaaagaggacctttgtggttttggggtttcatgggtgctaggagcttagcaaaagatgcctgtcttccatagtgaccagccagaacaccttgtttagcatttgtgttatccctttttgggatgaatttcaaccttgataataactaccaccttaggaagtattagagcacttaaaagttgttttaatctgccaatcttaattggatttcctgctgatgtcaaaatcctgtattgtagccaaagcattctaaaatcatggactacctgcaaaagcatatccgctataagtgtatatattaagctcctttattgctaaataaccaacaagctaagcaataggatttcataggaggtaagcccacttgcgagaaatgtgtgtttccagaaagcaacaaaggttgtataacatgggacaccttcaagactaccatcagaactgtagacttggttttagggacaccgttaaacttgatgatgcctcatactatacaacttgcaggctttataagggcagaaggttttaccagtagtaaagagaaagattgtagtaagccattggcatctagaaattcatatgggcttgagtcagaacattaaaagcttgttcagatctttcttgtacaaataggcacaatgaataggcacaatgatttatgatgagaaaacccagaatatgatgttggtgaagagcacaacttggctgttttatcacagaaatagccatgacagtatgtaaatgaatgagtgttgctatattacagtaatactttatttacaaaacaggtg

SEQ ID NO: 14527 - DNA, 1048 bp, Homo sapiens
catctgtcattaaaaaggcttgtgacttttgggtttccttcttagagcagtgcatgaatttaggttcagcagtgttaaaggatgagaaatttttttttagaatttagagcattatgagactattgtagaaattttaactaccaggacctacaggatggagagtgggggaggggagaagaccagaagagaggcaggaaaacagatgcctttgctgatgtcctttgtagtataaaacttaacagcaccacagcacctaatcattttctcaggtgtggctttgagaaataaacgttttatgttaaaaatgaaaatacttcacaatatgagacagctggcatttgaatacttttcccagtatgtttgtaaacattttggattcatatttcatattaaaatggacatttagtaggattattagatgaaaagggtcccccaggggatatctaatatcaaattatctgcaggacatcttctccagaaagcagactgactgtaatatgaactaattttcccccctttgagttgcttgcaagaatctctgagatctgacactgatgggctacagtaatcagcagttcttgcagtactcaagacattttaaggggcaggaaatctttcctatttccagtatctcctttttgggggcaacaagggtaagctgctagttttaagtacataatttgaacttagagatttaagatgctcctggctgtacaggaaaacgcctgaaaacagcatgggcctggatgaagacgctgcttttgaaagcaaaatgccagtgtgctaggtagcggtttttagttacaaattcttaaaaaaaattgttactgaactaggttagctgaattggggggggggtctttttgtagtttttggattttgtttccacatttaactatacttataaagcttttggctttctgaacttatgatgtaatagactgcgtagccttttgtggcagatgcttggaatgaaagtttcaaacataattgtttttgactgagctgtcaggttcagagttgagtgtaaatgagtcctgtctcacaa

SEQ ID NO: 14528 - DNA, 1033 bp, Homo sapiens
acaggaggtattcagtttgtgtatccttatgggtaaagcatagaaattttggctctcatttttgcaatttcaactttcttcttttaaagtaaaaaaaaaaaaaaaagttttaagtgtgtttacaatcctcaatagaatcctactgtaacacagtttgtggattcaggtatagcaattggtccttgtttgatgatcccctacctcctccccacccccaacgaggaaaaacaaacacagtttattaaaaagtcagtatgtttttaaacgtgtactcccagtactagagttataaaggctgtttgttgcacacattaaaattatgtatttttagaaagtctttgtatgattatatcattacacattttgggagtgtgtttatgtcgtgattgtgtataaaacaatggagagttaggagaggggaatgggaaagatttagtgaaggagttttatgagtagtgaaatttcagttataatgtatgttccccaaaacccaaacaggaaaaatgttatcgttggtctctgtggttaaacttttatacagagggtagttgagagggctttctgaattgcacattatcctgaggaagaggctttgggggcctttaaaagtaagtagaaacaagttaaagggataatttgagaggaacgaggaagtggaatactggacattgaattgcaaggaaaaagttagaaggataagtatttaaaacaaggctgaagtagagagaacttactgtttagaagtgtagattaaagaataaggtatttttagctgagaaaaaaggatcagaatgattagaatcaaggtgccctataagatctgtatacaaacttgaaataggactgctaattgatagttatcctggaaattttgcctgtctttgtgttgaatcactagtttggtgttaaataatgtgcagggactggatgcttataactgtatcccgtacactccaaaagccacttcccatttcaaagactggaaacattttttgtttaagtgctaatgattctacaaatatttaattagtcc

SEQ ID NO: 14529 - DNA, 1034 bp, Homo sapiens
tttgtcatgaaatataatatttgataaaatcattttagaattgtatctctaaatggtatgcctaagaatattgttctataggaccttaatagatatgccttgggggaaaaaagtattgtgtgcccaagtaagtttgagatatactgcattaaatataagaagttgcctgcaacacttctcagagcctttaacactttctgatttctaagagaggacatatatagggtacagtactttgcaaacctatttatccctgtaccacctagtaacatttttcaggaaaatgttttgagcacacaaatttgacctgttttaggaattcatacctttgacaatgttgaggaccttttttttctattataaagatgatgtgatattcacctatattactttttcccaattctctatctttaagatatttttccaatgtattatattcaaccctctgctcagtcccttccttctgctaagtaaagtggtggtttccatctgttgctacacatcagaaatacctagctctgaccctggagattctgtatgaatagaaatgccagaatacctgctcaggattctgtgttcattacaaacacccaggtgattctgatgcagccaaccctggtcctccaactgatgctttggaattgttgaaggaaaagcatgcgtgttttttttttttcaagatggatgagtagcttggggcatagtttgtggtcctagaacacatgggttaaccatccatcctagtgagaacgatagcacaggcctccaatgaccccatgaggtgatgtactggctataacctaacatgagatgattattattaagaaaagcagaatacttctaaatgggcttttagccaccttcctaataatgaagtaccgtatatatgattaccatttgttttagtttcgagtaattcccttgtaaatgatgttttatttattctttaagaagaatactagattatattttctaaatgtgccaagtatctaagaatatattctttcccctcctgctgataagagttatacatt

SEQ ID NO: 14530 - DNA, 1075 bp, Homo sapiens
tgtcacccacacacatgaaatggtaatcatcgctattaggttggtgcaaaagtaattgtggctttcgccattgaaagtagtatcaaagactacaattacttttgcaccaacctagatagttttttttgttttttgtttttgctttttgagacagagtctcactctgtcacccaggctggagtgtagtggcatgatctcagctcactgcaacctctgcctcctgggttcaagcgattctcctgcctcagcctgccgagtagctgggattactggcacgcaccaccacgcccggctaattttttatattttagtagcgacggggtttcaccatattggccaggctggtctcgaactcctgacctcaggtgatccgcgtcagcctcccatagtgctgggattacaggcgtgagccaccgcgcccagccttagatagctttttaatatgcatcttgattttatcttaagagtagccaaaatctagccaatttccaggactaggtgcctataggctgaacatttgagcactaagctgttgcttatggtttgtgagtcatagtcagcttgcttagataacctgaacattgaggaatgtgatttttttttaactttaaaaaaattgagttataatttacatactgcaaagtatagaaaccttatgtgtgcagctcaatgaatgtttacaattgtatacatccatgtaaccatcactgtttgagatataaaacatttccagcaccctagaaaggtcctttgtgacccctcctagtcaatatccttcacctaaagggtaaaaactattctgatctcttgtcaccaaagttttgcttgtttcttaacttcatgaagctgaagttatgtgatatattctcttctggcttcttttactcaacatttgtcctgtgaaatttattcatgtgaatccatgtgacaataattctttcttttacattgttgtgtgatattccattgtacgaatacacccaatctattcatctactgttgatggatagatattgagttttgggctattgtaaaactgttatgaacatgttatgtgtatgcacatgtagaaata

SEQ ID NO: 14531 - DNA, 1015 bp, Homo sapiens
cattgattttctttaggattttgttaatagagatgtccgaaagaagaaaaaactcacttgacactctaaaagcatttcttactaggtctgtacatcttgggtacagcctttggggacagagaaaggtgggggctgtgaggagagcccagggctctgatagggtggagtatgcagacagaggagctgtatttacactttcacttgctgcaggtatgccacagtgggctttttcccttatgaaaaataaagactgaacaacagaagtgctgttctctgtagctatctgtgatttaaaaggagtacaggagaagctaagtccttagaactctagatgcagctgctccttggagatcttcttagtcgagaaagacttctgaatgttcctcagattatgccagtaacagaccctgttagtaaagaaggaaacactggatctcctgggacttgtgccagcaacagcagcatctttaaaccacggatgaagggggccacttggagtttgcacactagtgctccactgacatcagtgtttctcagactgtggtccatggaccacttgctccaggagtattaatacctggaatgcctctttacaaagcggatcctgagctacccacgaactcagaatccctggcagtgactcaagaacgtgcattctgttacatgctatagtctgaggaccactacagtatttatgacagctagcttttcatactgccaaaggaaaggcacaaacaactcataaatattctcgctcttcttcccacagcccccagaagtggctgcctaggcatgaacatgtaactgaagggtgagaatctagccagcaactagacatgctacactgaggaagacgcagctgggctgtgactctgctcctgttttgttgagcccctgtgggaggactgcctccagttctcattctttaataagctggtcacattgtagatggcacttagaatgacagagggaattggagctgggtcagctccaatccacaaattgcaaataattt

SEQ ID NO: 14532 - DNA, 1038 bp, Homo sapiens
acgtatttctgatgtgaaacacctggaatgacagtaagaataatttcaacatatcagaacctaaacagttattatccttcaagttgattttattataatcttatattacatataattaatgttacatataatactattatatgcaacatttatttgaatatacagcttctgacatttatttaaattacttggttacaccctacatgtatgttacatggctactcttttcagtggcatttccataatatgaaagttaaggtttagatagataatgatttattgtatatcctttttaaagttattctttttagttaattgctctatgtgtattgagactaggaatcagaaagcttagattctagtcccaggtgtaagttgtgtaacccttggcaagtgtcaatctctaggcctcagctttctcatctataaaatgaggaagttgtcgtattctattttttttcttaagatgatacacttaaatgttcccttctgttgggttatataattgcatcaaaagtgtagtaatgttattaaaaaattgttagagatccaaactaaggtctctttcaactctcccattcttttttctgtgactttatggtaataatgaaactggtggttttcttttcttccccctcacagtatctcagagatgttaactgtcctttcaagattcaagatcgacaagaagctattgactggcttcttggtttagctgttagacttgaatatggagataatggtacgttttgtggggaatgtgtattttaaagagagaggaaagatgggaaagggagtgtgaaaatgtagggaactttgcagtttgttttgtctagtactattttacctttggtttattcttatcacaagttaaaagcacttttattgtctttcattggtgtttatatatttctgttagaatttggaaatggtgccctctggagaaggctaattgactgtcttctcacagagtaacactactttgataatatggtctgcaccttagcctttcaaattaaattgtttttagtgtcccag

SEQ ID NO: 14533 - DNA, 1028 bp, Homo sapiens
tcatggttttatctgatttggattctgttttctgcctgcactatgctaaatcctttgcaaagatgttctcattcaatcctgccaacaatcctagagacagctgctaatatctttttaaaaatatatatcatatgaagaaactgagactcaatgaggataatgtctaagatgacacagaaaatgacagagccaggattttaagcactataaccctgtggtccattgtttttcccacattaccctacttctgtttagttagtctttttaatgattcatagtctgcatttgttaagatggtcgaaaatgccaaatgagtaatggtgaatttggtcaaaaatatataaccccaaaatctctttgagaaatgaatctttctgtccccgatgctagataggccactcagttcataactatacttcaggaatcccagtaatctgaaagaggtctcttgtttctgagagaaatcataaacttcagaagatttattcctagtaatcgtgaaagtacagtggtgtggatcaggggagtggtacttaagataccagacttggaaattttataagagattaaaagcttttaactagaccttgtgcatgtaaactactttgtgataaatatcactctacccagaagagattaagccataacttaccatgctttttagatttttattattaaatgtcagttttaacaagactgttgtattcctaagttattaaaattttctatactgaatctgaatgttaacttggattttctcaatccagattgcatgccaaaagacaaaaatgtttttagtgaaatttagctatttcaaaggcttgttctttattccgacaattatgtaaattgccttggaactgttctatagtgatcatgtcagctttaatcataaagtaagtgagaggagagtcagacaatgcatagcgtatttgggatgcttttgttagacttcaaaacccaaggggataaagtataaatcaactacaacaaaatgctataaaattctagtcctgctgcacatttgt

SEQ ID NO: 14534 - DNA, 1034 bp, Homo sapiens
agcaacactgaagccagaggtgtctgagctttggctaatgtcacttgatgtaggtcagccctactgtgagcgtcaaccctggtttctaaatgtgctgctggaggaatcccacttcacttccagtttaagtgtcagctgaggcctcgcctgatcatttgattcagagtagccctagttctcacaacactatctgaattttctacatatcacatcacagactaatattgtttataccagtcttgtttcctcctaataaaatataagtgccatgaaagaacagaccttgtcttttcctagaacaggtcctgacacctcttagatcctcagtaaatctttgttacatgaatgcatttgagctttcactctcttgttctgaccttccccacattgtatttaaaacccaagggcttcacatcaggatctacaggtaagagaagaattagggaagcccagctgaccctcggattggatccacagcgatggcacggggattcaccagatctgtgtagaagaggaccttgcgctcagagccatccagcagggcgctctctatcttatccaggacactgtccgtccagtacattgttctgcggatgtggtctatggcaagtccttcagggcttatcagacctggaaataaagcaaagtcaggactggagtgtttgcaggatatggagggcaaacctgaagccctccaacggtcgggtgggcaggggggtcagcaggggaaagcaaagcccaagtgtctccaagtccccaagaaccaggttaatagagaaacaagtacttttgttacatattccactacctctagcttctagaccagcagacctaccagtttgatgacaaccggcatccacagtgccagagccaggctgaataaacgaaggcgtcaccctgaattcttaccatgaattcttttaagaagtgcgcacagtaggaatcacctatttcattccgtatgtatgaaggtgtttgcttacagagggggctagtcttatacagctcaataaaatgacttgcctagaacttaa

SEQ ID NO: 14535 - DNA, 1049 bp, Homo sapiens
aggatcgcactacttgaagagtaactgtaaagctacagtaatcaagagagtgtaatgctggggaaaagatagacatatagatcagtggagcaggatagagaatccagaattagacccacatatatatagtcaactgatttttttccccaaaagtgccaaggtaatttagtggggaaaagttttgtcaactaataattccaaaataattgaatattcgtatgggaaaaatgaacattgattgttacctcacaccatagaatgtacttgacatagatcatagacctaactgtaaaagctaaaatttgtagaagacagaagatgttttcttggaggaggcaaaggttttgcagtaaacaaaaaggcatgaaccaaaattgacaaatgagactttatcaaaatttaaaacttttgttttttgcaagacaaataagaggcaagccacagactgggaggaaatatttgcagcacatgtatctggcaaagtacgtttatccaaaacataaagaacttataactcaataagaaaatccagtaaaaatgaacaaaggatttgaacagatacttcacaaaaaagatatatgcatagccaagaaacacaagaagagatgctcaaggttattagttattaggaaaacaaaaattacactcacgttgaactaccactagacattgattagcaggactaaaatttaaaagactaaccacaccaactattggccaaaatgtggattaattggaactcctacactgatgataggaatgtgaagttttacaaccactttggaaaacagtttagcagttgttaaacataagcctgtcataaaatctagctgttacagaagccaggcgtggtggcacaggcctatggtcccagctactcaggaaactgaggcaggaggatcacttgagcccagcagctcaagaccagcctgggcagcatagcaagaccctgtctcaaaacaaaacttatggagaaaaatctagccattatagatatttacccaagagaaatgaaagcatatgttcctataaaaacttgaacatggatg

SEQ ID NO: 14536 - DNA, 1028 bp, Homo sapiens
gcattctcctaatttttttgttaccttgatagcttctttgtaagctcatgtgcctgtcttgccatcagagaggttgagatttctaaacacttaaacctagatcccctcttctttccaagtgatcacatccactttcgtgacatcatgccacttaaaaacagatgactcacacttatctccgatccttactcacccatactactctgagctggctctgtagattctgcactgatttgacatcttcatggtatctgatgcactcagattcaacatgatctttcttcctcctctcccaccctacacctatatgcatcaaaacctggttcttgaaccaggcacagttctgcctgtaatcccagcaacttgggaggctgaggtggcagcatcacttgagcccaggagttcgaggctgcagtaagcaatgtttgcgccactgtactccagcctggattacagagcaagatcccaactcaaaaacacacacacacacaacttggttctcctcttttgttccccatttccgtgactagtatttatatccaattatctatataattcagaaacgtgagtccttctcaatattctttctccctcattacgcacattcactgcatcaccaaatcctgttacctcctaacatctcttaagtccattcacttcttcccttcaaaatgcctggtccaggctactagcatgtattgactagtccatggcagttagccttctaattggtgtgtctgtataccctggcccccacaggcccattctccacagtgttgccagagttttttggaacaaaaatctattataaaagccccacccaaccaggcacggtggctcacacccgtaatcccagcactttgggaggccaaggcaggcagatcacgaggtcagcagtttgagaccagcctggccaatatggtgaaaccccatctctactaaaaaatacaaaaattagctgggtgtggtggcacacacctctagtctcagctactcgggaggctgaggcaggagaattgcttgaacct

SEQ ID NO: 14537 - DNA, 1040 bp, Homo sapiens
acattcacacatagcaatattaaccttaaatgtaaacgggctaaattacccaattaaaagacacagactggcaatttggataaagagtcaagacccattgatgtcctatattcaggagacccgtctcacctgcaaagacacatataggctaaaaataaagggatggaggaatatttaccaagcaaatggaaagcaaaaaaaagcaggggttgcaatcctagtctctgataaagcagactttaaaccaacaaagatcaaaaaggacaagggcattacataacgctaaagggatcaattaaacaagaagagctaacctaaatatatatgcacccaatacaggaacacccagattcataaagcaagttcttagagacctacaaagagacttagactcccacacaataatagtgggagactttaacaccccactgtccatattagacagattaacgaaacagaaaattaacaaggatattcaggacttgaactcagttctgaaccaagcagacctaatagacagctacagaattctccaccccaaatcaacgaaatatacattcttctcagcaccgcatcacacttattctaaaattgaccacgtaattggaagtaaaacattcctcagcaaatgcaaaagaacggaaatcataaacagtcactcagaccgcagtgcaatcaaattagaactcaggattaagaaactcactcaaaactgcacaactacatgaaaactgaacaacctgctcctgaatgacaactgggtaaataacaaaatgaaggcagaagtgaataagttctttgaaaccaatgagaataaacacacatcataccagaatctctgggacatagctaaagcagtgtttagagggaaatttatagcactaaatgcccacaggagaaagcaggaaagatctaaaattgacaccctaatgtcacaactaaaaagaactagagagaggccgaggcgggtggatcatgaagtcaggagtttgagaccagcctggccaacatagtgaaaccccgtctctactaaaaatata

SEQ ID NO: 14538 - DNA, 1020 bp, Homo sapiens
atacttctcaaaacagtaagagctatttatgacaaacccacagccaatatcatactgattgggcaaaagctggaagcacttcctttgaaactggcacaagacaaggatgtcctttctctcccctcctattcaacatagtattggaagttctggccaggacaatcagccaagatagaaaaataaaggacattcaaataggaagagaggaagccaaattgtatatgtttgcagatgacatgattgtatacttagaaaaccccattgtctcagcccaaaatctccttaagctgacaagcaacttcagcaaagtctcaggatacaaaatcaatgtgcaaaaatcacaagcattcctatacaccaataatagagaactcccatgtataattgctacaaagagaataaaatacctaggaatacaacctacaagggatgtgaaggacctcttcaaggagaactacaaaccactgctcaaggaaataagagaggatgcaaacaaatggaaaaacattgcatgctcatggatagaagaatcaatgtcgtgaaaatggccatactgcccaaagcaatatctagattaagtgctatccccatcaagctaccattgactttcttcacagaattagaacaaactattttaaatttcatatggaaccaaaaaagagcccatatagccaagacaatcctaagcaaaaagaacacagctggaggcatcatgctacctgacttcaaactatactacaaggctacagtaaccaaaacagcatggtacttataccaaaacagatatatagaccaatggaacagaacagagacatcagaaataacgacacatgtctacaaccatctgatctttgacaaacctgatgaaagcaagcaatggggaaaggattccctatttaataaatggtgttgggaaaactggctagccatatgcagaacactgaaactggaccccttccttacaccttatacaaaaattaactcacgatggattgaagacttaaacgtaagacctaaaac

SEQ ID NO: 14539 - DNA, 1066 bp, Homo sapiens
tcaatatattccttaaacttaaaaaactaaattatcttcaatgaaatgtttatagtaaactaatgaacagttcatagtaattagttatattttacagagatttttagtaacaaaagctcacaaatttttcttctcacccataaatttaatacttcactcctgaaaattttagttatttatactttttaaaaatacttctacatggtagcatgcacctgtagtcccagctactcagggggctgaggttggaggatcgcttgagcccaggaggccgaggcttcagtgagctatgatcatgccactacattccagcttggatgacagaacaagaccttgtttcaataaaaatgaaaataaaatataaaaaatacttttagttaagtcgggcatgtaaagttacctaacaatctgaaaaacaacacaaagtggagatgttaaactgctcagttattacattttactgaacagatcctttgatttcttaatacattttcttgggcatgttaattctgcagatcttgaacaactaataactagttgctgtgacatataggtggaacattaataaagcagtatttgtcaccttagaagatttatgaattgggagaattaagctataccatctaaagatccaaatgtacaaatatatcaaagaaaaccaggatccctatgagccttgaattaggagtcaggacatctgggttgatcctattcaatttcccgtgtgtgttccaggacagtctactttaatctctaaagctcaactttgttatccataaaactaagttactgaactaaatttctaaggtttctcttagtccaggagacttcagggacaacctcccagttatcttctcctagtggagtcttacagatagagcttagtctctcactaagaagttcacatgagctgtgttgttcggggtttttactgggggttggtcatataggcatggagcatccacatggctgactttactcagtccccagcctctccagaagtcaaactgatactatgtggcccaaggctgcaccgtaactcacattgttagcataaactatttgg

SEQ ID NO: 14540 - DNA, 1044 bp, Homo sapiens
aacccggggggcggaggttgcaataagccaaattcgtgccactgcactccagcctgggcgacagagtaagactcctcaaaaaaaaaaaaaaaaaaaaaaaaaaaaaagatacctggaaattaaacatctgctcctgagtgatctatgggtaaacagtgaaatcaaggcagaatcaaaatatttgttgaaacgagtgaaaatagataccaaaacctctgggatacagcaaaagcaggctgaaagggaagtttatagtgttaaatgtctacataaaaaagtcatttcagattaacactaatgttacacctcaaggaactggaaaaacaagaacaaacaaaacccaaagctagcagaaaagagatcagaactgaatgaaattgagaccaaacatgcacgcgtgcgcgcgcgcgcacacacacacacacacacacacacgatcaatgaaatgaaaagttgattcttggcaaagacaaacaaaattggtaggcaaacaaaagaagagagaggattcaaataagaacaatcagaaactataaagatctgattttatctttaaaatcaggtaaatttaaacttaggggtgcagtggctcaagcatgtaatcccagcactttgggaggctgaggcaggcggatcgcttgaacccaggagtttgagaccagcctgggcaacatagcaaaacaccatctctacaaaaaaaaaaaaaaaaaattagctgggcgtggtggcatgcacctgtaagtcccagctactgaggctgaggtgggaggatcgcttgagcctgggaggcagaggttgcagtgaactgagatcgtgccactgcgttccagcctgggtaacagaatgagaccctgtctcaaaaaaaagcaataaaggtaatattacaactgataccacagaaatacaaagtttatcagagaccactatgaacatctctatacaattctgattttttattatgtatatgtgacttgttttttcctttctgaaaataataggttattctttgattccagtgttctgaaatttcatagtgatgtatct

SEQ ID NO: 14541 - DNA, 1035 bp, Homo sapiens
tcaatctgaaaactattctctgcaaggtaccagtgacataccagtcactcaattaaatggtcttttcttaatcatttctgacgttttgcagaattttaacaacggctctactttcttgcttttaactctaaactactctgctgttttctatgactagtctgattcttatgtttctctcctctgcccatctcccttttctttactcttgtgctttctaattgtgactattaaatgtgaacatatcacaggttgactctcattctacactttttcccttaagtgtattctactgagtttcagctgtcacctctataggtgactgtaatttccttcttgcattccaaaactcacctattatctttatttctgcctagatgtaatacattttaaatataacaatacatttcgtgacctggcttttaagttttttgtcagtggtgccctcattctatcaattgtttagattcaaaacctgagaatatagtttagtcagctcaagttcaacagtcttttaactggaattctttgccccaccgtaatgcattttctacactgtcacttaagaaatcattcaaacgtagaatcatattacagagtttatagccagcccaattcttcagcattttatacaaagcctccatgatttgatgactgcttgcctccagcttcaacttctgctgtttcccacactatcccacacaccaccaccacacgaaaacactttctttgaccttaattcactgctcatttattcaaacactgtctgaaaacctactgtgaactaggcattatggtaggtattgggctctatatctgagtaagttatggtctttcttaagagagaaataaatatgtaaataaatgatatagattatgattaataatgcaaggataaaaagagttttctctctccctgagacacttaacctaacaatataaagaatgacattctagtaatgtctggaaggatgagttggaatttgttatctggccataaaacatagtctaagcaaagtaaaaatatgtacaaaggca

SEQ ID NO: 14542 - DNA, 1045 bp, Homo sapiens
gaagcttgtgcatgcatcacgaagttctcatgctatggttttcagctccatcaggtcatttaaggtcttctctacactgtttattctagttagccattcgcctgaccttttttcaaggttttttgctttcttgcattgggttagaacatgctcctttagctcggagaagtttgattactgaccttttgaagcctacttctgtcaactcgtcaaactcgttctccatccagttttgttccattgctggcaaggatctgctatcctttggaggagaagaggcagtctggtttttggaattttcagcttttgtgttctggtttctccccatttttgtggttttatttacctttggtctttgatgttggtgacctacagatggggttttggtgtggatgtcctttttgttgatgttgatgctattcctttctgtttattagttttccttctaacagtcaggcctctcaactgtaggtctgttggagtttgctagaggtccacttcagaacctatttgcctgggtatcaccaggggaggctgcagaacagcaaatattgctgcttggtccttcctctggatgcttcgtcccagaggggcacccgcctgtatgaggtgtctgtcggcccctactgggaggtgtctcccagtcaggctacacgggtcagggacccacttgaggaggcagtctgtccgttctcagagctcaaactccgtgctgggagaatcactgctctcttccgagctgttagacagggacatttaagtctgcagaagttgtctgctgccttttgttcagctatgccctgcccacagaggtggcgtctagcgaggcggtaggccttgctgagctgcggtgggctctgcccagttcgagcttcctggctggtttgtttacctattcaagcctcaacaatggtggatgcccctccccctgctgggctgcagtgttgcaggtggatctcagactgctgcgctagcattgagcaaggctctgtgggcgtgggacccaccaagccaggcacaggagggaatctcctggtctgccagt

SEQ ID NO: 14543 - DNA, 1113 bp, Homo sapiens
gaagtgattttcctgtaggcaacatatagttagatcatgttttttaatccattttgccactctgtatcttttaattagacagtttaatccatttacactaaatgttactattgatatgtcaggatttactgccatttttgcttcttttctaactcctctcttcctttcttccttttttactgtcttcttttgtggttaagtgatttctctggcagtatgttttaatctattgctttttatttttagtgtatctgttatagatttttgctttgtggttaccatgaggcttacaaaaaatattctgtagttaacaacaagttacttaagattgataacaactttgatcacaaaaagaagagaaaacaaagaacactgtacacattagctccattctcttccccacattttgaacgtttgatggcacaatttgcatttttatattgcctgtctcttggtaaattgtagtcattatttttaatacttctgtcttttagtcttcttagtaaatatataagtggtttatgcatcatgattataatattagtgtaacaatcatgttaacagtctttttcctgtggtttaaaaaaattccctttagcatttattgtaggacagctctggtgataaattcccagtttttgtttgtgaaagtctctctttcacttctaaataatagctttgctagatagagtattcttagaaggctttttttttttccatcagcactctgaatatatcatcccattcactcctggcccgtaatgtttctgctgagaagtctgctgccaggtgtattggatctttcctaaatgttatttgcatctttactcttgctgctttcaggatcttctctttgtctttcacctttgggagtttgattatatgtcttagagtatctttacttggactgactctgattggtgacctttgactttcctgtacctggatatttgtatctttctccaggtttgggaagttttctgttattatttcttcaaataaactttctacccctgtctttctcagttccctacctaactccaacaccccaaatatttgcttttttatgttggcccacagattcataagctttcttcatttcttttttttctt

SEQ ID NO: 14544 - DNA, 1051 bp, Homo sapiens
ttctagaatttaaaaatatagtatttaaaataaatgtcactagttgtgcttaacagcagcatattggagatgaaggaagagtcagttcacttaaagataaatcaataaaaagtatccaatctaaagaacagaggaaagtggggaaagcctgtaataaaacagacagaagctcaggagtctaattatgtgtaattatcatccccaaagggaaagaggaagaacatgaagttggaaaaaatatttgaaaaaataatgacctaaactttccaattttggtgaaagacataaattataaatttatgtctttcaagcttagcaaacccaatcaggataaatatgaagaaaattttgtctagggtcattacagttaaagtgctgcaaactaaaaagaataagaaaatcttgaaaacagagaaaaataaattatagaattacataaagggacatcaatgtaaatgatgactcacttctcatcagaaataatgaaggccagaagacacggaaacggtattttttaaatgccaaaagaaaaaagctgtcaactctgaaatacaaatccagtgaagatattattaaagaacagtggagaaataaaaacatttccagaaaaaagaaaactaaggggattacttaccagcatacctaacactgtaagaaatgccaagaaaattctacagactgaaaagaaataaaaccagcttgaatttcagctcttcaagaaggaatgaagaacatgagaaatagtaaatatgtgggtaaatatgatttttaacttctttaaaatatgattatgcaaaacaaaaatcacgtaatattgtgaggtttacatatgtatacgtaatatataattctctgtgtattatatataacaaccatagcataaaggagaggttgtaaatggatctatacagttgcaaagttctaacatttatatcaaatgataggatattaactactatctagactgtgagaagttaaggatatattttataatccctagagcaatggttctcaaattttttggcctcaagaccccatcacactcctaaaa

SEQ ID NO: 14545 - DNA, 1029 bp, Homo sapiens
atcaataggggactaacaagcactctgtaatagaatctaaaagaatgaaagcaaatagcataggaactctatttctattctaattttgtatcagaaattaagtgtatcaaatgaactaatgcttctattttccattcttttctcattatgactaaactacctctttgattaacatcaattaaagttcagatcttttgccaacttgtttattcatatattacaaggcaaccttggcagaacaaaatctttctccagctgctatttggcaagttggcaaaaaaaaaaaaaaaacttacacatattaaacacaagcagttctaggaataggaattgaaaagcaagataatcaagagtttatttcaacaggtactcagtgctttgtaggagtgcattgcaagaggtgaccatattgtatgtacatgaatagcttgtcgtgacaaatgtgtagaatactaaagatgatgatttttatttgttttagggtatgtctctgtgccagactgtcgtcgtgggctctgtagtcattcttctgtactcttccagagcttgttataatttggtggtggtcaccatatctcaggatacattagaaagtccatttaattatggctgggataatctttcagataaggtaaatacctaccacgtattgccagtctaacaatgtgataattaacttaccctcatctagaagaacactgtagtgtttgacttacaaacacatttatggaatctctgtctactgtcagtaatcatacttaaagctttgtgtttaaaaatctttatgtacgtgtgacatttgaaatcattcttcacagagaacttctctcaaaggagtattttctctctcttttttggtaaataataatagtgccacaagcctctcggtcatatgctaattttacttatttttgttaatgatgatgtttaaatatttctagataaatgaattccctattattagccagtgaatatggtctttgttaggaggaaagtaactctcccctacccaagaactacatatactct

SEQ ID NO: 14546 - DNA, 1026 bp, Homo sapiens
acctgcttttcatctgtaagacagggataatagaacctatttcagaggtttgttgtgagaaatgaatgtatatgtgtgtctgcatacatacatacatacatacatagatgtcttagaatagagctgagtacataaggactacattgttgtcatctgacaatcaagttctaccagttctgagtggcatttattcattcttttgtaacatactgcgatatagaatccaggatattagataaaagtcattaaatttgtagaaaagcattttgttatttgacaaagaacatatttcaatgtatttgagtgctaactttattacaaaattcattgaaaatgctaaaaattcaaatgtgacttcttatatcctgatcatagtcctatggtctttttgccttttttttgttgcagtttaccaaattcgcaaagtttgggctggtatggcaccatgactgggtgtggcagcagcagttacacagtcactccccacctgaatggacctatgacagatactgctcctttgctctttacttgtagtaatttagatttgaacaatcatcatagcttatatgtgacaccacaaaactgacagcatcaccaagtcatgattcttgagttgtttttcataaatgtgtatattcaatgtgtttaaattccatctacataaacattccattatctgttgcaactgaaaacaaaatctggaagtgtggctgtgtttggtaaataacacagctattatttttgacctcttcatagtaaaatgaagtaaaatggaaagtttggagtaggagaaaagagagattagatcttaaggcacttgatggcctccaaaaatcctgactttggaacatcaaatgcatatgtgcacttttatctttgttctgagtcactgcagtccccaaagtcatatgccaatgttcacactgaaatactgtattgtacaccaaactggaaggcaattttcctatgaaaatcaaagccggtatattcattggtatgctctatacagatatcttaataaaaatt

SEQ ID NO: 14547 - DNA, 1044 bp, Homo sapiens
atttaaattggactttcagatcttcaatttctctagtctctacttttcttccttgaatcagtcttgagagcagaacatactgttctttaaaagctgccgtggcaaaatgccaacagataaaaattgtatataccttttctcttggtatgttgtcaaatccatcccccattttagaattattttgtgttgtattttcaaatgcaaactagtatagatcttttgagttgtgttttttgtttatatgttcatttgacttaactgatttttttgtggtataatttttcattgaggtataattacattaaaaaaatgtagattcttaagtgtacatttcaaatatgtttggacaagttatatatctgtgtaaccatcaccccaatcaagtgtgtggtttatttaaaaaacattatttgaaattttttagatttaagagatcttaaatctacctggagcaaaacctcttaatataaatggttttacctagcatggaagtctaggtctattaagaattatgatgtgtacacctaactaaggtgatatttgacttagagtatttgaaagtacattaaaaatcttgactaactttttaagaaagatttaacttcttttctaggtgatagaattacctcttacaaacccagagttatttcagcgtgtaggaataatacctccaaaaggctgtttgttatatggaccaccaggttggtattgaattatttctactccaccaataagataaatgaattaaggaattaaaaaaaaaaagacaatttttttatttttatttttttgagacacggtctcactctgttgcccaggctgtagtgcagtggcacaatctgggctaactgcaacctctgccttccgggctcaagtgattctcccacctcagtctcccacgtagctgggactgcaggcgtgcatcaccatgtctggttaatttttgtatgttttgtagagaagcaattttgccatattgctcaggctatctcaaactcctggactcaagcgatctgcccaccttagcctcccaaaatgttggga

SEQ ID NO: 14548 - DNA, 1032 bp, Homo sapiens
acagcctaaaaattgcccatcaatggatgaatggataaagaaaatgtggtagccgggtgcagtggctcatacctgtagtgccaacactttgggaggccgaggcgggcggatcacctgaggtcgggagttcgagaccagcctgaccaacatggagaaaccccgtctctgctgaaaatacaaaattagctgggtgtagtagttcatgcctgtaatcccagctactcgggaggcagaggcaggagaatcacttgaacctgggaggcagaggttgcagtgagctgagatcatgccattgcactccagcctgggcaacaagagtgaaactccatctcaaaaaaaaaagaaaaagaaatgtggtaaatacacacattggaatactattcagccttaaaaaaggaaactctgtcatttgtgacaatatggatgaatctagaggatgttatactaagtgaaataagccagacacagaaagacagttaccacataatctcattttcatgtggaatcttaaaaaattgaactcgtagaaaccaagagtagaatggtggttaccagaagttgtggtggtgtatggggataggggagatgttggtcaaaggatataaagttcacttagacaggaggaataagttctaggtgacatattgcatagcatggtgactataattaataatgtattagctatttcaaaattgctaaaagtagattttaaatgttctaaccacaaagtaatgctaagcatgtgaggtgatggatatgttgatttgcctgatttaatcattcttcaatatatacatgtatcataatttaacccataaatatacaatttatttgtcaatttaaaatagattttaaaaattataacattttgattaaaattttaatgttgacagcagaagtactttggaattttttttttttttttttttttgagacagagtcttgctctgtcacccaggctggagtgcagtggcgagattataagctcactgcaacccccacctcccggattcaagcgattctcctgcctca

SEQ ID NO: 14549 - DNA, 1199 bp, Homo sapiens
gtaagtgtaactcagttgtttctgcttcctgtggtggctcatttcctgtttttaaattagtttttgattgtgagcttgttgggactttatctgtgtgaattatttctgatctaggtttaaggtgtgtttttctagagaatatgcatttgcttcttccaggaatccagggatgcaatctacccaggaccacttacattaaattctcacttggcctcacaaaagtaactgaattctaaccccaaacttgagtggatgccagattgtggttaggaagaccccactccaccactaccaatacctacccagagccaaagctaggaaggacaagagtactcacttctgtgggatgagttgagtttttgtttttctttctttccctagtttatctttcactgaggatgttgcctttgggagttctagctttttggtcttgatctgagttcgactttgagcagatcatagactttgtcttatgtttacaagtacgtttccacttaaaataaggccgtagtgaagatgtagaacaactagaagtcccatacattgctggtgggagtgtacagtggttttacaaaacttttggcagtatctagtaaagccaaacataggcctaccctgtgtcaaaagacaaaattacaacaaatttagcttaaaaatctaactcacttttattagtggttcatgaatcaggcagtgtgtcatcaaaagatttagaaaaggcatttcagtgtgctgagcagaggaagttgaatttataggcaaaatctagctaaataaagcagaaatgaaacaaaaagtggattggtcatttcaaagttagtttctttatagtattaaaacacaggggacttccttatgctggctcaggataactggcctccttctgattgattgctatgaatcttttgattttttttttttttttgagatggagtttcactgatgttgcctaggctggagtgcaatgccacgatctcagctcactgcaacctccgcttccaggttcaagcgattctcctgcctcagcctcccaagtagctgggattacaggctcccgccaccatgcctggctaatttttgtatttttagtagagatggagtttcaccatgttggccaggctggtctcaaattcctaacctcaggtgatccacccgcctcagcctcccaaagtgctgggattacaggtgtgagccaccgc

SEQ ID NO: 14550 - DNA, 1048 bp, Homo sapiens
tttaaaaaatctttatagagatataatttacattccatgaggtttactcacttaaagtgtacaattcagtgtcttacaatatatttagagttgtatagccatcagcacaatctaatttagggcattttcatcactctgagaagaaatcttacgctcattagcagtccctccccattccctgcctaccctccaccccagtctgtttctttttatctgcttttatttactctgggttttaaatcatgttgtctttttgtacacttttaaaaataggagtgtcaaacattgcatatgaaaacccagtaaaggtaatttcagattccttacaatggcatcttactctagagaggatttctggtgtgcagctagctatggcactagcaatcaaagcagttcaccacactctaatcaggactgaatgattcgaatttggttttcagttcctttgaggactggtctagttatagttcagttaccctagaacgtagctctttggtatcattcacgtaaatctgttatacttgccagggtctttctgcctgtggaccatgaatccttctggcttatgagtttactgaagttgtggagggggaaaaattccctctaccttattacattaagtaattgggggcatgtgaattaaactgacaagacaggtttgcaaggaaaaaagttcatttatgtgtgcaatgtggatgcagacaggagtgctcaatgatgagtaactcagaggggagattagaatttgatgttgatatatctaacttaggaggggaaagggagtagggagaaaaggttcctatgggaagaacaaataggttcctttaagaaagacaaatgggtttttagaacaaatgagagataagaaaacttctgatgcttatttatgcagactggtctgtcttcttcagggccacgaaaatccctggagaagggatttatggtgggattacttttgatctctctcctaggaatagacaacttgaagagaaaatttatagcagttcttatttctcagaaaattctgcttttagtcagattataagag

SEQ ID NO: 14551 - DNA, 1010 bp, Homo sapiens
acttttacactgttggtgggactgtaaactagttcaaacattgggaagtcagtgtggcaattcctcagggatctagaactagaaataccatttgaccccgccatccctttactgggtatatacccaaaggattataaatcatgctgctataaagacgcatgcatacacacgtatgtttatagcggcactattcacaatagcaaagacttggatccaacccaaatgtccaacaacgatagactggattaagaaaacgtggcacatatacaccatggaatactatgcagccataaaaagtgatgagttcatgtcttttttagggacatgaggatgaagctggaaaccatcattctcagcaaactatcgcaaggacaaaaaaccaaacactgcatgttctcactcagaggtgggaattgaacaatgagaacccatggacacaggaaggggaacatcacacaccagggcctgttgtcgggtggggggagcggggagggatagctttaggagatacacctaatgtaaatgatgagttaatgggtgcagcacaccaacatgtcacatgtatacacatgtaacaaacctgcacgttgtgcacatgtactgtaaaacttaaagtatataaaaaaaaaaaactattgcacagttcacatgccagccatttaacattggtttactctctacttggggatgacatctagaatcttaaaagcgaagctaggcaattggaaagaatgagacttgggctgcctggttcaggggctcttgtttcttcctgccaaaacctcttctctccttttctgctaataaccctcccactctcctgtcttcctgcacggcctctccttggccatgtgtggattcctagccccaacccctctggaatctggagtctccctttaggtagagaatgaatggaacagtgatctgcctgaagtatctcagaggggcacccacacactgctgcaggtgcagccgaggctgttcatgttcttcctgaagcctgattgttc

SEQ ID NO: 14552 - DNA, 1017 bp, Homo sapiens
tatatgagaacaacaagaataggttgtaagtatttagtaggtttggattctttctgcaagccttataggaaagattggtggtatattgccaccgcgcagatgaggaatgaattaggggaacacttattcttcaaaacagaatgctttgcctccgaccagttacttatgaggctactagttacattgtttcttgctaagtattctgctaattgactacagcatatttttaactgtttaaaatttttttaatttgaaaactcatttaagaattaattgaggctagcatatgctttcatttgggatatttcaaggttaattatctgactcatggagaataaattgcaacattcttttttatacacccagtgtttgtactatattttattctgaagagctgaaaacacatctatatctgttaccccatttaaagcagagaggtaggcattccctttgagcagtctagaaatgctcgtattttagaaaactaggtttcaaaataacagggacacatttgagaaatggttaatgaaaatcaggaattaatactttgagatcacaatgcacaatcaggagcaaagcgtaggcttggccagagacagatacaaatgggattgcagctgtagtttttgtgtctttcatttatactaggatcacatttctacttctggtatcccttaaatccccttgctttatagacgtaattttgcagcaccatctcacctccatttctccaggcttaatgtgcctgtgggccctgttttgtagaagtcaccagttagcatctgcccctctagctatgtacaaatagtttttagaagatgttcttgacttccaaatacgattcaaatagcattcaatttgaaatggttgctgaataatataaacaattgaaagaaaaacctaaaatcgaacttgatggggagcaaaatgatgtgtaaaagtaggtctaatggcactttaaaaacaagtcaacaaaggtaagaagatgtcaactctttgttctgtgtccctctaccc

SEQ ID NO: 14553 - DNA, 1057 bp, Homo sapiens
agcctatactgttcattcagataaggtgtaaatatggggttaggacagcaggaagtgattaattttcttagatatttaacatggtcctttgaaggggatcagcttttgaatctttacgattatatttattgcaatggtgcttcccttctatgtttagacatgaaagtgaatgtcactgttgaacagtaaacacaggagaatgactatgtgacagaagtatgtaaagtattttgtaattcggtagagaatcaaagtcagcttcagttctttgcattctcagggattcagaaaggattagataacaatagttggaacctatgccagagagtaactgaaggatagcattccttgaacctcagaaacctgggtgaaaggaattgggcaattaaggtttttaggaagtctaatggggtcatttgtgaatgccatcttcatggaacttggcaaactgtcatctcagagatcaagggaggtcactgatgtgagggttggaggaatgaaagtggagtgactgtttcctgccaagtatgtttaaaggctcttgtctgaaggtagctacaggtttttttttgtttaatttggttttgttttcaacaatatcagggagctaaagatacatgtctttgtaaagtgagctctcctggttttccaccaaagttatattatatccaaagagcctatatttgttttcccctttatccaatgactaaacatttattaaatataaatgatgtgtcatgctgaagataaaagtacaatgtaaaaattttttttttacattagcttaaactttcaaatacattcaggctagtactgattcattaaaaatatgtatggggggatttcctgttactctgggtaggcatggaggaatttgattttttttttttttggagacggagtcttgctctgttgtcccggttgaagtgcgctggcacaatcttggctcactgcatctttgcctcctgggttcaagcaattctcctgactcagtctcccaagtagctgggattacaggcgcccaccatcacaccctgctaatttttgtattttagta

SEQ ID NO: 14554 - DNA, 1073 bp, Homo sapiens
ggctgtgtaaacacagatgttggttaagactaaaactaagtaactggggatggagagtgaaggcaggaaaacagagttaaattaatgctgtgattataaacagaacataatgttagtgaaaataaagatgctccacttaagcctatagtaaaccatcaattcaaaataaggtgtgcttgcaaaatcatttttggtttcttttttggaatatgggatatatttcctaaagataagaaattctaagatttctaagatgtggttaggtttataccaatctatttgagtaaaaaatgtagatagaaggcatattcattaacataaacaaatacaaggaagattactgttgtaaagacattaaataatatagaaaatatgtaatgccaacaagatatttaataatattaacttttattgtaggtccttgaatactagcaaatttaattacatggaaataaggacatgaatgaaaacttggagattataaagtgaatttctgggttcttttaaaagatataggactggatccttagcatatacaatgtagaagaagattaggagttttggttatgcaatgtatgtcaactgagtggcatggctgccaatatagttaatgtcttagactgtattagtagatatattatgcccactctggggaaagtggtaatcctactctattttgctctgatcaatctgtatgtggatacatggagtattgtagttagtattggacatgacacttagaagaggacaaagacaagctaaaggttgttcaaagttgataaattaagaatctgagattactggataaccagaaaatgtttagggtggatgtgaagggaataaaagatatgaaggtgtcttgtgcaggaagaattaaggatcctgtcctatacccctgaggtatgttccttctacactcagggttttgagggttttactgtgaagagatgctgaattttatcaaatgtgttttcagcatcaattgaaataatcatatgattttttgtccttcattctgttgatatgatgtatcacattgattgatttatacatgttgaaccatccttgcatct

SEQ ID NO: 14555 - DNA, 1051 bp, Homo sapiens
agcctgacaaacatggtgaaaccccgtctctactaaaaatacaaaattagctgggcgtggtgacacatgcttgtaatcccagctacttgagaggctgaggcaggagaatcacttgaacctgggaggcagaggttgcagtgagctgagatcgtgccattgcactccggcctggtgacagagcaagactccatctcaaaaaaaaaaaaaaaaaaaaagagggggggttattttaaagcagtattcattgcaaaaaaaaattttttgcaagaacagcaattgacttattttgaaattcagtaaaaggcattttgacttgtaatatgaggtttaattctagaccccttttgattcagacatatcaataggcacttcagatttatagattgtcatttggtattagtttggcttaagaaatttaatttcatattctccctcttgatggtatttaaatgtgtgatgttttctatgtgtgtgtgtctgtgtatcctggtctattggcagaagaactaaagagctgtggtatacaagacatatttgttttctgcaccagaggggaactgtcaaaatatagagtcccaaaccttctggatctctaccagcaatgtggaattatcacccatcatcatccaatcgcagatggagggactcctgacatagccagctgctgtgaaataatggaagagcttacaacctgccttaaaaattaccgaaaaaccttaatacagtacgttcttttctccatacactatgtgagaaatgtctcagtcaaaatgatttctggaattatggtagccctattcagttatcacctacttcatagtttgttgtaaggattaaaaggtaataatgcactaggaaagcactggcacaatgtctggtacagggtaagtagtcaaatacgtgctgttattacttttcaagagtagggacaataaatgagtagatttggaaattgttagaacaaggttacaagcttttcttttttatttctttcctttagtcttagacctttagttgcaattttgggaccctcctttcccctcatcaccat

SEQ ID NO: 14556 - DNA, 1061 bp, Homo sapiens
cctcccacctctgtggccataggctagaacctgctacaatgtcacatctggctcttgagcaggacccgcaatgaaaaacctaccagctgcaaggccttccttcctgcagtacagttccacaggtctgaaaatacactgaaaaactaagaagagctgatacattgtgagcaaaacacagggcacttgtgaggcagaaagtgtgaggaaatccatcaatctgcttttcaggcagaaatagtcacaaatagaaccagccttgcgaatgtttgaggcaaatgaaaagatagccagtaagtagccctcttagctatgcctgcacactagttgctaaccaacagtagtattactgaagtcatgaaaaattatttaaatgtgtggatgtacagcatgaatactgaaatattttaatttttaaaataccgatgcatatcatttattatctttctcctatggggaaatagaaggattttgataggagttatactcaacagagtaaaattcatttgtttaaactgtggaaaagtgggtatcattaaagatgtctatacagaacattaaaataatattgtaacaatatttgtgacatttaaaaaagttatttcatttgatgtgtagatagtttaaaaatctttttttcaccactgtacccaaactgcctgacatatagcagaagagggtgaataatctagagacctgatttaacttgaaaataaaccagaggctgcacgtggtggctcatgcttgtaatcccagtactctgggaggctgagacgggcggatccttgagtccaggagttcaagaccagcctggccaacatggcgaaacctcatctctactaaaaatacaaaaattagctgggcgtggtggcacatgcctgttagtgccggctactcaggaggcttaggctggaggattgcttaagtctgggaggttgaggctgcagtgagctgagatcatgccactgcactccagcctgggcaacagagtgagaccctgtctcaaaaaacaaaaacaaaaaaacacacatgctttttatttatatttaagatttttttttttt

SEQ ID NO: 14557 - DNA, 1096 bp, Homo sapiens
agaaaaatcattctgaaaggcaatccattgaaaatttgaggaggttaaattcttaagatcactaaatgttttacctttgatgtaatcggagtgcaattaagaaaaaacttaattctacttaaagtaattgtgtgttccctagtttatacaaaggagttggaatgagcttctttagatcttttcctgaaataacagcttttataaatatccatctgtttggtttctaatgtcccttattatagttacgtaaatacaggtcatagttttaaatataggttcttaaatcataaatacaagatataattcttgactgttctccgtgtattataaaatgatactcatctataggaggcagatatataaaattcggataataagattttttggataattaaatttattaaattgatagtcaagtgtgattagattagcagaatgtgatctccagggaagatctgtgagacctttaatgccttaccttagatttctgcctgcacagcaaatccatccagaactgaggtgggaggtggaggttatagagctagaaaaatcactaaaagaaacaaataactatttttttctagtgtatttttattccaaataaaccctgtattcttctgaatagtaaattactttattcatccattgttctgtctgtaagaattttgaaacttggtaggcagaaagaccccacccttttctctttccaagataactaaaagaaaaaggtaaatcagagctttccatgttttcagtgagaattatcataactcaccaagaaagcagatcatggcaaataaactgtgaccttcagggagatttttcaagcccctttttgtcctgtttgtattaagaataatgccttacctttgtatctgcatttttatataattccattccaaccaggtatagcactctgaagaagacattatctattctccattatataaaccaaatcaaactttcatctacattcactagctatgtaataaataccttctaggagccagatacttgttgagagtctgggctacaaagaatcaggcaagactcctgatgtcaggtatttgagcataaaaagagcattgatggctaa

SEQ ID NO: 14558 - DNA, 1031 bp, Homo sapiens
gaggtcatgtgatgatttggtttactttcggagtgtggggatcataaagagcatcaggagttgtcatagcatacctgagtctgtagtgtggctctctgcatatccggaaactagccaagaaccaggaagggggcaaaaagtccacttcgcaaccagagtagatagcatgaaagtccaagagaatatttcaggccctctctcagaatgtacttgctcttattctagacacaatcctaacatttaaaaaatttgacaaataatccgtagtgtattgggggtaacacatttagaatggggtgagggactgctgtaatcagtagtaaaaagtgacccctgacagcctgacaacttggaaagagacagaaaaactgtaactttagacaagaattggggcagaaactttgaaggcttgggaatattagggtgggaaccctcaattgaccttgtaggcaccactctataataacataaacaaataattgctatttactgttgttaacggtgaactatggaaataatacatttttagatacactctttaagaagagaaggaaatgttcaatatactttggaaatgtttacacccagaataattaacctctgagctgttttgatgtgtaaggctcttaccaattcagaaaactaggctgtgcagaatgactcattcattggattgctgagatttcctgtaccgaagtcatcttgtatcactttattttgtaatcatcaatttaaaaaaccctcacattttgtctagtgtttagagattttaaaacttggtaaatgggaaccaaattcatatatgggactcgatctcagtataataaaaaaaaattactagtaatagtatgaatatatctctcgttttatgcaggactgattttaaatagtgagatatcctgcgcattaaacatgatttatttgagatttgtgggatgtaatttggtgctttcattctcttaaatttattgagaatctagtgattcactggttcatcctttgcctcaggctcatggtcattggagattcca

SEQ ID NO: 14559 - DNA, 1019 bp, Homo sapiens
cccaactactcgggaggctgaggcaggagaattgcttgaaccgaggaggcggaggttgcagtaagccgagatcgcaccactgcactccagcctgggtgacagagcgagactccatcttaaaaaaataaaaaataaaaataaaagtcttcttgatttccagtgtattcctcctgcactttttggcctgtttggaccacagatttgtggctttttatgaaatacacctgtagattaattttcagtttttttatggtagtagacagtcaaaggctagatcactgtgatgagtagggcttccacatttaagaaaaagctgtaatgaagtgaattgaatcttgcttcttttgggtcacccaaaagcagtgataagtgctgagtgtgttaggcacttattaacaaaagtaactcagaattgctgtctaaacctccatatcttttttcttctctccgtgtagttctaaaaatgaccatatgatattccttgaatggtaagagcgtctattcttcttagcatgttctgtgtgtcacacactgtgcagacagcaacatacacacacaaacactatctcctgttattgaatggatgaatgatacaaagaagcagaacgagtggttgtgaaaattaaatgccgtatatttcaataattagataatgggctgacctctcagagtcaagcacactgtaagtgcttaatccctggtttctaagttatatgaatcccacaaagtagatactatctccattttccagatgaggaaacttaggtttagagtggttggaaatgtgcctaaggtcaccagcatctttctgatcccaaaacctatgttgaatccttgctattgcatgaatgctgaagatagattccagttcttaggtaaatgaaaatgttggcaattgaacaaaaaacatgtatttttaatggtagttttaataattcacagtaacattgtatatgtttcatcttggaaaaattcttttcagcttgtccatttaaatattcctcttacttatgacattt

SEQ ID NO: 14560 - DNA, 1665 bp, Homo sapiens
gcaattcaaatgtaactaggggtcctatagttgtatttgctgagtctggcaaccttgtcctgaattagcagtgccccgagaagcagcagggtggcctgtaggaggtgttcatctgttatgtggaatgaatggtgcctcttcagaattctgttgtgcagtcttctattagagaaaaccctttttatctgagcatggagttgggacattacctgtagttggatatgatctccttatccttctccctttgattgatctttttctttgagctgatttgagctttcttcttttctctgtagttggcggaatcagctcagttacattttttactaagttacccacattctgacactccttgacagttttaagatcttcttctaacacacttgaatagaatggatactggaatctattttgacagctgttgaaaatctattctgttgttacaggaggttaaggaggttatttgtaacactgggattatttaatgaaccttttgaaaaggtgtgcagactgttcaggcaaatagtattttttagaatttaaatgattttggttttcacagttaaattatcaaatgtaatgcttttaagaattatacacctagtaatatttttcattaattttctccaccagtgtagtaatagtacattacaatgttctcaattaccggtgccttctaaaatgcaggtgtagagtctttaaatacagctagtctattgccagctgtcccatagataaccttctctttaaaagtgacctttgagcaatttcataaagaataaatatttctagttttttgttgctgaactgctaaaagatggttctatacatgtaacaggtggctttagttgggttgctttcactgaaatttgattcaaataaagcattgcattattttacctttggaattataattatgtgccagactgacttcatttttggcacactgcatttcagtgttgaggtttgggttgaggatggagtgtcttgcatgtgcaggagtaggagagctttgcagataagacatagcagctgaggcataaaacatcagcgtcttttttatgcatcagaggaatttctatcagaggagttgctgttctactaggctttagatttagggacaactgttcagattaaccccttagacttgaattttctttgatctcaaatccaaagcattaaagaagactctgtcaagttaaccatcagtacagtgcttaacacacagtaggcacacaaaataaaatttgttcaatggaataaactagacaattatgtttgggttattatttaatattaaatgtgatttaattacttgaaatagacgatctttcagttcctgccctttaccgcattgcttggcaacacaattgttaacatgttttctgattaaaataaatgttcttacctaagtttatgctagattatagcataaagatttagaagcattaaatggatgaaatagaatttgacacgtaggctatttctgagaaatctattttattaagtatactttctcttgtgcctgaaaaaatttatcaaattgtccaaatcaggttctagcaaagcaggtagaagagtttttaaaaagacaatgttcttagaagaattatatttctattgtagaaagatttaaaaaagaaaaagttacataaataacaccta

SEQ ID NO: 14561 - DNA, 1065 bp, Homo sapiens
cagtactatgttgaatagaagtggtgaaagtgggtatcctcgtcatgttccagttctcaaggggaatgcttcagcttttctccattcagtataatgttggctgtggcttctatgccaattttgctgagggttttaatcataaagggatgctggattttgtcaaatgctgtttctgcatctattgagatgatcatgtgatttttgtttttaattctgcttatgtggtatatcacatttatggacttacatatgttaaatcatccctgcatccctgatatgaaacccgcttgattatggtagattatctttttgatatgctgttggatttggttcgctagtattttgttgaggatttttgcgtctatgttcatcagggatattggtctgtagttttctttttttgttatgcctttccctggttttagtattagggtgatactggcttcatagaatgattagggaggattccctctttctctatcttttggaatagtgtcaataggattggtaccaattctttgaatgcctgatagaattcagctgtgaacctgtctcgtcctggactttttttttgttggcaatttttaaaattaccatttcaatctcgctgcttgttattggtctgttcagagattctgtgtcttcctggtttaatctaggagggttgtatgtttccaggaatttatctgtctcctctaggttttctagtttaagcctgtaaaggtgttcataaccttgaatagtcttttattatttctgtggtatcagttgtattatctcctgtttcatttctaattgagcttatttggatcctctctcttcttggttaatctcgctaatggtctatcaattttatttatcttttcaaagaaccagctttttgtttcatttatcttttgtattttttttttgttgttgttttaattttatttagttctgctctgatatttgttatttctttttttctgctgggtttgggtttggattgttcttgtttctccagttccatgaggtgtgcccttagattgtccatttgtgctctttcagactttttgatgtaggcat

SEQ ID NO: 14562 - DNA, 1617 bp, Homo sapiens
catctctgtttcctggtagttgcctcccctttcttccatgtggattagctctttttttctttatttcaactatcctgctcttgtgattattttgagccattttaaatccattatggaagtaggtagagtccagattataaataaaatggtatcacttatattattgtcacagtcacattattggttcatctttggtgttagtctcctgcttccttctgaacttctcctttgtcctttttgattcattcatattgggtggggatgaaaaacaagaatgagtctcaacagaaacccagcgacattttaaagcctaaagttttgatgcctattgtacaaatatttttatcttcatgtaaatcaaagggccatcacctggcttaggaatggcaggattagagtaattagtggaatttgttgcggttaaacagtggactccatagccagggcctcccgtggaggctccaatgttggaatttataaagtgtgttttatttgaatcttgtgtctgtgtgtaaagaattgctgttttaggcagaaaccaaggctgatgacttggagagaatactctaacccctcagacactcttacatcactatcctaagaactaataatgggtattagagttgtaaaactacagtctggctagactgacttaaagactttggggtgagttgatggtgctaagtccttagagaaagaagaaaactccgaaggcatctggcaaccatgttggagagaaaattgagggaagcaatgtagaaacaaaggagaaagcaggacagaaacagcagggtcctgggatccgcctggtaccagagacttctttttttctctcacttgggctagacccagagacaggcttctggtttagaagaggaatgtgggactggctggccatggattagataactgtggaatcaatgcccttttacttgggacatctttccaagtctggattatttccttaggattaactgggaaatcactgtacaaagaagaagcatatcaatagactgcttccttattttcaacccagaataatgcatttttccattgctagaggactgctttaaaatacacacacacacacacacacacacacacacacacacacacacacacacacacgaaacaccaggatagcacagacagtggctttcagggatgaagatacttcctttcctgtctgttctagtctcttctggttgcgtggaacagaaactagtacaagctagcttaaggagatgaagctttattgcaagaatataaaatgttcttgtgggaatgacatgagtagccccatggacagaaaccttctcagccctgttggggctagaattgggaagctttggagacttaagacattcaccttcgggacatcacacaccggggcctgttgtggggtggggggagtggggagggatagcattaggagatatacctaatgtaaatgatgagttaatgggtgcagcacaccaacacggcacatgtatacatatgtaacaaacctgcacgttgtgcacatgtaccctagaacttaaagtataattaaaaaaaaaaaagacattcgccttcttacattctctctcagttcatgcctgtcaggctaaatgtctg

SEQ ID NO: 14563 - DNA, 1034 bp, Homo sapiens
gtggtgtttcaaggtgctggaatccaccaccaagaatggtggcttcccacaatgccttttaacaagaatgtgtctcttcaatgcacgttgtaactttctctttgaatttattgaagaaccacaaattaagtctgtgtctttattgaagcaattcaggtgatgggaagaggctcttgaatcaagaaagaaaggaagaaccaggagtggtgatattaggtaaggggagatttaggatcactcttccgcaatacaaaatgaacttcctgtgctaagaaaacttacagccctgaataaggagttgatggcatgtctatgcaacgtacaattttattcctgggacgtcgttggaaaaccattatattagatgatcttcaatcttttgtagttctgaaaatttatgaacgcttatacatgttgcttataaatcctaaatgaaaaaagggctccctgtcttaaatttatgttctatctaatatgcacttttaaagtttgagtttttattgcacttctgatctttttaaaattataaaacctatcatacatacaaaagagtatataacacttattaatatgtatagttaaagattaataagatgaatgcccctgtgcctaccacccagcctaaaaaacagaacattaccagtgtctttgaagctgtctctgttaatgtgcatttctagactgctttaacttattggatttgtgcattgcagtgttttatttgtgagcagttatatcagtgaataccaagtgagagtggctcagccatttttaccttatgctcaaactcctttcagatttccaatctgtctgatattggatttaagaacagttaaatcttactgcttggaaactgatctttaacaagctagttttcctgctttaaaataatagtgttgttcgtgatgttaatttccctgtttcacttgacaattacagcgggggtagcttccctgagcacaggatgaggatcagtcagcttgagtatctggtacagaaggcaagctccctgtgcaccaaaaatctactcaggc

SEQ ID NO: 14564 - DNA, 1048 bp, Homo sapiens
acttgagtaagatggcttctggtgcaactcagattaaaattggcatggagctatatggtattgctgatgtactttatttccagtggtgtgctggagccgcctcccaccagctcccgtgagctgatcatgcacagctttttccaactatgctttcaccttggtagtctgaaatcagccatgttaggagtatttacaccaaggaaattggcatatgctacaaatccatccctctgccccatgagaaccagttgttaaaatatttactactgcttaaaaaccaagagataataaatttacagttcttagatttttcagcagtatctactgagaagcaatcacaaaggaaatatcaggtaaggtctttgactttgagaaatcacaggtttagccaaaccatctccatctaagcatttatcaaatttctctttaaacttgaaaatcaactgaagaatttaagtcaagtttagaatagataaatatgtctttgagtatattttacaatgtctgtttgatttagtagatccttctggggacaggtctttctagagtttggagagttaccaagttactaaggtgtatttcctcagggctgcttcttgcttgttctcagagaagttggccaatcactgacaaaatgcatttcttttcccccttttcctgtcgtttgttttatttttaagctagcacttgtattttggaaaaattatttactcaaagatatcttgggcaggaaagaaaaatgttttacttcagttatttattggatctctataaagcaatatgatttctcctaaggctaactatatagtaggactagcatcataaaaaagtcatgtctttaaaaatgccaaaaatttgattttttgtatagaaagaaaaaaagagcccctttattaatcaaatatatgtccctttaaaaatgttttgagggtaaatttatagaatcatttccaatgtgtagacaactgccatcaaatgcattcttaacaatgatttaaaatagaatgaactgtaagtgggaaaattgctaaggatgataatctcctga

SEQ ID NO: 14565 - DNA, 1261 bp, Homo sapiens
tagatccaggagccgggcgcagtggctcacgcctgtaatcccagcactttgggaggctgaggcaggcggatcacctgaggtcgggagttcgagaccagcccgaccaacatggaaaaaccccgtctctactaaaaatacaaaaaaaaaaattagccgggcatggtggcgcatacctgtaatctcagctactcgggaggctgaggcaggagaatcccttgaatctgggaggtggaggttgtgatgagccaagatcatgccattgcactccagcctgggcaataagagcgaaattcagtctcaaaaaacaaaaacaaacaaacaaacaaaaagaatatagatcgggagtcagaatgcttgtgtacaaattcaagccttgcttcttactacttttgtggtattgggcaacttatttcaccaccattttatcatctgtaaatggggataataatatttgcctcataggtttgttttggtgaggaacaacttaagttttggtgaggaacaaacataggtttgttttggtgaggaaaggagttaatacatggaaagtgcttaaaatagtgtttggcatataataaatggcaataaatattaaatattaacatgtaatgttaaataatacttaatattattactaatattaccaaggaagctagttttgtggtggacgtggaaaaacgaacacaaatcagacaggcagaattggttagagtcttaccctttaactttccttactgtagaattcactctccactaacctatggtttccatttgttattcttcattgtttcagtggattttccaactgtgtcactctgtctagattgttctttaatgattacatttagagttgactattccttgttgacatatggagagacgctttgatctgaaaccatcaaaggcttctctctccatgtcacatctttggagaggcttctggtcatggtatgtggacccatgtcagcttctctttctaggtcaccaccttttttggcctttaccccttgagtttgaactttgacttatttagtagtggcaagagaagccccatggctcttgatataccaagtaccaacctgtctgccagatactgaaagatgccgagatacttacacagttgttctttaaaataataagctgcacaaataatagtaaagctgattctgaaactagtttttttgtttgtttgattgtatgttttttgagatggagtctcactgtgttgcccaggctggagggcagtggcgcgatctcggct

SEQ ID NO: 14566 - DNA, 1034 bp, Homo sapiens
acccagcctgacatacattattgatttactcattttttcattcacctagaaaatgtttattgagtgcctactgttgtgtcttccctgctcaaggcacttgagatgtatcagtggataagacaaagctgccttcccttggggcactggcagtctagtgtgtacaaattgtagtatataaataaagtatatgtgtggtagaagatgataggtgatgtggaaataagaacaagggtaggatcaggcctatgtaatgaggtgactagaccatgaaacagggtggtcagggtagacccctttgagaaagtggggtgtgagcagagagttgaaggagtggaagttagccaagtgggcatctggagcaaagagtattccaagcagagataaagctggagcaaagatcccaagacaaaacagtgcctgacttgctagggggaaaaacaggaaggcagacttgctaggggaaaaagcaagaaggctggtgtctgaaagggattgaacgaggtagacagtggtcggagaggctggagacagaatgggcattgtaggtcattgcaaggacttggacttttgctgtcaataaaccagaaagctattggaggatttccaacagaaaagtgacatgatccaactcacattttaaaaggttctctttggctgctgtcttaagaatagatagggcaaggacagaaacaggaaaaccagttaagagtctgttgcagtaatcaggcaagagaagatggctcaaaccaggatggctacagtagaagggtgagaagaagtcaggctctagatatattttgaaaatagaaccaacaggatttcctgacagaataaatgaagggtttgaaggagaggattgaaggaggactccagtgctttttgcctaggcaactgggtgttgctatcagttgagacagggaaagtctttatcaggtagagtaggatttggagtaagctcgggagttcagtgtcatatacgatgagtttggcatgtctgttggagatactgagtaggtagtgggatatatgagtgt

SEQ ID NO: 14567 - DNA, 1032 bp, Homo sapiens
aggaagatttttttagacttcagtgacagtgagggttattaaacactagatgagctacagaggaagacagttgtgttctcattccccaccagactttaaaaataggatggattctggctggaataaatggcttaagttggactagcctggaagaggggaggaggaaaggggagatgaacaggatggcttctgtaagaccctttttgagccctgtagtcttatgatttctgttatttcacaagatttagagtcatagactaactatagctgttctacaaacagacaggaaaacttttaaatttgcatttactgatttttttttcttttaagatttcccgagtaaactcaggctacactaaagaaagatgtctcatgactgtagcttacacatatctttgatatctttaatttcaaaaaattaaacctttgaatttcacggtcttaggtaccgaggtgagggtaaatgttagtgccatcaactattgtcaatctagggtatattttctaactgttaaacactaaatctcattccggccatctcccatccccaccccagctctcaacattctattaggtaaaatacattctcaggaaatctcaggtatcagtcagttaagagcagggtgtggagatgaggaagccaggtgagcagggggctccaaaatctggaaaatgctataaaggatttttgtgggttggaggaaggctaaaactcccaacatactccagggtagtcattccttgctaaaactttggaccatttccacagacaaattccatggctagagctagacagtgaagccaatgggagcacagggtttgctttagagatttgtttcacagccagcctttctgagatgcatccttttggaaaagcccagcaaaacccatatggagctaaaagatttataatggattactttatgctttagtcttctgctttgcacagtaagacattgctatataaagggaattaattataaggctgtgaatagtgtttgagagattcaagttggtacataaacaatgagg

SEQ ID NO: 14568 - DNA, 1009 bp, Homo sapiens
acacactagtaacaattttagatggtgaaacagtaaccactcatgctttggggactagcatgctgaagggaggctctgagaacatcctgtttgctggcattaatagtcctgaggtttgctgtttccgatcttccccttgtgaatgatcagtgttgacataggaagctctgtactgattcccctcccttcacggaagcctggcacagaaagcatgcccatgactgcccaaccactggttataagggagcaccggactgaaaaaatggagcttgtcaactctgggaatgaggctgacaagaagctgctcccctggcacattccttgaatcttcctcctgcttaggcctgtgtcctctccatcccacccccatttcattgatggttccagggctgagtgcccagagtgaggggatgtgtcttaatgctgatacaaatgggtctttaaaggtatataacaggcagcaaaagccatgtgtcacttgggtacgaaggggatgtatgtcctctttctacttcagagttttcaggggactgtatcacaattttggagcactagcaaaacccacttctgactttatgctacatggttatgtgtttaagcagctgagccccaggtgatgcgtagcaggtgaggctcaaccctgctgtaggtagactggcttggcatctgtcaatcggcatcaaaatagctgaaagaccaagggaggctgagacagccgttgcttttaactagcttctttccaggtgaagttcagtgtctgtttccaagaaagcctgtgttgcggttctagttggtaactgtggggaggaagcattggcctttgtgtttgaagggtaaggaggatcctatagaagggccattcaccaggagaaagatcttgtccaaagaagaatgctgattccactgtctggtttttggacacttattcttcttccttttactttgttttctttctttccttttctttttttttttttttttttgaggcccttatgcacactttcaacat

SEQ ID NO: 14569 - DNA, 1147 bp, Homo sapiens
ctgcctcctgctcacaagaggcgacattggaacctggggagatagaggggttccaggtggtagaggggagattgtggtgagaatgtgcacagcactgtcggtcagtgggagccgagcccctactgcctgcagagtgggtgtctcagcccttgattctagaggccctcgaggctgagtgtgttgacagttacctgcagttgctgtggcaggtggctgagccccggctctggagtcagagagggtcttgtcccagctttgtgttagttggctaactttgatgagtgacttcacctctctgaaccccacttgggcttgttgggcagattaaggagcccgcacacctaaagccccccacgtggtctcacactaagaggtgcgtgctgggccctggctttcctctcccactctagatgcatgccaggccctgctctaggcacagggggcagagccatgttctgctccaatgaggtgagcactcagcggggtcaggggagggggacagtagaaagtgaatacaaatatcaaatatgacagctgtgggcgaaggctatgaagaaaaataaagcaggggaaagggatagtgtgggggcatggctcatacaaggaacaaagtcctttccaaggagatgatagagccagaaatgtgaaggcagggagagccatggaaaccaccccagggaacagcggtgcaaaggccgtgaggtaggagggggcctggggcagagcagaggaaggagagagctgtatgagggtacagagataacaagggcctggatcatgcggggccttatgggccagggcaggaggttggctgttactttgatgggaggccgctggagggttctgagcagaggaggcacagactgtgacatgaccagctatttttagtctccgttttgttccaggttcccaagttcacagtggactgtgtttaacagaccttagaggttggttgagcctgagtggagccccttccatgccagcgctgacagtccccaagtcctcccagggaggtacaccagacctttctcctgaaggtggaaccaggtggcaccctgcttatctcctccttgtcaccaacataaccctttatcgcctgcagaattccagcttcccgtgaccgaacctgacatcaacaacaggctgg

SEQ ID NO: 14570 - DNA, 1043 bp, Homo sapiens
catatattgatggggcaaaagataacattttataaaagtaggacttcttgagcatgaacttaacagttctctagcaaaagaatagctacgcaaaatttatataaagctctaattctgagatagatacaaaacagtaactaatcagaaagttttcaggccagtcgcggtgactcatgcctgtaatcttagcactttgggaggccgaggcaggtggatcacgaggtcaggagttcaagaccagcctggccaagatggtgaaaccccgtctctactaaaaaaaactacaaaaattagccaggcgcggtggcaggtgcctgtaatcccagctacttgggaggctgaggcaggagaatcacttgcacccaggcagcagaggttgcgccactgcactccagcctgggcgacagagtgagacttcacctcaaaaaaaaaaaaagttttcattgcattaactctctctctgtttttttttttttttccttgacatggaatcttgctctgtcgcccaggctggagtgcaatggtgcaatcttggctcactgcaaccgccgcctcccaggttcaagccattcttctgcctcagcctcccaagtagctgggactacaggtgcacgccaccacacccggctaatttttgtgtttttagtagagaggagattttgccatgttggcgaggctggtctcaaactcctgacctcagatgatccacccacctcggcctcccaaagtactgggattacagacatgagccaccgtgcccggcctgcattagctctttaagtacaggtgaacgtgtggaaaactcaactagggcagtgatatttttcactttattttatggacatctacagcattagcacacgtaaaaacagttaccctaaaatccaaacacacttgattgactggtacctgtaacatacaagttgggagtcttgcaaaagaaaacctgttttgttagcgtgtaaacttgttctttgggggaagatgtcaaatttttctgtaacttcatggtctatgagtttcacctgtatctgacatgtgga

SEQ ID NO: 14571 - DNA, 1022 bp, Homo sapiens
tggagtgcagtgacacgatcatggctcactgcaacctctgcctcccaggctcatatgatcctcccaggctcctgtgtagccgagaccacaggcgtgcgccaccacacccagctaattttttgtatttttgttagagacagggttttgccatgttgcccaggctggtcccaaagtcagctcaggtgatccactcaccttggcctcccaaagtgctgagattacaggcatgagccactgcacctggccttagaaatggagttctttatatggcaagtctttattattagttcacacttttaaacacttgacagtcatattttctgatatagatacttgtttcaaatcccactactttgaaaatggattcaagtgtctgtagacatttacttgactgttgggatttttaaattttcctgtgacataatcagacaatcatatcagactgttgagtatgactgattttttttgttgcaaaatttatttttcatttgtaaaatatttgagattataggaccccttccccaagttcctggcgtaaatcttttttttttttcctccaagacagagtcttgctctgtcacccaggctggagcgcagaggtgcgatctcagcccactgcaacctctgcctcccgggttcaagcagttctcctcagcctccctagtagctgggattacaggcacccgtcactgtgcctggctaatttttgtatttttaatagagacagggtgtcaccatgttggccaggctggtctcgaactcctgacctcatgatccacccgcctcagcctcccaacgagctgggattacaggtgtgagccaccgtgcccagccaacccttaatcttttttttttttttttttttttttttgagctgaagtctcgctctgtcccccaggctggagtgccgtggcgcagtcttggttcaccacaacctccacctcctgggttcaagtgattctcctgcctcagcctcccgagtagctgggattacaggcgtgcgccgttgcacctggctaatt

SEQ ID NO: 14572 - DNA, 1284 bp, Homo sapiens
agaggaggcttggctttttcttatccacactgaaaattagctatgagaaaggaactcactcttcactctatggcactattaagttatcatgtatattatataatatatagcatgttatttaagtgggaacaaagtgtcttgggactcccttccaacatctctttttcatgtactaactgtgcttttccctcttgtgtctaatagaagcttaatatgtaaactagacaaggtagatgacaaatggttaatgacttttttttgttttctttagatacatccagaaagtgcccagaagaaacttcctgctggaaaaaatgaaaaagcagtatttataacattagaatctggataatttgttaacatggcagaaaataatgaaaatattagtaaaaatgtagatgtaaggcccaaaactagtcggagcagaagtgccgacagaaaagacggttatgtgtggagtggaaagaagttatcttggtcaaaaaagagtgagagttattcagatgctgagacagtgaatggtatagagaaaaccgaagtgtctttaaggaaccaagaaaggaagcacagctgttcatccattgagttggacttagatcattcctgtgggcatcgatttttaggccgatctcttaaacagaaactgcaagatgccgtggggcagtgttttccaataaagaattgtagtagtcggcactcttcagggcttccgtctaaaaggaaaattcatatcagtgaactcatgttagataagtgtcctttcccacctcgatcagatttagcctttaggtggcattttattaaacgacacactgctcctataaattccaaatcagatgaatgggtaagcacagacttgtctcagactgaattgagggatggtcagctaaaacgaagaaatatggaagaaaatataaactgtttctcacataccaatgttcagccctgtgtcataaccaccgacaatgctttgtgtagagaaggtcctatgactggctctgtgatgaacctggtttcaaataacagtatagaagatagtgatatggattccgatgatgaaattctaacactttgcacaagttccagaaaaagaaacaaacccaaatgggatttggatgatgaaatcctgcagttggaaacacctcctaaataccacacgcagattgattatgtccactgtcttgtaccagacctccttcagatcaataacaacccatgttactggggagtgatggataaatacgcagccgaagcactactggaaggaaaaccagagggtacctt

SEQ ID NO: 14573 - DNA, 1038 bp, Homo sapiens
gggaagccgtgaacatcggcagccactggcgtttcctccgagtcctcggaactccggaaactctgggagcttttagcccgcccaccaggggaaagcggcccggagccggcgccaggtggagcccatccccctaggcctggcgggccgcagtaccgccaggggcctgcgggaggcgcacgcggcgcggcctgaggggagggggagaacgggcggaggcggtgcgctcggcgcttcctgttccggcgccaggaggagccgcgcgctgctggtgctgttgccgccgctgctctagctgccgtcagtcaggctgcgcccgcgtcttcagggcccagtccctcggacccatcgccgcttctagaccctactgcggtctcggatattgccgggtgaggctgcttcggtactagtgggagtcgtgaaggggaatcggggagctggggttgcggagcccgcgggcgcggccaagcgggaagcgggcgcggtgaccgaggtgcatcgagtcacgtccagtgctcgggccgtggtcgcctgcctggcaccaggactaagcgtttctatcggtcgccttcctccacgctgcgggctgcctggggatcgccccccagggagaaggtgtcggaggccgctgacgtcgcgcccgacgggtttctgggcgcctgacgtcaggtctggctgcggggcggggcgggcgcgggccggcccctcccccaccccttcccggcgggcgcgacccgctaggaggccggttcgctccggttgatcccggactccctttgttcgtgcgtccctaaacggctgccggcctcgcgccccttggccccgatttcccctctacccccaccctattacactcattcattaatttttaataaaaagggaaaggcctgaaaagattcttacaagagtctcgggcgcttgttaatccgcagtgtgacaacgttctggttatgacttactagaggaattgctcacggatacattagatgaatacccagggcaaaccacgagaagggcagaattcagtgatctcctttttta

SEQ ID NO: 14574 - DNA, 1028 bp, Homo sapiens
gagactccatctcaaaaacaaaacaaaaaacttacgaattatttatttctggaatttttcatttaatatgttcggaccttaggtaattaaaaccacagataaggggggatcaccctaacatgaacgctgtttattctaggaatggagagctggtcactttactaagacagtgccgtagaacagaacttgttactaattcctatgcttagggctttgttttttaatcacaagattctagcacctcccctatcttccagacttggattttgaactttaaaattttgaagtagtgttgtgaatcagttgaatattattaacttgtagaataatttatgtaattccatgactaggtaactgtataattctgaaaacctgaacagtcaaggccatttggttcactttgattctcaactccagaattaatatgaactttgatacagaatcattttctatttcagaaaggctaaccctgtttaaaaagcatgttagccttacaacttaccgtatattttctacactgttagtcctaaaaattttattgtgtgatgtgattgacgttaaaccttaacatgggaatgggttgtatgtgggtttttttgtttttttgtttttgagacggagtttgcactgtcacccaggctggagtgcagtggcttgatctcagctcactgcaagctccgcctcctgggttcgcgccattctcttgcctcagcctcctgagtagctgggactacaggtgcccaccattatgcctggctaattttttgtatttttagtagagacggggtttcaccttgttagccaggatggtctcaatctcctgacttcgtgatccgccctcctcggcctcccaaagtgctgggattacaggcgtgagccaccgcgcccggccatgttttttgatattctgaataaaaaggatatagcagttgggataggcttgggttcttgtcctttatgttcttgtcctttcctcatgataatcaaatcataattagaaataagatgctaagaatacaaaggtggct

SEQ ID NO: 14575 - DNA, 1050 bp, Homo sapiens
gcgcaatctcggctcactgcaagctccgcctcccaggttcatgccattctcctgcctcagcctcccaagtagctgggactacaggcacccgccaccacactgggctaatcgtttttttgtatttttagtagagacggggtttcaccgtgttagccaggatggtctcgatctcttgacctcgtgatccgcctgcctcggcctcccaaagtgctgggattataggcgtgagccactgcacccggccaaaaaattttaatctcatatatgaaagctagtctgcttagtatcttacaaagcagtgagagaaaaagatgtgctactgagtaataaaatgatcaaaggcaaagagtacctacagtcttttatttatataaagtcaaagaacaagcaaaattaagtcaaaaattgactgccatgaggcaaggtagttgattggaaaagagcatgagtaaactttctggagtgagaaatgttctgtatcttggggtggttataggggcgtatacaattatcagagcttgttaatctgaacacttaagatctctgcattttgttgagtgctaattacacttcaatttaaaaattggtaaaagtactccaggacatcaataaatttaaatttgggagtacacacagtggctcatggctataatcccaatactttgggaggctgaggcaggagggtcctttgatcccaggagtttgagaccgggtctgggcaacatagtgagacacctgtctctgcaataaatttttaaaattttaagaaatttgctgggcatgatggcacacacctgtagtaccggctattagggagactgaggcaagaagatgacttgagcccaggaggtcaagattgcagtgagctgtgatctctctcgccactgcactccagcctgggtgacagaatgagaccctgtctccaaaaaaaagacgaggaaatgtaagttaaaataagacgctaatttttaatatctattgtcattataaacaataaatttaataatatccagtggtaaaaggagttagagaaatgagtgtaaattggca

SEQ ID NO: 14576 - DNA, 1054 bp, Homo sapiens
caagagtttcaggctgcagtgagccatgattgtgccattgcactcctgcctgggtgacagagtgagactctgtctataaataaataaaagagatgctttttgtgattcttggctttgggggtagtaaagagattttgataggtgatttgccttagtttactgagataatagcatgtttggaaatgtttcctgtatttatgaaaatatgtatttctttaaatgaaaatttaagatgttacttctgttgttctcttttaccctgatagtattaatagccaacatttattagaaattattatataccaggcactctgtgaaagtgtactacatgaaatatcatatttaagcctcaagttaaccctaaaacagttttgaaactgaagaggctctatctcagagtatgtagctcctttgaggttaagccaggattcaaatccatatcttgactgttagttctatcttcttaattactgtattttgttgtattaatacagcagagaaatgaagcacaatatgattagttgtatttagaaaacgagtttctctgaagaatttgcactgtaaagttgatacgcaaagtagcatctcaaggtttatgttaaatagagtattttttaaatgactagcttagcttttgaagatattcttgaggtttataatccctgcccctataggttactattctctgtgggtttataatggtgttcgatgtaacttttccctagataggaaagacgtatctgttttgtgttccagttggcagatgcactacctgaacactcccctgccaaaacctctgctgtgagcaatacaaaacctggccaacctcctcaaggctggccaggctccaacccttggaataatccgagtgctccatcttcagtgccatctggactcccaccaagtgcaacaccctccactgtgccttttggaccagcaccaacaggaatgtatccctccgtgcctcccaccggaccacctccaggacccccagcaccctttcctccttccggaccatcatgtcccccacctggtggtccttatccagccccaa

SEQ ID NO: 14577 - DNA, 1226 bp, Homo sapiens
gtcaaacatccaatccagctataaaggaaaagaaatctttaaagtacccctaaaacttcctccttgcattagtgtaatttctttcttgctatatatattatctaaaaatatttgttttgcaaagtgtatgccagagtaaatgatgtgacttgctgtttggatttattaagcaataaatttactttaagccacagtaaggagttaataaactccatttgcaaaatctagaagttgactttttcttttttctattgcagtcttaccattaagttaacaatggacgaagagatgacgctttgctttttgaagtacatgtatatgcacatgaatgcatatataaaaattgctggtttcactattagagggcattcatgaaagaacaactcttgcacctctcagagaagataactgcctcttgtacttggatgcgtagtacatcatatgtatacaatcagataaaagcatagaagtaaatcattcggatgtgatttttatttggttttcatggaaagttaaagtgataaagtatattgaatagttctttgacagaatttgtttaaactatgaaactacacacttaaaaatctaagatgtggattattgttagaatctgcaacttcattggcaaattatttcaagtatttttctataatcactttccccttctaaataaataaacttcgagaataacccatcataatccaaacaaatgatgcctcaacattttgagctgctctgtcggacaaataaacctggtcctcttgaggttatattttggatatacatttttaaactgtcagtaattattgtcagatgtggagttcaatagccagccagtgttcatttttatccttgagcttttagtaaaaacttcctggttttatttttagtcattgggtcatacagcactaaagtctgctatttatggaaactaacttttttgtttttaatccaggccaacatgtatgtaaattaaatttttagataattgattatctctttgtactacttgagatttgattatgagatgtgcatattgctttgggaagagctcgaggaaggaaataattctctcctttgttttgaacctcaaactagataaaccctaggaattgcttaactgcaacaagtaattttcattcccacaaaaacctgaggcagctcttttgcccagagcgttccctgtagccacccccaccccacttgcccttggttctttagaagga

SEQ ID NO: 14578 - DNA, 1033 bp, Homo sapiens
ttgatagctacctccttctaagaaagcaaaatggttacctttgagaggaacattcagtgtttaatcatcccttatgttaactagatgatagattcaagcttttagaaatgagaaagtagaaactaatttgttaagatattttcagactgcggaatgttgttagctttttctttcacttctcttcaaggacaggtgttagctgtctacaatactgttgaactctgttgtcaaagtagcccccttagtctacaaggcaggtagccttggcttgaattatcaatatcaaaatgtcagttaaccatggagggataaagtaatgtgaaaagtgagatggctgcaaagatagctctccttacagttattttggctgtcctacattgggataagctgacaaattagcagtatttagtttaacactggagcaaatataatttgagtaggaagaagagatagcaggtttgggaatctataattatgaagtccattgattttgggagaaaatctgttgctaaaggatttgaagggccatgaacacaatttgggattattactccctataagtataataattttgctagtgacccatactgtccagtgtgccctaaatcatactgctattgtactccctttgttttcaaggactttgcaactggtatttgggggagatttttttttttttttgagacggagtctcgctctgtcgcccatgctggagtgcagtggtgctatcttggttcactgcaagctccatctcccaggttcacaccattctcctgcctcagcctcccaagcagctgggactacaggtgcccgccaccatgcccggctaatttttttttttttttttttttagtagagatggggtttcactgtgttagccaggatggtctcgatctcctgacctcgtgatctgcccgccttggcttcccaaagtgctgggattacaggcgtgagccaccacgtccggccgatttttttttttttttttaatgtaagaatggagataaaagggataatataatttgcttttata

SEQ ID NO: 14579 - DNA, 1084 bp, Homo sapiens
acctggaaactttttttaaaaaatgtattttcatggtttcacagatttttcatgttattttattctttaggcccaattctgggcttctctgagcaagtccagagcctaattaactgtaaatttgttgtcaaaaaggaagaaaaaagggcctgagatacctctttgcatgtgacctgcattcactaaggatatctggaaaccacccttcctccgcaaaccctctcagcaacatggtgtccattgtggtgattttctcttcttttaaggctaggctactcttggtaaccagattatccgtatatatgataatatgaagtcagggaactttctctgtctgtccctactcccctcactcccccactttctgttatgaaagatagttctacttttatcattaactgctacgcatttagtgagggtcacattattaaacttggagtttaccattttcccacaggagatttcgctggcattccttggaactcccaatttcagtagggcaatgaatgaatgaatactttgcagtgctacttttggaaggaatttctgctttttgccttatgattggacaaaatgcagctgtaaaattttaaattgtttttgatatgttattcaatatcccatgaaagtattcacctaaagtggagttatgaaatggatggtgaaataataagaccattctggagcagggccagtttctttttttcctgttgtgagatgacattgctctgacaaacatgctatcgtgggttacctgacccaggcaagtccttttttatcaccgtattaatactcttagcaccaatccttttgcaactgatctccaaagcaaaatagaattctaaatcttagctcacttattttaaataaggcatgcaatagaattcgagtgccaggagaggatttgggtcatctcatagagcttattcctgtggcttttacttatttttgggacagtctcactctgtcgcccaggctggagtgcagtgatgcaatctctgctcactgcaacctccgcctcccgagttcaagcgattctcctgcctcagcctcccaagtggttggaattacaggtgcacaccac

SEQ ID NO: 14580 - DNA, 1755 bp, Homo sapiens
aagtccttaatccttcctcactgaccttgacttgtaatggtacggttttttttttttcctctctctcaatacttcctgctccccatttgccttttagaggtgattgataagatactgtctctctgggttttacatcaacatgcagatggaagttatgcccattttcaggcaggaaataaaagcaaaaatttacccgttaggtactattggatttgactggaagttcacaaaacaaggctttcctgtacatgttattttgatcctcaccacaaccttgggaatttgacagcattgtgtgcgctactgaaagttgttctggttttttcttccttcttttaagaaatgaggaattttatgctgacagtgttgagtgaagtctctaaagatacaattttgtatacaaattatttttcgtatgtacaaattttgtatacaaaattttgtatgaaagatacacatttgagcctttggatcaccagagactgagaggcacttgaattattatgcaactgctgatattgagagtgttagtcaacctttaagatgaaagaatcttggcaagatactatgtaatgcaattgaaggaggtccaaaatggacgcttgcatgtgtctttcccgagcggtagcgattctggggccggctacacggctgtatgtaagttaggtgtactagtttttttgtatgtttttttgaaacagagcctcgctctgtcacccaggctggagtgcagtggtgcgatctcggctcactgcaacctccgcctcccgggttcaagcgattctcctggctcagcccctcgaatagctgggactaccggtgcgtgccaccatgcccggctaatttttgtatttttagcaaagacggggtttcactgtgttggccaggctggtcatgaactcctgacctcgtgatccgcccacctcagcctcccaaagtgctgggactacaggtgtgagccaccgttctcggccaggtgtgctagtattaatgggaaaggatgaaagtcagactaaataagagttgaaagacctgcagctgataaggagatacctgctattcggcagtgcatttttcctctctattttgcttagcagttaggaagtttttatttttcctcatggaaaatgagttaataggtgaagaataaatgtcatagtgcatactgatgtgactgagggacaacgacagatatttaaaaagccagcttgtgagtgttgtgtaattatctaacaagccagaactcgtgtgaaacatttttacagtctgtttctatttttggcaggatctttttcacccatgctttccagttttgggtctgggaagcagcttttacttcatataaatggttttatggaaattaattttgagattggtttattattttaagtcattttattcacttatataatttgaaggcactaaattaaacagtcattcgttatccatctttctgatggataaaagcaaatgtcaagatgagagtgctgtattgtagaaattcctcaggatatgtttattggatcagttattttattaacatttagaatttaaattcttaaaaatttttactttattttttaaacttaatttatgttcagctagcttaatttgacagtttttatgttctagtaactttaatcttgttttaatatttgtttgggagaaaacatacttatctttagagacatcatttagtgttatcttccaaaatttgcagctgtttagaaccagatacttgagggaagctactat

SEQ ID NO: 14581 - DNA, 1051 bp, Homo sapiens
atatagtggaataataatgtgttcagggtaactaagcacaatagcatcaccagaatatgtgtatctgctgttaagcaacatcatcaacaaataaggttaggctttcagtccccacctatgatgttattttttgattaaaaggtttctagactttttgtttgtttgtttgttttattaaggccggaagaaacatcagaatcgattgagggaccaggaaatggggcctctagggaagagaaggcattctgctagatggcttttaaaaatatttccgccagagtcacttgtctcattaacaacagtttttgtcttagaagtctctctgtgattttataaactagcatgattttgttatgaatgcatgctgctctggttctctaataagcccaacatgcatttgcatcatgtcggcaataagcactttttttgctgtgttaacaatgtcatcttcattgttgtgtgcctgtgttttgactgtgacctgtcacatgaggttgggtgtggaattttccacttgtggcatcgtgttggagctcaaaaagttttggattttggaccatttcggatttcggatttttggattaggaattctcaacctgtgctatcagccaggaggtataaatgatgtctcctttgtgggtttaaatataatttattacttaagaagttgcttgtaattggtatggatcaataatttatgcttcatgacctctaccttatgatgtggttagtcatcttttggcattggtgtgagaaacaaggttttccaaaaggaaaatccaattttttttgggtatttctaaagtaaagaaatttttttaattttgtgcatttaaattataatcattacatagaaataagtacataaaaatggaatataaaattacatacactaatcatagctgggaaaaaatagtccaagacttgggctactgcaaaattaaatggtttaattaagagtagattttgagtaactcttgttgtgttgtttatgccatgaaaaaggcaagagtttatattcacatattttaaaatagtgttgaaaagaaaa

SEQ ID NO: 14582 - DNA, 1060 bp, Homo sapiens
gggtttcaccatgttggccatgctcgtcttgaactcctgaccttaagtgatcctcctgccttggcctcccaaagtgctatgattttaggcatgagccatcatgcctggcctcagatggtgttttgtgggatacatttttagaaggggaactactggatcaaagagtatttgcagttggacaatacacttgttttctcatatccttgctgacacagtttttgtatttgctaatttcataggtaaaaaaatgacagagggtagctctaatttgcctgataggacatgtaggtagagaaaatacttctatgcttacatactgatgatacctagaaagcatggattacacagttagctaatgtaatgctagttggggtgaagcatatgcagcatgttttcattttatttaggccaattgtagcagaagattgatggttaaaggtagatgagaaacccttctactcacaaacatgtcactgtgaactgacaggaaaacagggtaataatgtattctttaggagtttttaaattaaaaagtaggttagggctgggcatagtggcttatgcctcctcacttcaggaggtgaagtggggaggattgcttgaggccaagaattggagaccagcctggacaacatagcaagaccccacctctaataaaaaccccaacaaattagacaggtgtagtgacatgcacctgtaatcccagtgctttgggaggccaaggcaggagaattgcttgagcccagaagtttgagaccaccctaggcaacatagggagaccctgtctttagaaaaaaaatagctgggcatagtggagtgcacctgtagtcccagctatgtgggggtggctgagatgggaggatcgcttgagcccaggagttcaaggttacagtgggctgtcattgcaccaccgctctccagcctgcgtgacaaagtaagacctcatttctttaaaaaagaaaaaaaatcaattcatgtataaagttaatttagcattaattttctttggtcctgttttctatcacatacatttcttaacattcagaaacatatttttaac

SEQ ID NO: 14583 - DNA, 1043 bp, Homo sapiens
tatagaaacttaacagcagtggctgacatttttgcttatttgttaggtattggtggtggtgttaatcgggtacgcatatgctttccttaggatttgcatttgctgttccctgtgtctagaacgctattccttagataaatcttcattccttacctccttaaaatgttttctcatctatcaccttcttaagtctgtactgatcaccctacttaaaattataactgcccctctttgcttgcacttctaagcttccttaccctagtctgtttagcagttacctccttgaaacatgctctgtagaatttacttattatgactattgtctctcttactaccagaatgttagttccttgagggctttgtctatttgttcactgtattccaggtgcctaatagatgctcaaaaaattattattattttttttgagacaggatctggctctgtctcccaggctggagtgcagtggtgtgaacactgcagtcttgacctcccaagttcaagtgatcctctgacttcaacctcccaagtagctgggagtacatacgcacaccacagggttttgccacattgcccaggccggtcttgaactcctgggctcaagtgatccacctgccttggcctcccagagtgttgggattatagacatgagcctggcctcaaaaaacatttgctatatgtgtgaagagaagaaagggtataacgtaagaaagttagctataaaatagtttacattttaaatacttatatttgaaagtattatttccattatttaaaaagtaattttaaaattttgcttttggagactactgtgttccataattacaccggggcaaacacagctgtgctaagtttaagaactgtatattctgttggtggaaaaggactgaatattgctttgcccaatacatcacctgcctcagtcttctagtggttttgtggtgaagttgctttcagtggtggtttagttaatgctgtttgacttacgtcccgataaatcagttgaaaataaatgcatttaatatatttaacctaccaaatatca

SEQ ID NO: 14584 - DNA, 1065 bp, Homo sapiens
aactgaactttacattctatcttaaaggcctacttaaatatgtgtgcatgtatataatacatagtcctcctcttttcccagtcattaaaaacaatttgagtttatgctcagtttgagtttgtagtaagccatgaagttgagttatgtgaacactaaacttccaaaaagttgcttaattgctaaatgttttggacttcattatgattagggaaaatggagtcagggaaaccatatgagagagtaatttgtttcctaaggaataaaagcagtagaaacccacaacaaaccacacattagcctttatgttgttacttgttggcttcattcagtttgcacttctattgtttgtgaaacaagtggttttctttagagttgcaatgcttatatgtttttaaagttttccactaaagtcatttctacacagcgtcattttgaaaattacatgatgtcagatccagtatccagtgcatatattttaagttaacaaattatagaaggaaatagtacgtggtctttcaaacttttgtttaaaaacaggctggctgggtgtggtggctcacgcgtgtaatcccagcactttaggaggccgagggggcagatcacttgaggtcaggagatggagaccagcctggccaacatggcgaaaccctgtctctactaaaaatacaaaaactagccagacgtggtggcacacgcctgtaatcccagctgttcgggaggctgaggcaggagaattacttgaacctgggaggtggaggttgcagtgagcttagattgcatcacggcagttcagcctgggtgacaaagcgagactccatctcaaaacaaaacaaaacaaaacaaaaaacaggccatatttaggtcttactaaatggaaacctttctcaagtagtgcttttcaaataataaaaatttttattgtgtaaaggaggaagggaacttagcatctgcattggaatcattttttcctatatcctattagctaattccgagattgtttaatatggtatccacccatttcatttggctcaccctttgctctcatgaaagtaagactgattgttc

SEQ ID NO: 14585 - DNA, 1032 bp, Homo sapiens
cccaaagtgctgggattactagcgtgagccatgcccccagccattattcctccgatttttataaataaagagtggctcttatgctaataagtgactcctttttggaattagcattcctgtgcctttactgaagcagaaagaaacatgaactgtcgtatcttctaacttgttttgataagcaaggctgaagactagcaagttagaaaactggcatctgcctttgatattgtggcttcctattagcactaagagaaatatcgtcctttctccttttctgaccacgtattgtcattcgattcttcatcaggtttacccctctgtggacaagagttagtatgactctttaggtgttaggatttatccaagtacattttttaaaaaggaaagtttagttgtcttttatggcttcattttggggagtgtatactgtctttaggtgagagttttcttttctttacttttttaagctgaacttagagtctaaaaggaatactggaattattgaatgcaggatttgggcctttactggaataaagttgctcaaattatacctggttcactattctatctccccatagacctggaaaggatttaagctgacaggtatgttgagactgtccttcatagccaagcttagtgagagagtcgctgtagttggtgctcaccctctcaccttctagtcacccctccatcatgaacttttgacttcttgtccactgtacttcctcacagcagggtcaccaggggtctttatcaccaagtgggcacaattctttatttgaccttgctgctgactgtgccttccttttacagactttttttttttcctgattatgaaagtaatacatggtcattgtgaaaaattttggaaaaagagttgttatctctatccagaaaactttctcctcattgaaatgtttctgtgacaactgtcttcttcctttcctcctgtttctcttgaccagacctgagtcatttcgcctcctggatatctctgtcttgtaggcactcaagcccaatgttaatttttgt

SEQ ID NO: 14586 - DNA, 1029 bp, Homo sapiens
acaaaacgctgtccatgtgcagctgtctaatgttaggcattacaaagctaaattaaggttataaggatccccctcccccccataggaattagaagattaattcttaaaactagtgatttaaatttaaagacttgaagtttttcaagtggagaaaacagtaaaagctacttaaaccacatgctataaaatgttttagttatatggaaagcagtagatagaatgtcgtccttttgtttccaagaaacttttctgtttcatttcctgcatatgttcattataagttactcttgtgtgatcttatagacatttcttaatggttacctcgaaaacgccaactctgaccctacctaaaaatgcataccctccctattctttgtcacagccttatttttattcattgcattatcagtcacaacctgatgttataatacgcttatttctttcttggtatctgcctcacctacaagaatataaataatgtgaggcagggactgtcttgttcatcgctgtgaactatatgtctgacacctagctagtgctcaatttgaatgaatggatggtctgatgcttgaaaatgattgggactcattgagtcttttgctttacttgccatcctttattagcatggctaactgagtggtatttggtatgccatataaagtgaaactctaagaataagggttttaggtttactcttgggagagtggaatggaaaacaatttgaaacatgaatttcagcaaaatgggtgtgcttagtcccagttaatcttgttcatcagtaatgtaagtgttctgagtggaatctgtacataaataatttagtgaatgcttgtgtttagatctaattaccttttgaaataaatttggacaagctaagctgtgcactgaaaactccctagtgttctgaatgctatgttgcagaacgttgaagatgttgccttaaatctgtaatatccacacaggttgaattcacttacgtgccaccaacctgtacttgcctactttattgggaagtcatgttcatttgaa

SEQ ID NO: 14587 - DNA, 1029 bp, Homo sapiens
ttttagtctaaataattggatttagttttaacttgaagtatttctgagcttgaaaattctggagcacttttcaagtaaaaaatacagctgacctttggacaatgtgggaattaggggcactagcaccctgtacagtcagaaatgtttgtataacttttgactctccagaaacttaactactagtaccctacttttgactggaaaccttaccaattacataaatagtcaattaacatgtatattgtacgttatatgtattatatactgtattcttataataaagctaaagaaaagaaaatgctactaagaaaatcataagagactgtgtatttacaatactgtactgtttattgataccataagtttatatcatctgtaagatgaatcatctgtctgaaacagtgagcaactgtaactgcagacctcagtctaagtacatatcaagtaattcaacttttccttgtcatgacttttctctgcttctcgggagcacttccagcattactagtggcacttggcatgggtctcatggtgttattcagggtttacagtgttgtgctaaaaatgatgaaaaatatgcgagaactatgatcactttttactgtgatactgttactggaaggacagaatgctcatgtggagataattagagtcatggataggagtcagggatacttcagacacttgagctcacagtaataccaacaggaggtggccacaaaattattacagtggtacagtatgtactgcagttaattttatgcagttgtgatttggtactgtatcttgacctttgtttacatttccatctattgcaaatggcaccatgtacagtaaccatatagggtctggtttgtgtaagttttgataaattttaactttattatttgtgtatattttatggtagtaaattatgaaatagactgggatctacatatattttatgcattcatgacatttttcttaatttttttcaatatttctaggctgtggtttccctgtgagtttttttcatattgttgcagtctc

SEQ ID NO: 14588 - DNA, 1058 bp, Homo sapiens
attgaaattctaataattgccgccagatttttatatcacttaaaattttaggtttcacttctttgttatattaatataaattgggtcattgtgccttctgagaagtttgtaaaatttaactcagtgatgtgtctcaggttttgtatgaacaaatgtaagttataggagagcgagtaaatagaattttaaaactatttgattagtatttgtaatacgtactctgacgaaacacgacttacatattatgcgtgttaacttattataatttttttttagttcttttaagatagggcaggaatgaaaactctcaatatagagcaggattttaaacctggggcccgtgcatattcttcagggaatccagaaacctggagattatatgtaaaacttagtgagtgtggatactttttttctttgagaaagcgggtcagtatctttatcagtttcttgaaagatttatgtccgagtgaaagataaaagacaatggtgtggaatgtggttttaaaatagtttggacttgctttcctattgttccatggatatttctctcctggttctcttgacagagaaatcctatttgccaccactggctgtttattgcattcagattggaatctattatgacttatgtgtgatgaggttaaagaggtaactaatattagaaagggtaagccaggctaggtggtacatgcctgtagtgtagttccagccacttgggaggctgaagtgggaagacctctggagtttgatgctgcaatgcgctatcatagggattgtgaatagccaatgtggtccagcctgagcagtgtatatatagagaccccatttcttaaatgtgtaaaaatactacacattttttgtgaaaactcgggttgtgagttagcaaaaatcaccagtgttatttcttccatgtgtgaaagaacaacatgagcgtctacatgtctccatgtttttcaactcaacaaacatgtattgaattgtatactgtggacttagaaaattttaatgacctggttcttattacccagagctaaattaactttgtctcaacctcttta

SEQ ID NO: 14589 - DNA, 1093 bp, Homo sapiens
tgatttaaagaactaacctgtttagatttgtaggtcaggttagatttgaaatgccacttgaaagagcagcagttttgactttaatttttatgagactgacaggttctttttttttttttgtccccaccttcttccctatttaggttttataggatcacattgacaaaagtaccatggagttttatgagtcagcatattttattgttcttattccttcaatagttattacagtaattttcctcttcttctggcttttcatgaaagaaacattatatgatgaagttcttgcaaaacagaaaagagaacaaaagcttattcctaccaaaacagataaaaagaaagcagaaaagaaaaagaataaaaagaaagaaatccagaatggaaacctccatgaatccgactctgagagtgtacctcgagactttaaattatcagatgctttggcagtagaagatgatcaagttgcacctgttccattgaatgtcgttgaaacttcaagtagtgttagggaaagaaaaaagaaggaaaagaaacaaaagcctgtgcttgaagagcaggtcatcaaagaaagtgacgcatcaaagattcctggcaaaaaagtagaacctgtcccagttactaaacagcccacccctccctctgaagcagctgcctcgaagaagaaaccagggcagaagaagtctaaaaatggaagcggtattgtaatctatttaatctatttaattttattgtatgatttggagcttggaattgagatattctgttaggtacatacacagaatgtttaatattgaatttgaaaccatgattattcatttcattatgtgtttgcttcattaacattaattgctggtagaaattagtattgatcataaaatagcactttaaacttcagggcctgatgcagtggctcatgcctgtaatcctagcacattgggaggctgaagtgggaggaccccttgagcccaggtgtttgagaccagcctgggcaacaaagtgagacctcatctctacaagaaattaaaagaaaaaaaaaaaaccccatacatcttataaatatccaactttggctattttacttaaaaccacttag

SEQ ID NO: 14590 - DNA, 1050 bp, Homo sapiens
aagttctgggatacatgtgcagaacgtgcaggtttgttacataggtatacacatgccgtggtggtttgctgcacccatcaacctgtcatctacattaggtatttctcctaatgctatccctcccctattcccccacgccccgacaggcatgttgcccttcctgtgtccatgttccccttcctgtgtccatgtgttctcattgttcaactcccacttatgagtgagaacatgcagtgtttggttttctgttctggtgttcgtttgctgagaatgatggtttccagcttcatccacgtccctgcaaaggacatgaactcattcttttttatggctgcatagtattccatggtgtatatgtgccacatttcattttcataatttttattagcccatggtaactattactaattctgcattgctttctcaattgcagtcaagtaagggagaattgactacgcttatacatcagcttcaagaaaaggacaagttactcgctgctgtgaaggaagatgctgctgctacaaaggatcggtgtaagcagttaacccaggtgaagacattcttatgtacgagggatatacttcccaaatcagaagcaacaaaagattttagaaattgtccataatcagtagtttaattatttgtaatttatgtccaacaaaagtaactttcctttagagttttgggagggtagatagagctgtctctctcttttgtgatattatagcctatagttgaattatttaaaataagagtacttacagatatcctagcttcagaataacaaaagcactctgtacagaagcatgggaatttgttttaattggatctgacctagatctgttctcaatagaaacacagaatttggtgtgatcttgtttaagtctgattaatggaataagtgtgaaactcttaacataggtaatttatttatggagcttcttgtgataagtataattttttgtcaagttcttcacatctcagaaattttactttgagaggttaatagtaaaaaataccagaaaagccaatctttaaaacatcatgaaa

SEQ ID NO: 14591 - DNA, 1556 bp, Homo sapiens
atgtaggagactagttgcaataagcagttttatgatacaacagtaaaggtagaggatgctttttttccctctttttcaaagtagaaattctgtgtttgtgctaatttatcctttctcccttttaaaataccaaggttcaactacaagaagctgagagaaggtgggaagaagttcagagctacatcaggaagagaacagcggaacatgaggcagcacagcaaggtaaggggaagaagtattcatgtaaactttgtatataattttgggtaaaatttcctctctcttccatctgtgaagaaagtataatttggcattttggttatagctcaataaaaatagcttttatactttcagaatatctttctttctttgacatttgttagggttttaaaataagttacctactagctttgcctgaagcattaaagttgcaggcaaaattatagtacatgataggttaatgggatcctggctgtgtgtgtttcttttctgtagttattctctttggttctttggttaattcttttttttttttcccaagaaaatactcacttcttattttgaagagaaaaacagagcattaccatcccaggtagtttacttaaaactgcccatttaatacatgctaacgtttactcatttactcttaatttgatggatccatctgggagataatggagtacgtgttatgtgtattgtttatttctctactactccctttctcccatgaaacgcaagtatagcctgctacaggagcatgcaagaatggaagcaggagagattcaaagaaggttttctagaggagagaatgcctacacgaaagatgagtatgagtaactaggcaaagaaagagacctctgtaaaatgtaatgttttattacagatttacagagtaaatttgtggccaaagaaaatgaagtacagagtctgcatagtaagcttacagataccttggtatcaaaacaacagttggagcaaagactaatgcagttaatggaatcagagcagaaaagggtgaacaaagaagagtctctacaaatgcaggttcaggtattttttcttctttttttttttttaaaaaaatacaggtggtcacttattagatctgtgtgtctagaagagagactaaagtctaccttatcctaattctgaaatgatgatgaataattataactttgtcttttgagcacttgtcacaatatggtgtgtttgaaggtgtgctcacccacagtcttaggctctttgtgttagattaggaatagcacaaacatatctttaacttctgtcttataagctaactcagattgtctaatcattgtttaaaataatgccttttggaatctaagaatgccttaaaaaaaaaaaagaaaaagataaacaaatgtacctataatacattgtgttcatatacatggggttatttattagcatgctttttctctttttggttgctatttatgaaaggatattttggagcagaatgaggctttgaaagctcaaattcagcagttccattcccagatagcagcccaggtaatgatgctttcttattgctt

SEQ ID NO: 14592 - DNA, 1859 bp, Homo sapiens
cttgaacctgggaggcagaggttgcagtgagccgaaatcatgccattgcactccagcctgggcgacaagagtgaaactctgcctcaaaaaaaaaaaaaaaaaaaaaaaaaaagagccaggcatggtggctgatgctggtaatccccagcactttgggaggccaaggcgggtggatcatgaggtcaggagatcgagaccatcctggctaacatggtgaaaccccatctctactaaaaatacaaaaaattagccaggcgtggtggcgggcgcctgtagtcccagctactcgggagggtgaggcaggagaatggcatgaacccgggaggcggagcttgcagtgagctgagattgcaccactgcactccagcctgggcgacagagcgagtctctgtctcaaaaaaaaataataattataataataatatcattaactttgaaaaatagttaatacatgtgttacaaatttataatttcagcattcaagaaaaagatgagaagttaaagactgtggaagaattacttgaaactggacttattcaggtggcaactaaagaagaggagctgaatgtaaagcattttgtagttttgttttccttgtgattattcagtgacataaaaggatttctctgtaatttgtgtaaggtttttcccatagatcttaaacttaatagtacctctcacatttataaatttatataatgcttttttaattaaagtttttttagaagttaaaaatgcataacattgactgccttaatgaggtagatactattgttatagtttgtcagtttccccacttgcaccaaaattataaccaaatgataactagcagacttaattcatgaaatagtactggaggccagagaagagattgccattctattttatggttgtcattagctttacctaacttgattgggaaaaggttgcgggaagaagtaagttaaaagatgtatttgaatgtagggagaggagtagcttaactaacaagttgtatactgtatatttttgaggttgtccagacatgagtggaaatatatgtggatgtaattgaattaaaaatttgtttggatagctatagaagttacagaattatagacattacagaattatagacatggaaaaaagtgagagttttgggccttccagagtagaaaagaagcagctaaagaaatgagaaactaatgtattttgaagctagctatatttttcagagagtaaaatcatgttttgcttatgtgtctttgaaaaaggcaataagaacagaaaattcatctctgacaaaagaagttcaagacttaaaagctaagcaaaatgatcaggtaatgtaaatttttacaactgttctttgtctctgtgttttttgtttgtttgtttgttgtttttaaattaaaagaaacggggtcttgctcttttgcccaggctggagtgcagtggtacaatcataactcaccgtaacctcgaactcctgggctcaaccgataactcctccctcagtcttctaagtagctaagactgtaggctcatgccacaatgctcggcttttattttatttttttgtagagatagggtctcgacatgttgtccagactggtcacaaactcctggcctcaagtggtgctcccaccttagcttcctaaagtgttggaattataggcatgaggcactgtgcccagcccattctcttttaaacagtgggcaaactgttgcataaaaacaagtctgttgtttctcttcctccaggttggaatatgtcaattatagttttaatttatgaatgataatcagtaatagaggctgcaatttaatactgattgccaggtactgtgacaaatactccagatagggtgccattgcct

SEQ ID NO: 14593 - DNA, 1054 bp, Homo sapiens
tttaaactgtcaagatattgaggatatttattaggttattatctttctaaaagggagattactctgttcttggaagattactcatttgtacaattattgtttgtcttttggctatggtgtaactgtcgaggtgcttatctcttatttgcttggaaagcttagggcctcatttctggcctgtttatagtagagatatgtagaccattaaagtaggtaattttaggtatatttctgccttacattttttttttttttgccattttcttttttaaattaatagattttattttttgtggtggagaactttttatatttataggaaaaagagaaataccaattctccctattaacatcttgcattagcatggtacatttgttacaagtgatgagccaatagcagtacattgttatcgttgttattaactgaagttcatagtttccattaggaaactatgtgggttttaacatgtataatgacatgtatctatcattacagtatcatacaaaacagttttactgccttaaaaatctcctgtgttctacctgtgtatccctccctcccttcctccacatcccggcagcaccccccggcaaccaatgatcttactgtcttcagagttttaccttttccagaatatcgtagttgaaatcatacagtatatggcttttctggtttggctcttttcttttctttttttttgggacagagtctttctctgtggcccaggctggagtacatggagtgcagggctgtgatcatggctcactgcagccaggacatcctgggctcaagcgatcctcccacctcagcctttcgagtagctgggactacaggcacatgccaccatgcctggctaattttttagaaacagagtctccctgtgttgcccaggctggtcttgatctcctgggcttgagtgatcctcccaccttggcctcccaaaatgctgggattacaggcatgagccaccatgctcacccttggattgccttcttttacttagcaatatgcatttgagtttttccctttttatacatttatctcactcttcat

SEQ ID NO: 14594 - DNA, 1260 bp, Homo sapiens
atggagtaggtttggaccacaatttaaatcaagttcaatgtgactcatttttaaggtcttttaaaattcatctcttttaaatgagatgcatttcaaaaccttggaagtgtcttttaattgatcagaattctacaggatagaaactgctatatccttggtggttttacttggccatgtaattgtttcacatttcagatgcagtcatcatttacatcttcagaacaagagctagagcgattaagaagcgaaaataaggatattgaaaatgtatgttatttgattgttttacttgtaacctatggatttgtttttagcattaacggttgtctgaagatctatagtttaagattactttatagttatgctcttaatatcttgggtagtgtttgagttgatatagttttatattcataagtgtcataattttgtcttgtggggaaatattatgaaaggaaattttaagtgtgttaacttttcctttgttgcattgctagctgagaagagaacgagaacatttggaaatggaactagaaaaggcagagatggaacgatctacctatgttacagaagtcagagaggtacttacaacagaatcttttcaaacttgcttctcaattcagattaagtttataacagtgatatttcagtataagttgtttgtggcagagcttccgagtagcatacaaaacatgggctatcataaggagatcaatcttaaactctaaacttcattgcagctgaaagatctgttgactgaattgcagaaaaaacttgatgattcatattctgaagcagtaagacagaatgaagagctaaatttggtaagaagcttgtcctccactgggtatcaagtaggcactgaaaacactttattgacatgtggagaaaccatccaggcttttttttctttgctaacatctttagcttggcctttttgtaagtctaagataatcttcatattccgatgattcctaagattatctttcttttcttgactcctaaaatgatccttcttttcttagctcctaacaatggcatgtttggcttccaactctttttcaaaattttccatgttttataaatcctattttctcaaacagcagtcttttctgtgaataaagaaatgaaataaagattggctgagttacgaagattttcttctcagactatcatagttaatggggccttttattttctaacctgggagaagattatattgaaagtcaaagacacatattcttcattcaagggcagtaatct

SEQ ID NO: 14595 - DNA, 1095 bp, Homo sapiens
aaaacttcatatgacctaaaaaaaaaaaaaaaaatctatttctgctcttttaaattatttattcactggggtaaggttgtattcaaccccttttcagtgctactcactcactttagctttacattctcttgagtaggactaataaaaatggattaccagtgttgttgttttaaatgttttctaacagaatttggctcacatttaaaagtatctacctaaaagcttgtttcctttgaatcctgagatttttctcagtttgattaccattagtgtgaattgctttgagtctatttgaaagggccatgctagatcaaatggaatatgtacttttggtgtttgacaaatgtcttctgattgccttctgttgctttgttttaaagtgaaattcattctttctgatcttttacagagtgaagtaattgggaaactgttcatttgaggataaaaaaggcattgtattatattttgccaaattaaagccttatttatgttttcaccctttctactttgtcagaaacactgaacagagttttgtcttttctaatccttgttagactactgatttaaagaaggaaaaaaaaaagccaactctgtagacaccttcagagtttagttttataataaaaactgtttgaataattagacctttacattcctgaagataaacatgtaatcttttatcttattttgctcaataaaattgttcagaagatcaaagtggtaaagacaatgtaaaatttaacattttaatactgatgttgtacactgttttacttaacattttgggaagtaactgcctctgacttcaactcaagaaaacacttttttgttgctaatgtaatcggtttttgtaatggcgtcagcaaataaaaggatgcttattattcaaacttgacttgttctaatttttattgagctttaacagatttcattagtagtacagatcattgtaatttagaatacagctattaattggcaaccattcaacaagataggtttatgtagcctctgtaacctttctaactgatgctctgggtcctcttcagtttggtccaatgtaaagtgccccaggagtgctggggtttcagaaaggac

SEQ ID NO: 14596 - DNA, 1034 bp, Homo sapiens
ataaagaatagtcaggggcagacttcttgatcccccaaaagagaagagagagacgtggaagggaggagtggggatgcctgtgaagccggccatacccttgggtttggcgtaggaaaactaattcatttcctggaggtagtgatattgtgtaaagcatcgaggcttgagctgccttgcatgcgtttcactctagctgcaagaggctatgtggtgtatagctgtgggcaatagctgtgttgctcacagagttagagctagatttttcatgtgtcttgcatcccgggacagagactgcatatgggcacctgccacttgtggaatctgcccaggatgagatgtagggagaagcagttaccaccagaaggaggctgcagttataccctcgtttgttaagacacgtttgtcccttgacctcattcatttgggtccccagaaaaggaagggcaaaggaagaatgaaagaaaagacgattccttgttgacattattaaagccagggggcagatgggagatgggttattacactgggttggactggacttgtattaaccgaagttacagaacagcttttgggtctgcttaggatgtgcagaagagggagactccgcaaagcagagttgaagactatggttgggaaaggacactaacttgttaggctgttctgcaacctgggtggtagatttttttttcttgactacatttttgtcatttttattttcctagaaaatctggccatttcatatttgttggcagagttctacaaggcagccaacataccacttgtacaacctatcacatgccagatgttttttaagcagttacgttagttcatttaatcttccctagaatttaactggccagggggttgtgctttcatcatcttcattttatagataaggaaactgaggcacagggaggataattaaattaaggtctcacagctactaagtagaggaaccaggtttccaacctccaacctaagctgtctggcttgattgccttatttatactcataaaaaaaattttttttatata

SEQ ID NO: 14597 - DNA, 1035 bp, Homo sapiens
aggatttgagaggcagtttggtatagtgggaagaacatgcatttacaggtgggtgacctgaataagcccttctctcttgctgactggctctgtgactttggcttaattcctcctcctcctctctgtttctttatcaatttgcaaaatatgattggattaggtaggcttcaagagcccttcctggtctgtgctcagtaattctgttcattggcgcaaatgtagaaactatttagttacatattctaagttccctgacagttgttttaatagcagaaaagatcaatgctgtggttgttttttatgaagatgtgcgtaaaaacagaatgtttaaaaaagttgtaatgatatacatctgtttgactcattggtgttaggttacccatgggagcatttaaattgtgtaaaactttatgttccaagtttaagaaagacagtgatgttttgaaatttagctaaatagactgaaataaccagcataaagaggagatgatctcatgataaaaatttagaactgaatagcattaggggaaattcctaatgtagatgatgggttgatgggtgcagcaaaccactatggcacgtatgtacctatgtaacaaacctgcacattctgcacatgtattccagccttaaagtataataaaaaaaaattaggactggaagggggcctaatggtcatggtatatgtttagcccttatattttattcttgaggacacaggctcccagaacaagagaggttcaagttcatagttgatctgggctgagctgggtggctgtactcccctactctaccctttcctcactttaagacagattccagcagcgctgtcagttcctcaaagcatcctttctggattcaatttgaagcatgtggctctcttgctgactaatggcccatggtggtttttggaaaaatattgcttactctcttagttcctctcacctcacagttgaatggataatgcattttgcaagactttttttttttcttttgatgcttcacaaaatgtatttttattggctctctcaacca

SEQ ID NO: 14598 - DNA, 1050 bp, Homo sapiens
ctgtggcatacaagcctcttggatgacagacctaataaatatgcatcagggggcattttcagcagcaggtttaaggctattgcgagtcattctcgattgaggttttctttctagccatccgcataatgcttctcactctcaaacacttcactctgcttatccctgcttttctgctcatgcagaatctgtttttaggataagaaatcattgtttcaagctttgtacttccattcttattagtactggtttaacagaatttaaccagagcgagcagttgtgtgtttggcttctaggctattggtataaaacggctgatcgtgattaccaagtgcctcggaggacctcggtggcccccctcctttcccatcttgtgcttcctgctccatgattatagaacactaattataatcagaactggtgatgggtgagcaattaggcttttctggactgatgattgattgatggattgattgattgattgcgttggggaaaggcccttcctgcggaaggattgtagacacaaaggagtgtgctttcacaccagatcccagaaaattatgctgactagatccttgatgtagtacataagattacattatggtttgggtactttcatcacatgctgtggatagaattcaaaatgcaacctgacaagactgataggaaataaattcattaagtttttattgagttgttttttgtctcctcgggttgttgatcattctagtgagcacaatttcagcctttttgatgagttattccaaacattaagtactgtacggtttgaaaatcttagctaacaaaagcatttttggagtggctttataatttataagtcatctgcaagtctttttgcatttgttaatctccaatattatctgaaatttgttgagagcgtggcagttgaagaatagcctagcttactgagaaccatgcttctggcagactggaacataagcagctttcacccaggagagctaatgcatgacacagattttcaagcttttaaaggtcacctgacatgaaataacagaactaacagagattcga

SEQ ID NO: 14599 - DNA, 1046 bp, Homo sapiens
ttttctaaaaatatgattctgctatccagtgagactctactagcacagatgaaagaaaaactgggccagaagtcctcacagtaatcatgtcacacaccactcccaattcggcagtctttatagctggtaaaattcagctcctttctttggaaggggtgatgcaaaccagcttctttactaaaaaaaaaaggtgagattttagtatttgaagttcgtcatttgtagggcagctcattgctgttaaaatttctggcttttctggctttcatcagaaatgaatgattaatttattctgaaaatggacctttcctccttcccccttctctttttcctgccttgttaacgtcttagcacatgtctgaatgaaatggaagtatagctctgttgattatagctaaatcacccgtcatgcctcaaacatgtataatttagagctgggtgcttcaattgagtgctgttacatctgaaaggtttataattttacagaattgatgcacacttctcatgaatgtcgtcaggacttgtaaagaatagttaataacagcctcctcctcccaaaacacaagcaaattccttctaccccattgtacttattcatttaaaatgaattacaaccatatctatggtcactttaaatgaaagccatttgaatatattcttgttaggtgcaaattaatctaatttcttcaaaagtagtcaaagcaacagtagatacaacaataatgtctccttaagttctattttgccttcacagtgaggtctaaaaagaaaaggacattaaatttaagcaaacctttgaaaacaactcctgttttgaaaacaagtttttgaaagtttctaagtcaagactacctacattaaagagttatatgcagatgccatacaatcctcagtaggatcatatgcctctttaagaggatgtttgtcaacttctccttatggaataacggcagggaagaagaatattgaagacttaaaagtacttttagtttttaactttatcccaaggacttaatagtgttttcaatttgaaattttggtttaac

SEQ ID NO: 14600 - DNA, 1040 bp, Homo sapiens
tgctgtgcattgtagggtgtttagcagcttccctggccttcacccgctaagtgccagtagcacccccgcattcttgctccccacagttgttaatcactaaaaatgtctcaagacattgcagcccgtctcctggggagggctgggcaggtaaaatctgtcctattaggaagcactgctttagtataccaaagcagctagcatttattgatttggaatagatgtagttgaaatgtgatgttctttatcctaaagagtttttgttttaaatctgggtataaacctcatgatttattttccttctgttaattgagtgtagtaggtggttttacataatctgtatgtacatggaattgaatttgtgtggctcatagaaggatgaaaagtatacacgaccaagtgataaaagaggccgactatacatatttttttctcataattttgaagtgaataaaatgctaattaaaaaaaactggttatttgttttctgatctataagtcgaggaaaaaatctgagtttttattccaattgatatatgttacatagtcgatttattacagtgtttctttaattaaataaattccttaatatatagtcttattttctataaaatatatttacatgaagcatttcatacggggctactggctgtacctgttgatcatgagtttggaccacctggcatataaatgagagtcttgatttccatttttcctgaaaacccacttttggaagaaaaaggaatggcttcatggaagcatgtgtgatatttatatgcaatgtaaacatagatcacctttgttaatgtttttatttttaaaaagctcctatttctgaagcagtgccattgaaagaatttgttaggaggtgccaattgaagcgatcttgtattaatgagggatgagtagataagaaaatatcaaacaccacggaaacaagaaagattaatatttagtagataagccaaagctagaaaaagagaaataaactaaacatttttaggtggaaagaacattttatgaggaaaacaaaggaaatccaa

SEQ ID NO: 14601 - DNA, 1032 bp, Homo sapiens
tacggtttcataaaatgtgtaattcatattatttagagaacaaatggaatattttacaattttttatttatatggctatttttttattaaaaggctggttgttaaataatatcactcctgacatgaataactttaataagtatatctgtgattaggtgattatcctattatatgttttacatagagtgagttttagatcaagaattggctgttactaaccctctattacatttccattaattttgactaatcagtacttttctgtaaaatttgattaatcaatacttttatgtttttatgtagttcttttggtaattctgtcgttgcaaataatgtaagtatagtaatttgtgagctgttctttttccttcttatttttggtttagtttttcacttctgttactcacaaagcaaacattaggctctcttatttaaatacattttctttcaaaccacctaagtaaaatgttgagctttttgctgctgtatttaagccaggcagtgttactttcactgatttaagatctgaagcagcatacctacttatcatcatttcattatacagatttgtgtaagagtgtttaaagtaggttttaagatacagtatgtttaaaattaaaatttgaggtatgatttgcagtgtccactgaatacttcaagaaagtagaagagttgcttcattatatcacagttttgttagtttcagcaattaatctagtttgacattagcatttttgtttttctgtaatctttttttttctagcatatgtagtttcatcttttcaaggaccaacaactaattttgtgtgtatgtattgatacttaacataaattgctgctttgctgtgtggtctgggtagaattattcattgttttctagcaaaaagggacatttgtctcttttttcctgcatgtattatgtggttgggagaataatttctgtccccattctcccaagatgctcatacattaatcactggaatctgtgaatatattaccttacatggcaaaagggattttgcaggtggaatt

SEQ ID NO: 14602 - DNA, 1035 bp, Homo sapiens
gtaatcacatggaactcaatcctgccaggtccctgaatgtccctgaaaacagattattccctagaacctccatagatgctgccctgtcagccccttgattttggccttgtaagactcaggcagagaaatcagccaagcctgctgaacttctggcaaacagatctgtgacataatacattagtgttgtttttagctgctaagttttgtggtaatttgttataaccacaagagaaaacttatacatactattttatggaaaatcaaatgcaaaatacctcacattactgagcagctcttaatctcgtggtgggggaaatgaaaggttggggaagagatgaaagaattgagaggcagggaatgaggttttttgtttcttttaaaattcttttggatggagcattagagcaggaaagcttgactctagcactcagtaacttaattatctgtgtaattatctgcattactgatatacagtaattacaattttgacttgatgcatgtattcgttggaaaaataatttaatttgtgttgtccttaaagcataattttattagagttgcttttaacatgtcagtgcggaaagaatagttctatctgcatttataattatgcttctactcaaacttatttgaattatgaccctgattcaggcacttgcagcccatcttttcatggaggaaaagaatcttctgctgcaaattaaaaaaacaaacatggagcattaaagttcgaaggaactttattcaaactgactgctcattcaacaaatgaaggagttaaaaagttcaaggaagctcagtatgttgacctaagtcactaagccaggtgcgctacccaggacccaagaatgttggtctgttgctgcagatggcaggtagaaaatattctgaaggataagaccaaagctgggttctgctcctcatttttccacgtttctatactgtgaattgggaaatttattcatctccaaactagaatgctgcaaccctaaaataagtgaatatgatatttgccaataaaaatggaagttgcct

SEQ ID NO: 14603 - DNA, 1050 bp, Homo sapiens
ttttcgttttgtttttgttttgaggggtttttcggtgaaattgtgaaccctgaaactagtgtgtctggcatttatttctggagaaggcccttctaagtctgtgtttactaagcaatttgagccacagaaaacttttagtctctgataatttgatatctggtgatgagacagtaattacatcactatttctaggttggtaatctttgctttggaaaatgtgtaatcctctgcttcagacatactcagtgtggatccatcacagatgtggctgaaagaaaaaaatctgcaacctcttgcttttgtacattcttttctcttgccaaagctgtcttgccctctgcactgtgattgtattatactgcccatttgaaaaatggccgataggatcattttaaaatcataatctttaaaaaatatttttactttaggaacgtttgtcttaatttttgccgatatggtgtgttaagattagaatctgttaatttcctgacatttattaactacgtgatatttaaattccttgcctatttttgaattgtattgtttgacttctgttttttaatttgtagaatctgttatatgtgttgcatatattttgtttatcttttaactttgttcatggtgtctcatctcatacttgagttgggtataatcaaatctggaattttctcacttaagctttataagtttcttgttttgcataagaagtgcttatctatctcaaggtttatgtaacatattttttcagatactttaagtattttattctaggtgtttagatttttcttgcattagaattttttgtttatttaattaatattaattgagcatctgctgtgtgccaggccctgggctctgcatgggatgagttaagacaaacatggtccctgcacaaatggaggttgtagggtcagaggcaggcaataaataagaaatcaaacaaataaatatataatattcattggtgctcagcactgtcaaggaaacaaacagtggagaatactgtgagggccagggacacatatttaagttttgatgagttatgaaggc

SEQ ID NO: 14604 - DNA, 1034 bp, Homo sapiens
tcaggaagggagatctgagcagtaagcagggctgagctcctgggaggacctgccagcccaaatatcaggcaggcgttagagggcttgttcaacaggggccgattgatgggaacgaatatccatttttgaacagtcacattggtgattgctttgatgttatagagatgattaaagatctcaaagttggtgaatacttggagatcagttagaagctattgtccaggcaaggtgatgtgatttagactgagttgttttagaccgaattggtggcagcaaaactaaagagtaggtgacagcttagagcgatattcatatagtaggttaatgtggatgcttggatcagtccttaggttgtcttgatgtggcagctaagagagccggaaaaggctggggccactctgagcttctgacttgaagaaatggaaggataatgtgaatttggaggaggaccatggtctttttcttggagggagtagaacaggggagaagatgactgcggtttgcggtatgatgaatttgaggcatctgtaagacctgaagtgctggcattcagaaggcttaaaatgtatgggtgtggagctcggaagtggggtttgggtaagattagggagtttttcataaagatggtgtttggagaaagaggaaatgactcccctggaaaggacttttaaactgttaagaagagggcctggaaaagaggtgggagtctatgagttagggtctggagggtgggaagagaatctgaaagtgctttattaatcccagcactttgagacgccaaggtgggtggatcatgaggttagatcgagaccatcgtggctaacatggtgaaaccctgtctctactaaaaatacaaaaaagtagccaggcgtggtggcacgagcctgtagtcccagctacttgggaggctgaggcaggagaatcgattgacatgggaggcggagggtgcagtgagccgagaccatgccactgcaccgcagcctgggcgacagagcgagactccctgtcaaaaaaaaaaaaaaaaaagaaagaaa

SEQ ID NO: 14605 - DNA, 1043 bp, Homo sapiens
tacttgcaagctgaactcaccactttcatagaaaaccatttttacctaaaagaatgacatacaaatatggttattcagacttgggtatttggcaaccattttctatagggaaattacaggaaaattttgttaccagcgttaaaatttaagctttcaagcaaaaattaggattttggaaaacttgtatctgctaccaagacttgacagttccgaatacttaatatttttctgatgaagttggtggtgatattaataaatgtgatattttgataagtataatgaaatatgtcaacatttgtaagacctgcataactcagtgaattaatatttcccaaatgatcaatgcatgatgttacagagtagtacatagttaaaagattaattcaaagtataaattacaccaatggattttaacatcacagagtaagaaaagctcattgatgtagtttcagactccacattgcaactgacctttaagaagtgacccccacttgctgagtttggtgtagtaccacagcagcgtctgccattttctgaaaaggctattaaaaattacccctttttccaattatatatgtacgtaaaggaagattttcttcatatactttcaacccaatcgatgtgttgcaacagactcagtgcagaagcagatatgagaattgagtcagacattagagagatttgtaaaaatgtaaaacaacatcactcttccagtaaattgttttcattttggaaaataggtttttttaataaaatatttcgtttcgtggtagtatgtattgtggttactattgttttttgtaagcgaataaatgaataaaaatttttaattttaatttataatatggtaaatgcccacagatatatgaacaaaagcttttggggattttccagtcatttttagagagcgtaaagaagtcttgagactaacgcatttgagaaccaatgatttgaatatttgaaactgaaaagcatttaataagggaattagttgcttgccaagccatttgaagggctggaggaccaatacctgggaaggccct

SEQ ID NO: 14606 - DNA, 1036 bp, Homo sapiens
ctgatgttcaattaagcagactagtctagtgttcaacatataagccaagaattgcactttcttcttatttatgccttatggcactagagcaaagaagtagttccaggtggatcttctgataataaaaatgattagtgttgagaccaacattgttacttctttacttgttgccaatttttacacatttgagaactctgtagttgactgtgtagtcagttgcatacaagttaatgtcttgtgcgagattttaaggttaatttcttcctgcttactcttccacctcccagatgttttcctttattttccctaggagatggaaatggaaatgttattcttctttattgttgcgggtaatgccttaagaaaaatcagatccaagactgtgtgcatgcacgcacatgtgtgcgtgtgtgtgtgtgtgtgtgtgtgtttgagagagagagaggttggtggggaatgaagagagaggatttaattgccaagatgattacagattaagctacaaaaagcaagagagctattggtctgaaactgtgttgtgtctgtagagtgcactctgattcacagaaaattttgtcaacattaaatgcgatgggagttgagttttcagaggtggtaactatgaaggggttggtcatgtaatgctgtgcacatattagagcaacaggcagtgctctcgcactgcttttacctggatttataaaatgcccagtccttatactcttgagcatgaccagatccatttcctgtttttttcacatttctttttctaagaataaacagaaccctaggaagggaaggtagcttcaaatacaagccattttaagtatcctggtctcttaattccttttttatttttttttggatgacttgaggacaataaggtgtttgtttatttatttatttattttggttttaaggagcagagagtttaataggcaagaaggaaggaagaagacagaaggaagaagctcccccgtacagagacagatgggggctccaaaactgaaagaggagatccccctcttaattctta

SEQ ID NO: 14607 - DNA, 1033 bp, Homo sapiens
acatggcagctgaagtgtgtgtttgcatgttgtaggtggggtagagtgggcgaaggtgttgatggagaaagggcaaaggatgaacgaaggagaagggaacacgtacaggacaaaatgataccttggcaaatggtgaacaatcgaggacattatttgagaattgggaaggagaggaaggggtaaatggctgcagccgacccctgttcaaggcctgtaaggcagtttggtcctcccagtgacccctgatgctcgtgcctccgtccacctctacagcctgtggccaaaacccaaaggaataaagagggccctggaaaacccaagcaaattgcactattctcaccaccactgccgctgccaagggagtctttctttccttaaccgtaactccctctctggtcttaatttctaacttcagagcttaataatgcttcttcttaaggggcagaggaattcttaggctcccagtgctctctgggagaaggacttagagacactgggggatggtgtgaaatactttagagctttgacattctcccccttgactcatatgggggttccctgtcactgagtagtattcagcccataggtggtgagacccagcccttggtctctgaagaccatcctggtctctactcgcatgttgtcctgttcccctatggcttgcagatgtgcagaaaaaggccacaattgtggattgggtgcagtcataataataggaaagcaaaatatgaaagcagatgtagagagaggaaaatctaattgtaaaagagcctgtttataagttgcatacatgtcttgattatttttcttcttttcatactagaaaatatttgatcatttattattattaactccattgagggccaaatgcagatttcaatactgtgtttagtaactctctgaagttgcagaagggcaaaataagtcacagtaggtttttcgttcatttttctaatttaggcatcattcactctaatttcataagatttgaatgcagtttgctaaaattccagaaggagattaatttaccagt

SEQ ID NO: 14608 - DNA, 1019 bp, Homo sapiens
gcgtggtctaccagtattgattagagtgatttttttgtgttgtttctctgttaaaagcagtgtttacggacgtaggccaactgtgtaccaggaagtatgggcttgacatggttatgcattactttatttaacccatattactttgcaaatagttttgattatctgtagtacgctgggaaactaagactcaaaagttaagtaaattgttcaaggtaatttacctaggaagtagcagcgctgtgtctcctatcccatttaattattccatcatacattgacttatattgtgcaatttttctcatacttactatcttggccacgtttcctttttagaatttaagaaatattacattcttctgaaaaacctttaaactatacagaaatatataagaaaaaccttctccaccccagtaaccatgtggtagtgtgatacgagagtacctttttacgttgttggtctactgcttactttctgtacctaaataaaatacagagatacgaatgtgtacctgtgtctctgaaaagattgagttaataaatataatggacctgtagaattgtgtctggtacacagcaagtgctcaaatgttgctattatatgtacaaacacatacataatgtgtgtatgaaaatcaacatacacacacggaattctttcaaaaccaaaacaggaatgggaacagtctctgtatacaatgcttaaactacttttatcacccaagatttatcgtgtatattcttccgattattatttcagtcaactgtagtttttctttttgttgctacaaagtatactctatccccttaatttatttagctgtccccttacggatggatgtttaggttgtctgcatgctgttagaaatagtggtgcaggggactgcttgagcatagatctttattcatgagagttgattgtctgaacctacacatataaatgtacatttatcactttaaaaatgccttatcttgttacatttggcctgtttttataatgtagtcattgggtagattttgac

SEQ ID NO: 14609 - DNA, 1025 bp, Homo sapiens
gaaatacctaatgtagatgacaggttgatgggtgcagcaaaccaccatagcacatgtatgcctatgtaacaaacctgcatgttgtgcacatgtatcccagaacctaaagtataattttttaaaaagtggggttgggggaaggtggtggaccacagcagattgtataggcaggatggaggagatagtgtttgatgtacgtagggcccacagattggtgtgatcaggtgtgtcatttacataatgtgtggggaaggctggctgccccactctaatcttattatgcaaatgaattatccttggctggcaccatcttgtctgctccttactgtacatgtggctggcagagaagggaagatggagccaccaccttgaacatggctagtccctagttcctgctggcattcactcgtgcaagctcccagcttgcttgtctatgcagctcaactttacagggtgctctttgttagaaaatgatttggggctgcttttcattaaaaagaaaagccttactgaggactccagtaccctttcttactatctgtctaagtaatttcatcttaactcctgtgtcatcggtgctcatgatggagtcagtttaggttaggcaagacaaaaaataccatttacactcaggagcagtggctcatgcctgtaatcctagcactatgggaggctgaggcaggaggatcatttgagcccaagagttcgagaccagcctggacaacatagtgagacccatctctccaaaacacaaattaaaaaaaaatattagctgggcatggtggtgcacacttgtagtcccagctactctggaggctgaggtgggagaaggcagaggtgggagaatctcttgaacctaaaaagattgaggcagcagtgagttctgatggaaccactgcatgccagcctgggcaaagatcgagaccctgtctcaaaaaagaaaaaaaaaataccattaacttcaaagtaaaaattaactataaatgtaagaagccaggtgtgagtctgaagaaagcatatatccg

SEQ ID NO: 14610 - DNA, 1038 bp, Homo sapiens
cactccctgtggacacgtgtgctcggagaagtctgcaaaatactggtctcagatcccgttgcctcatggaactcatgcatttcacgctgcttgccctttctgtgctacacagctggttggggagcaaaactgcatcaaattaattttccaaggtccaattgactgacgcccttgacagccatctacgactttattaacaggttactgtgaagattttgccactaactctagattttacctttttgtaatgctgtttatcagaggagggtgacaggggctggaaataaagagaggggacatggtgatgaaacatggcaggagtgtaacagataccagtggtgtgttgcatgctcaaaacagcagcgtcgtcattgaagtctgcttgattaaaccataatatctttgtaataattggatttaaaatgctatgcttctatttttaaccttgggtttttaaccaagtttttttttttttgtaatcttggacaagactttaaatcatattttacagatgtagaagaaatttattcaaaagtgtgggctcatgaagttcacttcagtgcagtgtggtgtaggtgttacgcgaagggcgcacagtgtctagaaatacttgatcgtggctcaaacctgaccagacagcagaggggcggctctgtacagtgtgactggtggacagatggccttaggcacaggtggttttgaaatctggggctttttctgatttatttttctgacttgttgggggagagaatattcataacttgtgggctttttttttttttaacttcagtggaatttactttagatattcattcatcaaatacatgggacttcacaaacaattttccataactttttagcctgtcttttgttatttctgcctaatatgatttgccccgatactcatcttgcacggccagaactgtttggttgattaaaatacatcagctcttaaaaactcattaactgagggtaattacagtagtagacatggtctgggtactatactaccatgtttatttgctgactgaattaaga

SEQ ID NO: 14611 - DNA, 1031 bp, Homo sapiens
gctgttatctccccaaattgcttgtcttctcctttcaaggttttcactcagaaaggtacagaattaccacttgatgagttaccatggcaacccctatacattatcttttaaatatcccagacatgcagagtctaatttgactgcagggattttaattcatgacttctatgttttgtatagtaccatgtttttaaagttaatgaattataaacagaaaaacatagttaaattggctttgattaaaagatagcttatttagcaatgctgcttccatatatgttcctcaaacaacagaacattatttcaacctatttcaaatctataccactgagagactgctgcacacttctgcaataggctgtgatcctgggaacctgggatgggaacttcattattagtagaatctagtagagttggccttgctatgttggtgtctgaggctggctctttctggttgtctcaggatgccatcagtgattagtaaataataaattataccaagaaagaagctcgtttgaatgtttagtatgccttgcaagggaaattagggacaacgaatagacctcttctattctctttgcacttgatttgcaaaaatatttgtttattaaatgagttattacatggacagcagttagaacagtgcctggcactttgtaaccagtcagtgagtttcatcatcattgtttgcatttttacaatgattcccagtacaaaagccttcagcatcttgggctcctcaacacgctgggcttgcatgatcctcatcacactgtttatcttactcttgactactgctgtaagccctggattgaactgttccacatgccctctcaccattatgtttggatgattttaaagagatttctgtttcaaagaaatgtaggaagaagaatttcacagcctcttgggttgcaatcttatttggtggttaaggtgaatataacttagattgtgtatatcattattaggggaatcttcactaacctacagaagcagtaaagaagttgtatcacactgtcttgagcttc

SEQ ID NO: 14612 - DNA, 1104 bp, Homo sapiens
tttcagctttgtgtttcttttggttggtacagtcttgatttttaaaaatatttataacaggtaactcttcctttttaaatgccattttttattgaatactggcttatgtatcctgtggcagaatctcacaatctctatttgtctgagtccacacaatgtcatttaacatattcctctatcccccataagtttgtaaactaatatttgcatctgaagacttgattagattcagatttaagtttttaaaaggttacctcatggcagggctatgaaatttccattgaatccctttagaaggctcataatatctggctgtctttccattaatgcctttaaggtggattagtcaaatcaggttgtcaagttgatccatcctttataaaattccccatcacaattttacctaatgctttgagcagtcactgatcattgcctagaatagaccccttgttttaccgggtgttccaaagtgtgaattttctaattccactattctttatgcatttattagctagaattccataagaagaacttacccttgtcaactagttagacatcctaaaatacattcaatacagaaaagacaggataaatgtctatcccatgcttttaaccactgtgctatcctggaaagataatgctttctcacaagcatgatctgatagggtggggctggcatcaaaagggtctagctagtgaaggttctcatccttaggtctcaggagactatgcagattgaagcaggatttctgttgggagatggaaagaggagatcagggcaagctacagggagaggagtctggcaaagtttctgccccagcccatgaggctgccacagacacagaactggagtgtgatggggaaataggacagaggccctggaatatggaacaggcacactgggtgaggttaaaagcgggaggagttaagaacatcactggaaatgaaagggtctagggtctccacccaagcaagaggaagctgagccaaagtgtagctgggctccttaaagggggcggggaatgaatactagacaatgtgggactgagccctggagggagtgttctgaaaagtgttcgtgaagggctgggtttgtatgactga

SEQ ID NO: 14613 - DNA, 1029 bp, Homo sapiens
gaataaacagcatattcactggtgataagttatggagacagtaggagggaaatatgattgagagtgggggtaagtagtgggtccttccgaatgactattcaggaaagacctctgaagaggtggtgttttagttgaaacctgaatattgagaaggaactagccatgcagaatatttgcaggagaactcttaaaaaggtggaagccaggtgcggctgtttctatgaaaaagaaaagcatgactcattggcccttaaatcacactaattgttttgtatttgatgcaagaaacaagatccatgttttgtttttggattcaataatgccatatcatggccagtaattttgtcagaatagtgctgtaatttcaggtggtgaacctatggactgaagaagcagtttttgctgcatgactagtgatccccaaattgagcagcttaaacagcaaacgtttatcgtctcccgtttttgtaaatcaggagtctgggtgccgtttaagctagatgctcgtactcagaaaaaggttgctgtcatggtgtgcgatggggctgcggtcttctcaaggctcaatttggggagaaacgcaatctagttctttgctatgtgggtctccataagttaactgacttctgtcaagaaaaagatgaaggacacctctctgtctgacagctctgtcattttgtaacctaatactgtaagtgatataccacttctgcattttattcctggaacttcgtcagtaaacccaacccatattcaagggggaaggattacacaggtgagaatatcaggacttggggattagtggggatcatatttagggctgcctaccacgttgaagatctttgatgttacatcttcaaattgttacctttcttctttcaggtcctgttgcacaagtagggatagtgtttcattcgtgtagtagggagtttctgtacagtgttaccaagattggtatttcataatggaagtaactttatagttgtgagttttggtgctggagagcattattcagaggttaggtagttc

SEQ ID NO: 14614 - DNA, 1022 bp, Homo sapiens
ttgttcacgctggtggctaaactggcaattacactgtttccttttggttcaattgcctaccgcgtcaatcttctctgtggcttatttggagcagtagctgcatcattactttttttcaccgttttcaggtaaagtagttgattagttaaaattaattttgagcagttggagatgtagatttcttatggctcaagtacatacattaaaaaaatcttttgttgcttggtttccctaacacatgtgatttcactttcttaatttataatactttcatatgcatttgacccctcaaatgattacacagttggttttgtttcctacagtggagtgaaggtgtcaccagttcattatcacagttctctgattaggcagaactaatgaggtttgtcattttgtgaagatgcagatgggccagtttaattcaacaatatgaggttcatcttttggtaaatggtaaatatcatttaattattcacagtattgctgacgagcagctgcctatcaggtccagggctaatacctaattatattgtattctaaatatgaacatgttgtatactttctgaaataaggatattaactaaggaaatcaatttgggatgtggttttagtaaggtttcactctgctccgttatggctgtagtaaaggtaggcaaattagatcccaagtaattcattgatagaagactttcttaggttggaagtctaccctgcttttaaaacattggtcattagtttagaatgctggtaacccattgtctttgatgttctgtctccttcattcttaactcagtgcatcctatacctaagaggattatagtgaaaaatacaaattacactttctgcaaaaggaaaaaccaaattaaaacacttcttctaaaaacttttgcatgtcttactataaaacaaatgatttctgtaggtaaatataatttgaataggtacaatttcaaatgtcttttttggagaccaatatttttatttgtgtcaaagtcataatactgccctttagccaaattcta

SEQ ID NO: 14615 - DNA, 1100 bp, Homo sapiens
cttattaggaaattttgatgagcctgactaattggtggagagaataatgttgatcattagtgaatgagtgggatccagtttattggaagcctggattctaggctgactgatttagaacttatccctcaagcagcggagagtccttaagtttttgggctgggtagtcataaaggatatgttttaggaaacttgatgtgatgttatattgcagaatagattgaaaaacagaagacaaattagggaactcttaaaataattaagtgtaaggcagtaaaaatacaaataggaatgagtagacaggaaagtaatttggaaggaagaaataataatgtgttgaatcaggatcgctggaagaacgggaagctgaaagaaatgggaaactgctgattttttaagagaaagaaaacaaataaattgcaaacagaaaatcaaagtaaaaacaggtttactgatattgagatttttatttaatcatttaaaaataatgattgactaaagccatagaactaccctgtaactttttatacaaaaggatacagttgaaaatcaatggtttggagctatagaatatgataattgttggacgcagtaatgcttgctgaattttctaacactattagaaataggcatttcataatagctttcattttcatagttttagattaataaggaaatagaaagttgttttggtttgatatgcactagtaaattcatccacactaccagtctcaaaacaaatctctgaaccgagatccagattcctgattgttttaaatggtatgggttttgttggcatttgtgggtgagaaatttgtttctgagtgtagcatctgattcttctggtgttattgaaattcacattcccatcttcttctttagaaaaaaaattagttttaacttcaccgttgtctaaagaaaaaaaacccttgcaaagtaagaaatgcactgtataagatattgaaatcatcagatattgtgatcaagacattctttgccatatgctgagagatgaaaatagaaggtacctaggtccaaacattctacctgaagtgagaatgcatttttctgaataaatattttttcatttcattaatttttac

SEQ ID NO: 14616 - DNA, 1050 bp, Homo sapiens
aacgcttgtagaaataattgtcaacatataatcatagtaatatatatagttgaagtctactcctaatgatgatgacaaagtgaattggtcttagaattgtattttgggcatattcaaaatcagccaaacaacacataatcacttccaggcaggttatcttagctgtgcaatgctgcttgtcatgacatggttttaaatgtaagtgatgcaataaacatgatactcatgagcctttgctaatattatttgcttcactcagctttcacctgccatgcaaaggagttcaggctgatgcaattttctagtaatccgtagtaatcagaaggtttaacatagtattctgtggtgacttaatataaattgggagatcagctctgagtaaacatatttgatgttttccttgatatgttcttgaagttccgagatgaatctactaaaataaacattgttataccacccaatgtgctctgatgcaggaactctccctgggctctttgttgaagttgagcctgtacttctctgctggtttgctgccctatgtccaccttcccatctcatcttaccttaatcacgcccggtggacctggggagaccagacaacactgcaaggatttttgacacattttctcagggaagaatatggaaccttcagcctggtaaattcagatttaaagcccttctaaggaaacaagtggcaaaacttcagtgctctgcctgggccttgattaaaaaaacaatatttgtcaatgacagtagatcaaatgtttgttttggttatttatgtaacaaacttgccccttggaatatggcctttgatatatgtaagagaaaagtcagaatcacttaatttaacatcatgtagttgtatatcctgaatatactttttaggatagcagtcattaaagtcttccacctacagtcgaaacatttcagtcttgttagcagtgagtcactatgggtacttgatctgtgaataaaactatttggaaaagatcgaaggaaaaaaaatcctcaatttaaaaaattttccttgaccaaaccacttcttat

SEQ ID NO: 14617 - DNA, 1086 bp, Homo sapiens
tgggattaccagagtgagctaacacaaccggcctacaaaacattaaaaaaaaaaaaaaaaaaggcatggtggcatgcacctgtagttgcagctactcaggaggctgaggtgagaggatcgcttgagcccaggaggtcgaggctgcagtgagccaccttcatgccactccagcctaggcaacagagtgagactctgtctcaaaaaataaaaaaataaagataaagacagtcaaatgtcatatcaatgtctctgagctttcattttattctgctttgctccatgcagaaggactcactgcctgctcttttctatctaccttccagagattgttacagcattaaggataactggtatattttgtcttagcaaaccctacatgaactccaaagaactcttgagagtaatcctagaccatatgtctaacttttattagttgcacataaaagtcatctattgggacccttaaaggcctcctttacattaaaataatagcaggctgtatacccagaaaaaagacttgacaaaagtgatgaccactcacacccacacttctgtgttctgtgtggaccaagtcatcatgtagaatgaaggcataatcttagcactccctgaatgagaatgtctagtctttaatagtttcaggtgggcaggaacattgaaaaaggcaactcataattaacttatgagaaaatccttcaaaatgatagaagctaatcatctacccttttccagtcaagcaaattaaattttttccccatgcatatctctaaattgcaatcctgtacaaggaaattattgaatctaaccttaggcagtgaccatcttttagcgcttacacttaagcaatagatctccaagaataattttgagactgacttcattccttttgaagaatggtttgaaatgggcctcatgctggaatcaattttttcaagtgtatttgaaaatgagtaaggatatcttctcatagtagatgagtcttcattagtaaaatacacattgtatggtttctataattatggtatcacattttctccagtaaaattgccggtagggagaagaaagttctttgagatgatgtataga

SEQ ID NO: 14618 - DNA, 1021 bp, Homo sapiens
gagaacaacagacactggggcctacttgagagtggaggctgggaggagggagaggatcagaaaaaaataactattgtgtgccaggcttaatacctgggtgacgaaataatctgtgcaacaaaccctgtgacgtgaatttacctttataacaacaaacccacacgtgtaccctgaacataaaataaaagttaaaaaaacccacaacattgttctttataatactggggtagagctggtgttaggaaggccaccaggaggccttgagagaaggggctgcgtgtcctggacacaacatcatcgctagctcaagaaggtgcaccaagcccacagtgtgtttcccaaccttttcttatcccagtcatctcctggctcaggccattagggcagtccaggttcgacaccagacatatttgcacaggctaggtgtttttatcttgttttgattttttttatttgtcccaggggaatggaatacatagcacttttgctaggtggcaaaatgtgcctcatcactctgcaacatagggaatcaggtaggaaacagtaatttttacatcaattacaaaggcagggataatattctgttcctagaggtgttcatttgttttgtgataccccagatattctcagctccatcaaatgtaatggacttggtaataacagaaaggacattgcttgtctcattttttgatactaattactgttttgtcatctttttcttttttcatagaatgctgtcagaattcatgccagtttttctttgaagttagaaagttaacttcattcttgaaaagaatgaagttattggcaatagcaaataatgcctggagagaagtaaacaactcaggaaactcgtcctccccttgcttctcattggtctcattccctagcaatttcttgatctccaaaggcagagagggacacaggaggcctgtgattcaggggagaagtggaaaggatcaacctctgcatgcaagaaaatcatacaaatgccatacaaattcaagtcagaaatgggcag

SEQ ID NO: 14619 - DNA, 1035 bp, Homo sapiens
gtaaaagaacagaaattataacaaactgtctctcagaccacagtgcaatcaaactagaactcaggattaagaaactcactcaaaaccactcaactacatggaaactgaacaacctgctcctgaatgactactgggtacataacaaaatgaaggcagaaataaagatgttctttgaaaccaacgagaacaaagacacaacataccagaatctctgggacacatttaaagcagtgtgtggagggaaatttatagcactaaatacccacaagagaaagcaggaaagatctaaaattgacaccctaacatcacaattaaaagagctagagaagcaagagcaaacacattcaaaagctagcagaaggcaagaaataactaagatcagagcagaactgaaggaaatagagacacaaaaaacccttcaaaaaaatcaatgaatccaggagctggttttttgaaaagatcaacaaaattgatagaccactagcaagactaataaagaagaaaagacagaagaatcaaacagatgcaataaaaaatgacaaaggggatatcaccatcaatcccacagaaatacaaactaccatcagagactactataaacacgtctatgcaaataaactagaaactaatctagaagaaatggataaattcctggagacatacacgctcccaagactaaaccaggaagaagctgaatgtctgaacagaccaataacaggctctgaaattgaggcaataattaatagcttaccaaccaaaaaaagtccaggaccagatggattcatagccgaattctaccagaggtacaaggaggaactggtaccattccttctgaaacgattccaatcaatagaaaaagagggaatcctccctaactcattttatgaggccagcatcatcctgataccaaagcctggcagagacacaacaaaaagaattttagaccagtatccttgatgaacattgatgcaaaaatcctcaataaaatactggcaaaccgaatccagcaacacatcacaaagcttatccaccatg

SEQ ID NO: 14620 - DNA, 1047 bp, Homo sapiens
ccttgagcctgggaggtggaggttgaggtgagctgtgattgcaccactgcactccagccttggtgacagagtgtctcaaaaaaaaaaaaaaaaaaattattataaaaactcaagagcttttaaaaattactcttgcaaaagctacagaaactttaaagaggattgtttataaatggaaaatgattcatttatcaaaaaactagggttccttagtctgacaggtgaaagttttcaaaacagttcgttcttaaaagcataaaaaactgagttcaattatgcagagcttaaaacaagcaacttcactgatagagaatactcgtacttagtgtttgtttttacttagagtgtcataattttcccctaaaattatagcatattcattcaatatgtggcttgtatctacacagttaagtttctctttcagtgattagaattttagccattaacctatgcagtcgcctgtatccacctggaggcagttcctccagttgcaggattgtgcttatttaaactgattgtcaaactgtgggtcatgaagtcaattgagtgagaattgaccagctttttcataatgaaatagaattaaaaacaccaccatgggccgggcgcggtggctcatgcctgtaatcccagcactttgggaggccaaggcaggtggatcacctgagatgaggagttcaagaccagcctggccaacgtggcgaaaccccgtctctactaaaaaatacaaaatttagccaggcatggtggcgggctctggagcctgggcaacagagcaagactctgtttcaaaaaaaataaaaaataaaaaaataccacaatgcattcgaggtaacaaaggtaagtattgtttcatggaaccttcagtttcatttaaaatgtgtatgcacatatgcatgtgtgtataacatatatgtcatatatgtgtgtatgtaaagaaattgataaatgtgtgtagagtcaatataaaatatacttattgtaggtcatagtaaaaaaataaatttgaaagtcactggcttagaagaacttaacaccaggccaggc

SEQ ID NO: 14621 - DNA, 1048 bp, Homo sapiens
aattaaataaacctcatcttgtctagcttcctggtcagcattttgaaccccctacagatgggtctgaaggattaacagcaaatcctcctcgacctagctctggcagatgggcggcatgtgtctgataaatactcggactgggcttgcttcctcctgttcctaacagatagacagaacacccagcaaattaattttaaaatggtgcccctcgtaactcttagaatggcaaaggaggccaaacacaaatgatatgaatttcatatgtggaacacattatcacctcccaataactgagaaaaaggacctgttgggtaaacaggacctgcggggaggcttggtcagcaagcttgcgctcagcctggagagcgagcggtctacgcatatactcgcggaggcaccttcctgctccacgtccgtatttgcatgtggccctttcctgctgtgaaaatgtctttttgcttttgcgtttactttgtggtgatccaggagcctttggaatttgagggtagatatacccgaagatagaactcgtgtggctttcatgttaaaaaaaaaaaaaaaaaaaaaaaaaaaaaaaaaaaaaaaaaaaaagacagctgaagaggaaagagcaaaacgtcttccctaattgttagagatttttacatttaagaattgatggctatctcagtctattccaacttggaaagagaaaagcaatgctaaattctgggagaagggagtaatacatgtaacttcatttatgagatgccctgcactcgagaaagcattcttccagctgcgcctcactttgcaagctgcttggaatagctggccaagctcagctctgccagtcagaggtgtgtgctccctctcgttcactggctgtgtaaccccaggcctctatgacctcattttgtaaaatgcaaggaatactattaagagctgtgatttacacccccagtaactggacaagacaggtagaaatgttatttttctcattctacacaaatgagggaatgtattcttgttgagaacatacagtagttgctcagtaaatgctgaataa

SEQ ID NO: 14622 - DNA, 1033 bp, Homo sapiens
tcatatgtaatcttataaagtacttgaatgtttaccttgtggaatcttgtcttttttccctaggctttaatagtaagcataaaaaattcatgttctaaagaatattgagaaattttaacactggaacatttaaaggagttaggggatttagatttctgaaacttctgtgactgctgtcttgcaagagttcccattatcttcccccgtcgaaaatgcttaccaatggttggttgttgttttctctggataattgtgcagtacctgatggcaatgtattcttcataactgtttgtttatttttaaggccatggtaggggaggagtgtgtaggtgccatcgtttgcaagttggatatgcacaaaaagatgttccgcagaggttatatagccatgttagccgtggattccaaatacaggagaaatggcattggtaagaaaaatattattttatggaaagaatgcctaagctattttcatttttgttgtgttttgaaataaaagacttaaatgtaagtatgtagaaatgaaagaaactaagggaagaaaattaaggcgggttttaatttttaatttcaaaatggtatttttaaaaagttcttaaaatgaattttttctttattaatgttttgtttgacagtttttcgttttaacaagtagccgatcatcagctttcacctgcagatttttttaatcacattcaaaatgctttgcattatgctaagtaccacaagaaatactgcaatttataattacattatgatggtccttcatgccagccttcaagcacttgtctgtatttgggttaagtggacctcaatcaagccaaaattatggacaaattgttaccattacttggtgctagtcatcaactatatattgcaattcaggaaagatcaggagatgagaattgattgtttcttgtaattcccaaacttaattttttgttgggtctacttttcctgacatgtttagttaatcttaacactcatgatttataatgatcattagaatcatgtgggtggtttaaaaacatgt

SEQ ID NO: 14623 - DNA, 1040 bp, Homo sapiens
gattgtaggcaggccatttaactttttctggtctctctctttgtctatgcaacatgatgttaattctgatcttaaagatacgttgtgaagagcagtactgtttgttgttcattcaggaaatagcagtggaagggcttctaggtgccagacagtgtggtagtgctaaagttctagcagtgaacaagcctgctctccaggagcttccagcctacagtattaaaaaatactatcttaagcagtaatgttttgtaatggtttggcttatcctgataatgatctgttactgttgctaagaggatcggtggaatttcactgtaatttttttttctgttaggtagaattcaactctgtcaagtttctttaggaccaaaataacttcattttatggtgaatttctaatataaattcagatattcttttaatatgtttataagaatttaagaattaaaaattagttactttatcctggcatttttctgttgtgtcaaataattttctaaagaaagaatctctttgtttagaaaatatgagtgtgccaggagaatctttacattttgactagattagacattggtgtaacttttttctatgtaattgagcttcatttcattaatatattaggatgcaaacaaacttgaactcagttcttaaccacactttaagtgtgtatttgtgtagtggtggtagcctcagatgtgtttggaatattttagattgctaaatattgatggtggacttaaaatccatttcatcttgtcttaagtaggttagatttcccagtcactgctttgctttactttgggaaatgagggggaggtacagtagagtagttactattaagctttagttcataattggactctgttctgtccttgctctgttggtggccttgagttttattcatctgtaaaatggataaccacatcaatttcatagggttattgtgaaaataaaactacataatacatatagaatgctttacattgcacatagtacagctccaataaatattagctgtcatattttaaaattgtcacttt

SEQ ID NO: 14624 - DNA, 1061 bp, Homo sapiens
tgatattatttttagattgtggactttctcttgaggacaagagggaatcagtaaacggttttaagtagagaattaacaagagcatcaccctaactctagagagaatgggagacctcttgagttaggaggctcttgtaattatagtgagagttgatggcagcttggactgtggtatatcgagcatagaaagaagaggaccacttagagatttaagagggagaattgacaataatcagtgcttggatgcatataggtggttggagaggaatgaggttcaaagatgactcctgggtttcaggtttgaggcattggtgtggtggggggtgatcctgtttactgagatatggaattgaggaggaagagcagattatgagttcaattttggatataagttgaggtactgtctttattatttgcatcagttgtttgcattcttgtcagactttttgatagcttgagaaagaacaggaagagacttatgcttcacttgggcctttgtttaattatactttgccatttcccccccacccactccaaacacttgagggttatgacacccaatagtaactgtggctcactgtgttgatagttctcaatgaaataagttgagaaacaattgaaaaggcaaatagagctacgtgtgtaaaagttgggaagatggggtagagggtgttagagggaggtaaaaataaaatcgcagttttcaaaaataccagttattcattgtcagggccactggctcagtaatatttcaaaagacttaaatgaaagttaatactatgtgttcctctgttaagctttgctatatagaccagtggttctcaaaatgtggtcccttgaccgcagcaacatcatcatctagcaatttaaaaatattaaaaatgcagattcttgtgtcctactgcaaacgtactcataaactctgagggtggggctcagcaatctattttaacagacccttcaggtgattatgatacactgtaacattttgaatacctcttgtctggattcagcaaactttcttggtaaaaggcccactagtaattattttaggctttgtg

SEQ ID NO: 14625 - DNA, 1029 bp, Homo sapiens
tccaaaattgccaaattgactgaactggttgggtgtttgtaaagatgacgttaactgtgtgactaaaaagtcagatggttgccatattgtttggaatatgttgaatgtcagtgtatgccttatgtctttaattgggtatgcaaaaaaatttttacttaagtagattaaaattttaacctctagcatgaaaacccagcaccaacactgaaagactccattcaggttgaagtagcctcaaacagtaatttactttttgataataggctgttgtttttcttaaataagcttaaaacaattctatctgaaattggtagcatgggttcacttggctacaactgagcaaaatagatgcaactttcttttaatggggtgctgcctctttaggactgactgtactatccactgacactggtttggcagttggtactgctgaacatttttatacatgctaccatgaagctatatatgttagtattgaagaagctaacgggtatactatcatttttgatgtgtgggctgattataatttcctgtatttcctgtacattgggatgaaactactttagcaaagtccacagatcagaaaccagacggtagtttttgaagttgaaaccagcaaaataagaaaaaataaaaaatcgattttaatattttctgcctctttcccaaattacccttcccacttgctcgacaaatctatgtaaagcagtttgttttttcatgttttaactttaccttgccctgtgttatggtactggctgacatgtctaagactggatgtgtatatttattatggtgtctaaaaatcatgaagttcatcacttttcaggagtatagataaaatcaaattggtagtacatcagagttacttttcagtgcaccatgacatcactaaaatgagtgctgtaatgttacagggctttcaggtttgtaaaaacataaccataaattatattgacgtcagatatgagttgagtatctataaaatatcacgtgtatctcaaaatattggactgctgtttgactgga

SEQ ID NO: 14626 - DNA, 1045 bp, Homo sapiens
gggtctgtgaccttcgtatcaaagaccatggaccctcgtggaaaacaacatcccaggagagtagagagtatggtcagttaagaaatctggtctaaggaccagtggtggaggagggtcacctgatttcaacacagcattatcatgtggtccttctccaacttttccaaggattggtttatgatccacaaagaagaggaaatagaaggaatctacatcgagcatataatttcttctgtctcttacatttaacaaatagccattatctatgtgatttttgcattcttcttgatatgtcacaatcatttaccatttaaatggtttaactatttcattcttgccctcaaatctagtaaaatgtaggctccagaaggttttgccatctatacccatggtctctctctccccagcagcacaccatcttgaatccttggggaagcaaatgctccagtttgaagtgcacagacttagtgcatgctcttactcattgttctcagtgtagcccttatggacttgtgtccaagaaagagaaatgggactgattattcacataaaacagctgtttcaccaaagtatccattccttaaactgagggcacgagggcttggcaatgagtagccctgccgtattggtgctggtaaagcgttcttgttccatatcaccttgagaagttatagaccacaggatgcagaggcagcagaaagtggtgatggcaatgcagaacatctagaagcacaagcaaggcactctgggaaacccctcattcttacagggagtaacacagaagggatatggagctagagtttacattatgctgcagattgctagggtggaccagagacaacctgttttgtgagatattctggtgatcctttgtgcctgccctttccccaggatgttaagacttgagcacgtagcaccctcaagctcttggatgcttccaacttgtttcagtggaaactattcagaagtacctatttgacatattcacaaattcattttaggcgaaagcttgttgattagccaaaaatctcaatgtgaatgcctc

SEQ ID NO: 14627 - DNA, 1048 bp, Homo sapiens
gatttgggggaaagtcattattgcttcaaatattgcttagtttctttgtctctttcttctccttttggtattctcattacatatacttacaccctgtgtggctgttacacagtttttggatgctgtgttccatttttttttttcagtccattttctcttggcttttcagtttaggaaatttctattgtcatatcctcaaactcagaaaatctttccttagcttttcaatttgctaatgagcacatcagagtccttcatttctgtcacagtgattttcatctctggcattccttttttattctttcttagaattttcatatctctgctgacattatccgtctgactttgcctgttatttgctttttctattaaaagtctttgcatgttaattacaattcttaaaaattcctggtctaataattctaattttctgccatatatgactctggttctggatgcttgtttaatcttttcaaattttttaccttttagtatgcctttgtagtttttgtagaaagcggacatgatataatgggtgaaaggaactgcactaaataggcctttagtaatgtagtggtaagttgtcgggggatggaaagcattttttagtcctatcattaggtctccatcttttggtaagcctgtatctctggactgtcaacttcaccagcactttgcagtcccctccactccttatgtgggacaggatgtgtgtcccccttaggtgggacaggatggctataggaggctggagttaagtatttcttttccccaaggttgataaaaccccattagtttagcttctagtaaaatagtttctcctaagagcaggcgttaataagaataacggaatgctctggtgtattgaaatgtatcagaaatacattttgcaaatgattactttttccatcctccaactggaaatatgaggagatttttctctgatattccttgtgaggacctcatggagttttataggtaaaactcacaaaaatgtggatatatccttatgactgtgttccctctggaattcttatctctcagactt

SEQ ID NO: 14628 - DNA, 1031 bp, Homo sapiens
gaatatttaagaagtttccaaggcttccaaagcagagtagggggaggggagctgagaattgagagccatggggatttcttagcacagcatgaggcatggacagcctaccttagggactgtatagaagatatagttgattatttaaggatgagtcacaccctctagactgaggtggtgaccatctcagcaggagaaaaccactgggcttcttcctgagcaatcattacacaaggctagtgctgagagtatggtgggaagtgacaccagccagggaggttggggtagatgctcaggagagaaaggccgatgcccaagatcatcaagatgggtatcgttcagtcgaggccagtttggacaaaggatggcaccaatgagctattccccacatgcccccaggatagcaccataatcaaggcctgtgtgtcttcccccagccatggaccctggctggggaggaaaaagggagagtgggagagaatcctgagggtgcacttcaagccaggagtgacaaaagtaccctggattggtaagagcacagttttcaatagtaatggaaaggggagcttgagacttggagttacagagaaaggatattccaagatagtgtaccctgagacatctcccttgtgatcggtgaactcactatttacccttgagcatttgtctttgcacagtgttctgttggataaattccgagaaatggtttgcaaaagctgttgattttaaaatatagttcttttatccaacacccatttaattccattattaaatcaaaaaatgtttcagttgattcccttgggtagtccagccatataattacttcccctgctaattgtgatgcatttattttcatggttccgtagttgtgtacttctggcttttgttctgtcttgttgaactgattagacttctagaaccactctcacacacaaaatcttattttattcctaatttcaatggtaataacattgtttggtaactagtgtgtattgagcagttattatgtgtcaggcattgttctaagcacttta

SEQ ID NO: 14629 - DNA, 1058 bp, Homo sapiens
aaacaaggaaaacttaatggggctctaattggtggggcaatgtagcgtagaagttgtagacaagcctgtccattagaaagcatagagcgatctgagagcataaacaatttggcctggctgaaatgtgggggctgggtgcgagagtggcagaagatgaagctagaaaggctaggtaggcaatgactagatcctgaatggcttaggatcccatgttgagtttattttattttattgagacagaggccttgttatgttggccaggctaggttttgaaatcctggcctcaggttgtcctcccacctcagccttttgagtagctgggactacgggcatgagtcaccacacttagctccatgttaaggagtttagatgttgtttttaagctgacaagaatcctgcttgtttttctaagcaggagagtgacatggtcagatttgcattttatgagattactctgatgttagtgcagtgcttctagaacttcagtgtgcatgagaatcatctggcaatcttgataaaatgcaggttctcattcagtaggtctggggtatgacctccatttttgccttttgtaataaactcccaggtgatactgatgatgcttgtatgtggtaatactttaattaccgagtagagttaagaatcacttaaagttaagtgtttcttaaactttaagggaatcacaataacctggaggggtggttaaacccagagtactgggcataacccctgcagtttttgattcagttactctggctggggccctaacaggttcccaggtgatgctgatgctggtggtctggtgaccacatggagaaccactgaagtgaatcattgatggatggacagtaagacctaatgggaggggccaagtcaggaggctgtagctggagccctggtgtaacaggaccagggctatacctaaggcaatactactgggaatggaagagaaagggcagattttactgctaggtgatatcagcagggcttggtgaccgaccagctgtagggagatagggaagagtgacattggaggcctggttcactgagccagtaga

SEQ ID NO: 14630 - DNA, 1033 bp, Homo sapiens
gcaaggtcaggagtgagaagagaagagccaacaactgcagactccaggagttccagtggtgaggctggtgcccaggaataagctggccaaggagactgggaagtgatggctcaagaagtaggaggaaaaccatgaggacatcatgctgctgcaaagagtgtgagccctactcccaccttagtccaacgctgaaggcacatgctaatttactttaaaatggtttagttttagtgtgatttgttgcattattaagggggtagatttggaagttaacttggctttcaaggtgaccagaataaaaagagagagtggaaccacggaagatagatactggatattcagcacttgtaatggggagcatgacctgggttccccactacttccctgtacaaccacttctaggtccctggtcctggactggagagcacccagcagtcctttctgctggagcagcccaaagtagacctggtaaggaagagaagaagggcaaaggatgtggagacaaagaagagacaacaagggggaagagctcatctttgtgttagatatataccagatagtaatttgcatttgtggtgggaagtggttctctgttccattctcacctcagaggaggaagtgggtcttttaacataacttagcaaagatgtaatgagaggagatcaatcctagtaagaggagtttgtctgttccctgagtcttaactctgcaggacatgaagatgcaaagcaaatgggacctgctggcacaagaggcagcttctgatcaagtcagaaccctgcaagaaaaggggaaggagaagaaggggaggggaggccaagggagaggagcccctcaaggcacctatgggaggaagaatcaggaatgactgaagggggatttctggaagctggggagaacaaatatttgtgccatcctctggacatggagagtgttcaggatttggttctttctcattaggcctatatgccttcgcagccattactgcacgccatgcccagggttataaatatgtaatctcattcaatcttca

SEQ ID NO: 14631 - DNA, 1033 bp, Homo sapiens
gcaacatgtcaaaatgtaatgatgtgtaatggtcttccaggtccctctcctccagaacacttctgcattaggcaggtctctttctctctccctgttgttcatcccactcaaaaacatagaccgtttcatatagtttataatatcatgccatttttcccactcgattctacattatgtattggagatcttcccatattagtcattgaacactacctcattcttttgcatggctgtggattatttcagtatggatacacataattattcccctacggatggacattaacgttgttttcaattctttgattgcaaacaatgctgccatgaacatccttgcatacacttcttgtgcaaggtataagtattttcctatgataaataccaagatggactttcgccttttagctcagtctagctcaaatctaagactaaggtaccctcccagatagggatgctattatgagatcctacttcagtttatgacttatcaaaagcgaattttgctggtgcctggcctctgcccataggaattcacttgtctaagcttctgcttttgtttgtttcgttttctgcctctgatttatcctgattttctctgtgctaatgtctctgaatcttatacctgtacctctgagatatccaatatctacctgttggaatcttcaccaattactcctcttctctcttcccctatcacactgacctggatagactccatcagctcttggtctctgctctgaccttgacttgcaggcttctgatcccacctgtccttttcccttactctggtgtactggtgtcacagatcccattagagtccatattccccagctccacatgtgagatcagcaacctaaaatggcccattgtgggcttcctgctttattgtgaggttctgtctgggcttagccacttcttgatctggtggctgcccaagctcacacactattagggggttccatattgtcacacagtactgattatctttcatctctaaccatatatctgggtttttccctggtaaaaacacttt

SEQ ID NO: 14632 - DNA, 1043 bp, Homo sapiens
atttaaatcctagccctgccattgtatggcattgagtacatttttaaattcctttcttagcttctttatctgtccaacagtgataatagctatctcataggatttattttgagattaagtaccataatatccacaaaatcatggtgagcttcttttcagattattcttttcttctctttggtgcactggaatatccccaagtgcttccaataatcacagaaagagtaacttatgttccagatgatctttaatgatatggtatttgaaatttgtaatctgtgtatgatacatagggcatatctttattaaccagtgtgtttaattaactggaacattttgttttgcaaacaactggggtaataggaatattgcaatttattaaagccaattaaaactttctgaaaatgtaagatgtcattatttttctaagttttagccttggggttcacacagtgtctaagacatcattttattttctcataaaaaatacattctcaaatgagtaggaccctagacgaagctttcacatctcctctcttcctctgtttacccttcccccacccctaattgaatcctctgaattgtcatttttttaaggcagttttcccaaatttctggaggtttttattgttgttgttggttttactaccaacttattttggtggtgtattttgttgtttttgctgctgctgttactatttttgaggatgaaagagattttagtatgttgccagccaagctgaaggaacaaatggagagaaacaaatgggccagaagagatgtaggtagggctatcatggacacaggtagggggctaaaattggaaaggtagaaagacaatcataccacaagtcatcccacagtgatggtaactggtaaacaaaagcacagagacattctgaggtagaggaatgcatttgtaagcgtacaactgtttgctcttttcaggaacgtggaagtatgctcggtcatacaatgagaggaagtgaatttaaacaggggacttgagtccatttcctgaggaaggcaataagatgtccact

SEQ ID NO: 14633 - DNA, 1002 bp, Homo sapiens
ctaatttttgtatttttagtagagacaggagtttcaccatgttggccaggctggtctgcaactcctgacctcaaatgatctacccgcctccgcctcccaaagtgctgggattacagacgtgagccacggctcccggctgataattagatcttgatagaattttagagtaacattttttaaaattgtaactacatcccacaactaagttaccatttttttaaagctgggtttctgtattctttcttgctaaaaatatcaccaaggtgagtcagaaatttaaacataaatatatgacaccaagaatgtaccagaaataatgaataagtatttttatagccttgcattacagaagtgttttctaaatattacagttatttcagaagccatacaaagaataaccaattagttcatacagaattgaaattctagctgggtatggtggcatgagcttatagtctcagctactcgggaggctaaggtgggaggatctcttgagaccaggagttctgggctgcagtgcgctatgccattggggtgtccacactgagtgtggcatcactatggcgacctccaggagtggaggcccaccaagttgcctaaggaggggtgaaacaggttgaaaacagaggagatcaaaacacccatgctgatcagtagtgggattgcacccgtgaatagtcactacactccagcctgcagcaacacagcagaccccatctcatttaagaaaaacaaaataagattctgaagggtaaaagttactttaaatagagttgaaagaagaagcaggaaaaatatttgtaacaaacatgacacaaaagaggtgatttatttcataaataaagggctcttataaatcaaataaaagcagtcaaaaaatcaaagtgggacaaggggatgaggaggccatttccattacctgtcatccattctttgataagaacaacgaacaatagaccttttctcaatcttatgtaaactatggcacaatcacaattttaa

SEQ ID NO: 14634 - DNA, 1048 bp, Homo sapiens
tttatttattgatatgtaaccttagttgtgagagagaaaactcagaatcttattgattgtatttacacaaagttgaaaatactttcactccactctatctcacttgcttttaaatgcaataatacttgttatcatattcactattatctgctaaaggccatttcaattactttaacatggagttatggcttaccctgttattcaaaatgtaaaataaagaatggcttaactggaattactttgaagattgtggctatgcattgctgaattttaccagtccacttttgtcatatagtgaagtagatgtatgtgtacataaagttttctggtaaaagttttcatcttagctataaaaaatatttttgtcacacaggggctatttttggagcattacaagatatacttgggagccgttctgtttcaaaggaatattataatcagacgggccgtatacctgattggtgttctctcaataacccacctttggaaatgatgtttgatgtcgggaaaactcaaccacctctgatgaagagagcattttccactgagaaatagaagtttgattaaaaatcaaccttgcttcatatcaaatatttaaccaattataagcaaattgtacaaagtatgtaggatgttttgttatagaggactatagtggaagtgaaagcattctgtgtttactctttgcattaatatataattcttttgactttgtttctcttgtgtagtggtaaaatggtagctggtgcttattgagatttgctgtatttatatcaataaagtatagtaaagcagtttgattttggaagtttgttatgtggctttttttttttttttttttttgagacggagtctcgctctgtcacttaggctggagtgcagtggcacaatctctactcattgcaagctccgcctcccgggtttacgccattctgtctcagcctcctgagtagctgggactataggcatacgccaccccgcccggctaattttttgtatatttagtagagacggggtttcaccatgttagccaggatggtctcaattt

SEQ ID NO: 14635 - DNA, 1037 bp, Homo sapiens
gctctgtcgcccaggctggaatgcagtggcacgatctcaggtcactgcaacctctgcctcccgggttcaagctattctcctgcctcaacctcctgagtagcagggattacaagcacctgccaccacgcccggctaatttttttatttttagtacagtcagggtttcgccatgttggccaggctggtctcaaactcctgacctcaagtgatccacctcagcctcccaaagtgctgggattacaggcgtgagccaccgcactgggccagagagaacttttttagtaaacatctattgggcactgagttagtcataaatgtggagacacaggtgtgaagtcacattgataaaatattagtgatatgataaagggacaacaattagggaacggactctttctggacaggaggcaaggaagagtgtgagatgtagggagacttggtagttgcaagcacaggaactggtatgaaaatacgtgcgccagagagagttaagtatgcttggtgtgtagagtatgaggtttagagatgatactgatgtaggaaggggtccagtcatataaaagtctgtgctccatgctgattttcttcaaagaaatgttgaaaggctttaaaatagtgacaatgagctatatatcctgaaggataagtctcatatcggtagaaaatggaaggaaatgacggtagggatgggaattgaatagttaaaatattccgcatataagatgatgtgtaagatgctgctgatttcttttctactctaaggcaaatatagttgtcccttggtatttgtgggggattggttttaggacctcccatgaataccaaaatccaaggttgctgaagtccctgatataaaatggttaagtatttgcatataacctgtgcatatcctcctgtatgttgtcatctctagattacttgcaatacctaacacagtgtaaatagctgttacactgtattgtttagggaataatgacaagaaaatcacagttgttcagtacagaagcaatgttttttgaaagttttctatctgtggt

SEQ ID NO: 14636 - DNA, 1016 bp, Homo sapiens
tacggtttcccactttcatatgaagtaactggtggtcatcagtcactgttaatctttagatgtgatacagatgacagatgtttcagttttggataatttttcaaaaactgacccttctcaaaaaagacccttcaatacatgagtcaaggatgtttttgcttttttcctttattgtggtgaggggcggatttaaggatcaataaagtccctattctgtcactaaaaaaatttcttgatctctaaagattaaaataaaaataccaacatcagacagctttcatgttaaaaatcagaatttatgttaaagtgctctgtaaacagaactgttactaagtggaataaacagtactgtggccgataagaataacttgaagctgaaaagcagtactcacagcaggaacaatttgaactcaggccatgtatacacaccctctagtggactcatgccagtgtcactccattgaagtgttgtgctttcctaagaaggtaatctagccactgaatttgggtgcagggtatcgctggactttgagcatttgtgtagtttaaatagcaaatcattatacctgagtattaatagctaactactacacaaacaactcaaaaccagtaatgtcatgtcattaccatggcttcttttatgtaacattatctgctacattttaccactcaaaatatatttaaaatatgtattttaaaatatattagagcatatggctcaagcaatcctcccacctcagcctcccaagtagctgggaccacaggcaagcaccaccatgcttggctaacttttaaaaattttttgtagagaccgcatctcactatgttgcccaggctggtcttgaactcctggacttgagcaatctgttcacctcagcctcctaaaatgctgaaattacaggcatgagccaccgggcctggccacaactcatatatttaactgtgaatgacacaagtgttggtcttagaaaaatacaggaacaatactaaattggatccatttacagacaggtaaa

SEQ ID NO: 14637 - DNA, 1050 bp, Homo sapiens
caaccttcataattggaaaaaatatttgcaaactctgtatttaatacggggttcatatccagaatttataaggaacttaaacaactcgatagcaagaaaacaacccaatttttaaaatgggcaaaaggctgggcacggtggctcacgcctgtaatcccagcactttgggaggccgagacaggtggttcacttgaggtcagaagttcgagaccagcctggccaacatggtgaaaccccatctctactaaaaatacaaaaattagctgggtgtggtggtacatgcctgtaatcccagctacttgggaggctgaggcaggagaaatgcttgaaccctggaggcggaggctgcagtgagccaagatcatgccactgcactccagcctgggcgacagagcaagactccaatctaaaaaaaaataaatgaaaataataggcaaaggacctgaatagaaatttctcaaaagcagacgtacaaatggcccacaggtatgtaaagaactgttcaacatcagtaatcatcagggaaatgcaaattcaaactacaaagagattttacctcacacctgctagaatggctattatcaagaagataaaaggttacaagcactggcaaggatatggagaaaagggaatccttgcccgccattggtgggaaagtaaattagtatagccatcatggaaaatagcatagaagttcctcaaaaaattaaaaatagaactaccatatgatccagcaatcccactcctgggtatataaccaaagaattaaactagtatgtcagagatgtatctgtattcccatgtttattgcagcactattcacaatagccaagatatgggataaatttaagtctctatgagcagatgaatgtataaggaaaatgtgatatatatacataatggaatactattcaacttttaaaaagaaggaaatcctgacatttcttacaacatggttgaatccaggggacattatgccaagtgaaataagccaggcacaggaagacaaataccatatgatctcacttaaaaagtcaaactcttattaga

SEQ ID NO: 14638 - DNA, 1050 bp, Homo sapiens
tcaagttttgtttctttagcatactattacaaagtcctttcctaatcccagcctgcctttgtcagtttcatgcttacgctgtttgcccatttgctgtagctccagggctgtctactatttacattttgaagctgcctaatactaccactgccagttcatctcgaggaaaaccattcattccctcacttgctcctcctgtattctttgatgtattttacaacacttaccacatcgtgttatattggcttcttttacctttctacacctcctgccaaactcagagcagcaaaaatagaaggtaccatgtgttctcattttaatccacagtgcttttgaacaatctctgattcatggtaaccattagtagatgtttgagcttaatctgaagacatgtgcctaaagtcaaaaaattcacaatctagtagtgtagatagatatccaactacttataatactaagcagtatatactaatactaactaaaattggaaatttcttgaaattatcatcatgaatgtgactcttggatctctggcattttactgggtgcatagttattctttacatgtataaatgtaaatgactaaatgaagggaagaagtctcagatggtctagtggacctctacctcccattcttataaccctctcgcactccaaaacccttgaaagatgcaacagtgccaggccttcaccagcagagaaattgctatgaaaatgccatggacagagaaagcaaaccgtgatagcaattaagagccccatacaaaagtcacgaaggcacattcttctaattggaggcgttctctagcatatgcagttttactgcaaggtgactagcagcaaggctagttttcaaaaataattttgaggagtggcttattgtaagagataagcaattttaattttcacagaaacatcagataagtttaaaactttgtttatagcatcatgttttatttatttttggtggaaaagaaatttcccctcaaggcatttgtttgtaagtagaattctttattcatttatatcttgtttaactgtaccaaaact

SEQ ID NO: 14639 - DNA, 1051 bp, Homo sapiens
gagaaagtatataaaaaggtttaggttgacagatacttgtgattgaaagttatttcagcgcatctaatctgctttactccatttcttatgttgtcctgatttcctttccaaaatcaggatgcaggtagtgtctgcgattatgatacatattacagagctacatcttttggggtgaacagccttcatatcaaaacttatgatagttatgtttagctatcacaagctcagacgtctcaggacggcattttatgatcagtttttctgtttatgattctatctaaaacaccaagaaaatagtaacacagaaaagagtaacaaaaatttttttaaattactgggctttactttttaaaaatgtgtttaataacatgaattcaagttagatgcaaagactgtaagatttcttaaatgaaatattgtttgtttaggtatctctatggttttgaggagtactgccgttcggcaaatattcagttcagaactgttcatcaccatgaaccaaaagtaaaagaggaaaaaaaagacttagaagaatcaatggaagaggctctcaaattagatcaagaaatgcctttaacagaagtgaagagtgaacctgaggaaaatatcgattcaaacagtgaaagtgaaagagaagagatagaattaaaatctccgagggtgagttcttaatactagttttatctggtttaagtattatttaaaattttttattatagccattttcatatatacacaaaagtactacagtgaacctagtttattttccagtatttaatgctgcttagctagctacttttttcgaaatatattgtatattatttcctctacctgaaaacccttccttctgttttctgtttatattcgatcaagtcattcttgtctgggatgaatcccagatattccttttccagtcttctgctaaagtatcacctcattgaaggctgtcttggtcaccttatctgaaattgtaacctgcctcctctctttggaactctcagtccctctgatgttgttctttctgtaatttacttatttattctgtttattg

SEQ ID NO: 14640 - DNA, 1035 bp, Homo sapiens
aactaaaaaataatattatgacttcatatcttaaattatttagtaccaactaaagcaaaatcaggatgttaagcaagttgaacacaaaccatcacaaagttacctacgtgttagaaataaatctgatattgcaccttcacagcaacaaggtaagacttgtttttatgtaataatacaatagtttgatacttgtctgaatattgaacaaatatgagaattctttactttttatacatcccactgctctctaggtttttgttttcttttgttttctctcatttagtccatttacatgaagaatcggtattgtatttgactatgttagttctttttaccagtaaacactatttctagtggattttttaaactcttagctggtgtctttcctttacccttgccttttagttcttgttcaattgaataccaaggtctttttatctgtatataggtctgtttgacattacaatatgttaaagacagggattatggctgtatttaatatgctttgtaaagcacattatttagtgcgtggtggtgctgaccaagtataacttaaaagcaattgcctctcatattacatactgtgatatggatgaccatatcatagttctttatcaaactcgtgtggttacctttaattccacagtcagcgttcaagcattttgatgttgtctctatgtttctacaaggctgttggccttgtgttttgtttgccatcttgcttcttagtcatttacattttctataacctaaaatctgaaatttggcagtagaaattaagatctcttctgtttaaaaactttctgcccacaattctggaagaagtattagaaatattttgagaagtggaatttttcttttttgcttttataactgtgatttttatttaattttcaaataatatttaattgagcaaatgcatattattgaatgccggtataattgcgaatgtaactatgcatttggtgttttgggaaggacctaaatgaggaagtgctcaagatagtaagattatgccacttaaggtttaggttt

SEQ ID NO: 14641 - DNA, 1028 bp, Homo sapiens
gacaataactttaaatatgtgaacattaggaaattcaaagcttatatattcttagaagctaattttgaccacgtgcgcaaattatttttcttttttagtagaatggtgcattttttgcctttgtatttgaaatttagctaaattacaatagctatcagaactacaattgaccttagtaatttcaaaaccatagttataagggttttaagttgatttttaaaaatcttaagatatgatagggatttcaaaactatgtgtgtgtatctctgatagggaggggttggggcacagactaataagtgtgccaaaaatctgtgaatccaaatgtgtaacaagtgttgtctgaataaatgtccacaaatccatgctattattggttaacaaaaaataaattcactttgaaatgttgctgaatttgggagttttgtttctacctaggatgaggaaattggaaagagtgtcactttcaccctaactataataaaatgtcagataaactacaaaatcattaacatttcttgaacccatcagagagcttctgatgcagagcaactaagtagcctaaagtccaaggaaagacagactcctccaaaaagagatgagacacaagcactgtctcacttgtgacagagcatggttacaggaagagacaccaggcaccaatcaagcagataagaagtatttggttaaactttttaagtgggtttctaaaggccaagtatagaaccattggtagtcacagatacaagtggagttcacacccacttgtaggcatcttctgcacagacctctagagaaagattgtggggaaaggcagagagtctctctcactggtgcaggcctgaatgagaggagtggctgtcactgccagaaagacaggatgccccactttgacccttctcctttaagaacaaaagccttaagccactgaggaaggggcaacacatctgttatttccagggtataggtgaaaacctatttggctgggggaagggtaaagaaaaaaaaagaatccactcctggcggag

SEQ ID NO: 14642 - DNA, 1037 bp, Homo sapiens
tagcatccctttacataaagtaccatagaaagtgctgtggccctagagagatggataaaacaaagcatctgctctcccgggataaaaagaagaaaggccattttgtgaagagatgaagactgagcggttgtggccgccttgccgaccttgagcagcagttggcttctccacatagtacccgggaataggagtctcagaatcgaatctcttctgcctgctcacttctgtgagatttttttgatcttcagctacatttttggctttgtgagaagcctcatcatccaacacagtggccagcaacgttgccgacaagacggatcctcactccatgaactcccgtgtgttcattgggaatctcaacactcttgtgctccagaaatctgatgtggaggcagtcttttcaaagtattgcaaaattgtgggctgctctgttcataagggctttgcctttgtttagtatgttaatgagagaaatgcccgggccgctgtaggtggagatgtacagctcctcttttgacttggaccatgactttcaacgggattattatgataggatgtacagttacccagcacatgttcctcctcctcctattgctcgggctgtagtgccctcgaaatgtcagcatgtatcaggaaacatgaaggggaaaaagtggcttcaattctaagagaggacagcggggatcttccaagtctggaaagttgaaaggagatgaccttcaggccattaagaaggaattgacccagataaaacaaaaagtggattctctcttagaaaacctagaagaaaattgaaaaggaacaggggaaacaagcagtagagatgaaggatgataagtcggaagaggagcagagcagtagttccatgaagaaagatgagactaatgtgaaggtggagtcggagcggggtgcagatgactttgctgaggaggacctactagatgatgatgacaatgaagatgggggatgaccagctggagttgatcaaggatgatgaaaaagaggctgaagaaggagaggatgacagagacagcacc

SEQ ID NO: 14643 - DNA, 1048 bp, Homo sapiens
tctagcaaactccagcagacctgcagcagaggggcgtgaatggtagaaggaaaactaacagaaaggaatagcatcaacatcaacataaaaggacacccacgcagaaaccccatctgaaggtcactaacatcaaagaccaaaggtagataaatccacaaagatgaggaaaaaccagtgcaaaaagcctgaaaattcccaaaaccagaacacctcttcttcaaaggatcacaactcctcgccagcaagggaacaaaactggatggagaatgaatttgatgaattgacagaagtaggcttcaaaaggtgggtaataacaaactcctccgagctaaaggagcatgttctaaccctttctattccttcaaattagctctggaaaggactacagaaagctggactgtaatttccctttgcttactcaggtcatctaaacctaaatagtctgagtatattgccttaatcagaatcacattttcccctctttaattccttcccccataataaaggaagctaagaaccttgaaaaaaggttagacaaattactaactagaatcaccagtttagagaagaacataaatgacctgatggagctgaaaaacacagctccagaactttgtgaagcatactcaagtatcaatagccagattgatcaagcggaagaaaggatatcagagattgaagatcaacttaaagaaataaagcgtgaagacaagaatagagaaaaaagaatgaaaaggaatgaacagtgtctccaagaaatatggggctatgtgaaaagaccaaacctacatctgattggtgtacctgaaagtgacggggagaatggaaccaagttggaaaacactcttcagaatattatccagaagaacttccccaacctagcaagacaggccaacattgaaattcaggaaatatagagcataccacaaagatattccttgagaagagcaacctcaagacacataatcgtcagattcaacaaggttgaaatgaaggaaaaaatgttaagggcagccagagagaaaggttgggttacccacaaaaggaa

SEQ ID NO: 14644 - DNA, 1047 bp, Homo sapiens
cttgtcagctcagaatggtcaggaacctttttttgtgataagcctcacagaggctatggaaaacaggagcacttttttcttgggaatataattgcagtaatactgtaccacctaatggagtcagaaaaaacaatttatgtagaaatatagttctgagagccttgcgattattgccttttgtgtcattctacctacattacacaaagtaggacttaggaagtcctggaaatcatatgttggatattttctaattactgtgtcagcatgatcaatcattttctaaatttgccagtttcctgaaatagcttagcttatgttcatagcactttagaggaagcagcataaaattagtttctattggtgtcacaaaagaaatgaaatatttatctttggcaaaaagacctgtacaccaaacttcaattaatgagtacaagaattagaaatcaaaactttgtttagtctaaggaaaaacagttctttaaactgtaaccacatggctgtttcttgtttgcatcaactctgggtgactgttattgtcttctgtgaattctctggggcaggggcctgactttgttgaatgagccaattgttttcatttgtgttgcccatctagtaagttcccatctggtttgtatcagactgttttcacagccaacaactgctgccttctctatatcctgacacttcagggccccacgctatcaaagcactgctgcgatggccttgctggcagggcctatacagctgtgccttacagcttggaactattacccagagtaatggtaacgtagaacttggactggcccttattcccactggtgtcgtgtgtacagtgagcagaaacccaccctctccctctctcccccttgccccgaaacttgctattcaacagaaaatctttaaagctcttattttaggatgtggaatggtggtgtttttattttctagtggcttcctgtatttgaaagctcatttttcattctttcactctttcaaaagttaccaggtctggccttagggaagtgaactggtcactatgtcacattt

SEQ ID NO: 14645 - DNA, 1059 bp, Homo sapiens
tgccatacttacatctagaactcagtttcatctaggtgagtatctagaactattccagtaccctttgggtgctacttggttatatattttgatagcagcaagacactttatctctagaaatcctgtcccaatattgtaggtcttgagctctgtttctgagcctttgctgttaggttgtctgtattttctttcattttggaactgttttcttcttttaattatgtaaagctaaaactcagccaggtgcagtggctcacacctgtaatcccagcactttgggaggcttaggcagctggatcacctgaggtcaggagttcaagaccagcctgggttggcccggtgcagtggctcatgactataatcctagcactttgggaggccaaggtgggtggatcacttgaggtcaggagttcaagaccagcctggccaacatggtgaaaccccatctctactaaaaatacaaaaattagccgggcatggtggcacatgcctatagtcccagctactcgggaggctgagggagaattgcttgaacccaggaggtagaggtcatagtgagccgagattggaccactgtactccagcctgggcggcagagagaaaaaaaaaacaaaaaacaaaagaccagcctgggcaacatgatgaaaccctgtctctactaaaaacacaaaaatcggccgggtgtggcagcatgtgcctgtaatcccagctacttgagaggctgaggcaatagaatcacttgaaccccagaggcggaggttgcagtgagccgagattgtgccactgcactccagcctgggcaacagagtgaggctccatctcaatcaatcaatcagtctaacactcacattaagttaaatatgtccatcagcctggccaagaactggttggcacttcagggagcaatggccctttcatgttctccagaatgttctgcatgatggcagcttgttttttcttttaagtgggtgcccacatgccattattccttattttgggatatctttgcaatgacccccagaaggaatcatgctattgtactagaagagtttctgcatt

SEQ ID NO: 14646 - DNA, 1032 bp, Homo sapiens
attctcctgcctcagcctcccgagtagttaggactacaggcacccgccaccacttctggctaatttttttttttttttttttttttgtatttttagtagagatggggtttcaccatattagccagcatggtctcgatctcctgacctcatgatctgcccgccttggcctcccaaagtgctgggattacaggcgtgaatagctttcttttggagatgatgaagatgttctaaaagtagtggtaatagtgacatatttgtgaatctcctaaaacccaccaaattgtacagtgcatatggatgaattttatggtacacaaactgtatctcaaaataaagctattattaaaaaacatttaaaagaatcagactaagtagaatcttagatttttaggccttagggataatactactttcccatttgttatcttcatgtacatctcattttttcctctaaataaacagagtatgacatgcacaaaggatagatgtggtaattccttaatatttatggaccacttgagatatgagaatctttgttataaagaaatttttgttgtagtagaatctgatccatgtttttctcatacatcctaatcatgagctagggtattagaggataaaaagctttcttatactttatacctgctgtgatgacaagctaaggttttggtgatgcctttggcttggtcacaacgtgctttcagtgtgttcatttgattattttgcagcatgtttctgctgtagaagtcttcatattgtaaaaagcattcaagtatgaactcttgcctataaaactaactgtgttggataagaaatgttttatttaacagggattatgtagctcaaggtttctcaaatttggattcatgatcgtctgtgaaacactgtattaaaagttaaattgccaaatgtttaggtactcacttggtgttgatgggatcataaacccatgtgcaaaggtaggccttgagatactgtggtgttatttggttataaaatgcttatgaaggtgtattagttttattactgcat

SEQ ID NO: 14647 - DNA, 1043 bp, Homo sapiens
atagagaatgcttttcccattgcttgtttttgtccagtttgtcgaagatcagatggttgtagatgtgtggcattatttctgaggtctctgttctgttccattggtctatatgtctgttttggtaccagtactgtgctgttttggttactgtagccttgaaatatagtttgaggtcaggtagcatgatgcctccagctttgttcttcttgcttaggattgtcttggctgtgtgggcccttttttggttccatatgaaatttaaagtagtttttttctaattctgtgaagaatgtcaatggtagtttgatgggaatagcattgaatctataaattactttggacagtgtggccattttcatgttgattattcctatccatgagcatggaatgttttcccttttgtttgtgtcctctcatttccttgagcagagtggtttgtagttctccttgaagaagtccttcacgtcctttgtcagctgtattcctaggtattttattctctttgtagcaattgtgaatggcagtttattcaagatttggctctctgcttgtctattggtgtataggaatgcttgtgatttttgcacattgattttgtatcctgagactttgctgaagttgcttatcagcttaaggagtttttgggctgagatggtggggttttctaaatatacaatcatgtcatctgcaaacagagacaatttgacttcctctcttcctatttgaataccctttatttctttctcttgcctgattgccatggccagaactcccgatactgtgttaaacgggagtggtgagagagggcatccttgtcttgtgctggttttcaaagggaagcttctagcttttgcccattcagtatgatattggtatgggtttgtcataaatagctgttgttattttgagatgtcttccatcaatacctagtttatgagagtttttagctttattgagagtttttagcatgaatggatgttgaattttatcagaggccttttctgcatctattgagataatcatgtggtttttttccttggttc

SEQ ID NO: 14648 - DNA, 1073 bp, Homo sapiens
catcttttcaacagtcagatagtttgagttttttctcatatgaataactcattgtgttaatccactatatatatgcacctttgcaccttcagagagcagaatggctcaggtgttatatctgactttctcacacttaggatcctgggggcctagggcagtgcttggtccagagtaggtgctcaatgaatgtttgtggcttgagtgaatggatgtataactaattactgaagcattacacatgagatgcacaataagtatttgagtgaatgtatgcatgcatgcatgaattaataactgtggaatcctgcagcagttgggtttgtattttaatattctcatagtggtgataagtttgggctgattcttatactctgcctgcaccctatccacctgctgtcatcctgttttactctttcttctcattaaaatgttagttacaatggggacaccaaagtggttggcatgaaagttagcagattaaaaggataagggtgacaatgtttaagaaatattctttctctttaaaagtctctgtactgtatattacgtggtgaaataaatagctccaatgtgggaagacttattctgctagattgtcttttgacccaattaaagctttaaagtgtcagacaagcagccaaacaatcctcttgagggtgtgggaggggcctgggctggcaagagcagtgctggtgctatcgaaggaggtggccatgtgtggaacttggcttcatggttggttgcccacagggacttagggtacctttcttgtctgtcactttacagctggtgctgtatccccggagatgaagtacttccattcaattaggaaaacatgcttagaaattctctctttcaagaacaacaggcaatggggcctgtcagagggtgaagggtgggaggagggagaggatcagaaaaaataactgtgggtactaggtttaatagctgggtgatgaaatcatctgtacaacaaaccgtgtaatacaagtttacctatacaacaaacctgcacgtgtaccccgaacttaaaagttaaaaaaaaaatttatctagtaagacttgtcaactga

SEQ ID NO: 14649 - DNA, 1060 bp, Homo sapiens
cataatcgggtcccaaatctagagaaaaagacaagccagaggcatccttggtggggtgcctcatccagcttcacctggggcttctcttctttgctgcctttgagtgcgcgctttcagttgttcagccctcaccttcatctgcaagcccatgggtgagtgtgtgctttacacacctttgtgtcttgaggatttcagcatatcatctggttctcccaatgactgtaatcactgttaaaataaggacctcatcttctatttccttcttagtactcccaggcctcatgggtgtcatacacagagaggaaacactggtgaaatagtgggtatgacagtgctttggaaagtgatcataattaccatactaagcactgtttaatgggttcttagctgcatatgaccattaaggatacaaaggtactgctactttgtttttctagtataaaaaagtctgccttgcagaacgtacatatagtttactgtgttctttctatggccaggaactttgctaagcactttacgtgcattcatttgcttaatcctcatgtgcacacatacaaacacaatcccttttttttgggggggggggggtgcctggagggatgcagttatgtagttattactatccttgttttacagatgaggaaagtgaggctttataaaaaattttttgctctagtcacactgaccaggaagtatcggagacaggactggggcccagcctgtcttacaccaaagcccctacttcaaaagttgcatgtgacatgtgtacagcttgctctatatttgtgtgtttacatctttatctccagtcctaaatatgatgctttttcaagagcatagactaaaagaacaaatcaagtcatgttaatacgccacattagttataggttgtaaggaagtaagatttttaaaataagtctagaccaggcatggtgactcatgcctgtaatcccagcactttgggagggtaaggtgggaggattacttgaggccaggaattcaagaccaacctgggcagcatagtgagaccccatttccatcaaagaaaaggaaaagtctg

SEQ ID NO: 14650 - DNA, 1084 bp, Homo sapiens
tcaacctcaaacgtagatttatagcgcccgtcacaaagggcaggaccgctgcaaaaaaatggaatcttaaaactttagccatcgttcgctaaaggaaatgaaaggagaaattcaacagtcgcttggagcctgggttttgcttagtaagtgataggctgtttatttcagttcagtttatcatactggttttcaggccttggattttgagaaactttagattattgatattcacgtgtatttattaagcatctactagatgtaaagcccatacagaagtttccaattccttaccttctgcattcttgaaaaacctgaaatattcattttcatgtattaatttagaacattgtgattacaattggttacaaaaaaaataagcgcccattaaagaggccagtgggtttaaaaagctaagtccgaaatttgttaaaagcgaaaatattaaactggaggaatattattcaatgctgtttctctttttctctcagcagcataaggagaaggaagtaaaaagtctgcttgaatgtgaaaggagagaaggcactgtagaccaggcagtctagattgtgaattcgtgaataatttgggaaatgattgttcaagaatagtcaaaagatgcataatttttcaaattaattcacatgtagaccgcagtttgttttgagacggagtctccttctgtagcccaggctggagtgcagtggcgcgatctcggctcactgcaacctctgcctcctgggttcaagcgattctcctgcctcagcctccccagtagctgggactacaggcgcgcgccaccacgtcaggctaatttttgtatttttagtagagacggggtttcaccattttggccaggctggtctggaactcctgacctcatgatctgcccacctcgacctcccaaagtgctgggattacaggcgtgagccacctcaccgagcctgtttgtttgttttaatcaatgaatgaatgaagggaatcagatgtcactgatgaagaaaacttccataatttcttgtgaataaggtcaaagacaacgtattaggttcttagttgttggggtttttttaagtaaggaatagct

SEQ ID NO: 14651 - DNA, 1032 bp, Homo sapiens
tgtgtgcgcctgtagtcccagctactcgggaggctgagacaggagaattgcttgaacctaggaggtggaggttgcagtgagccaagattgcaccactgcattccagcgtgggcaacagagggagactctgtctcaaaaaaaaaataaaataaggaaatataaaagaatatggaggcattaatatagtcattgttcatgttggcattttgatgtctatattattttttaaaacatttaataattttataataatttctaatttatgatttggtaccgtgtcttgtacagtaagttgaacatcatgaatccagaacatttatctgcagttattcttatataatgttaataactaggtttttcattgaatgttagtcaactattttagtaacttagtaaaaggaatcttctaagagcattgtacaaatatagcacatacaatatagatttctttttattttacttatgccctcttttttatttctaaaagctgcacatgtaaacttaaatatttaaactgaaatgggatgtcttatagaatgatttgggggggtgttaatgttgtaaaataatatctgtacacaaaatattggttttatatattataggtatgcccaagaggacagagaacgaatgcacagaaatattgtcagccttgcacagaatctcctgaactttatgattggctctatcttggatttatggcaatgcttcctctggttttacattggttcttcattgaatggtactcggggaaaaagaggttagcacatttctatgaacatatctggctggactaatgttggaataattatcactcagaagaccttattaagtaattatgcttcttctgttttaaaagtggtaaacatgtttttctttatcttcagattattcttaactgtgacaagaaaacttaacaatagggcatgacttagtaatttttaagggaactgtccttagtctgttttactctcagtgatcttgaaggaatacttttacttctcaactataatccttattggttttctacac

SEQ ID NO: 14652 - DNA, 1067 bp, Homo sapiens
ttattgttcctgtaaagaaaacaataataaaaagcttacctacataaaatttcaatgttttgacacttaattgttgtttggcacaatagtatggaagtaattcaaactggtaaatagtttcctctcatatctcgggtatatatacataccatattttattgatccagagatacttatttcactttgtgacatctctgaattaggatgcatcttacaactgatggcttattagatttaatgaaatacagaagatacacagaataaaaagggttttcctgtggttggtttgtggtttgtgataggtgttctgtgatgtttatgctttgaaggccttaagactcatggttgcaaccatggaagcaaaatgaaatttttagctcttaacctaacaacctgaccatgtttatccatttttattgtttagaagtttatttactgatacttggtggaggttgtgtgaattagttaaattttaaatgtttaagacttctattaacagctgcaaaatatgaaagtaagtgcactcacttttcctgtagtagtctgtcttttgaattcacagcagttgtatccttgagttactttgttaatgtatttttctcagtacatttaaccactgggaaatgaacccttgtacgaatgtgtttcttcttctctgtaggaataaaaaataaatataaaaattttatttgtattgcacacatttggggggttattagtgttcattaaaattctgagttgcccaaagaatcctcaattgagtaattgtataatcggggtagagtagggaggggtgtcatgtgtctgattactaggactatatcttctggtccacttggggccatttttacaatcatttttttcatatgtcctgttctagcagaaaagtatatatgcaaaagaagaaattacaattacaaggcctcacgggcaaataatttccacaatacttaatatgtatctgcatttttaatttgctttggtaaaaataagactagaacaacttatagccactgtagttgctaattttactaaataatttgttaaaacgtggtcataagaaattt

SEQ ID NO: 14653 - DNA, 1032 bp, Homo sapiens
tagactgtttcccaaaggagctgtatcattttacataaccaccagatatgtttgagggttctgatttctccacagtctcatgaatacttattattgtctgccatttttattttagccagtcaaggaggtttgaaatggtacctcattatggtttcagtttgtgtttttctaatgagtaatgatgttgagtatcattttatattttctgtgcttattaaccatttgtatatcatctttggagaaatgtctgttcatatcctttgctcattttttaaagattggattatttgatttctcattattgaattgtaagagttctttatatagtctagctataagtcatatatatatatgatttgcacaaattttcttccattctataggttgttctcactttcatgatggtgagaaccttgttttttaaacagtttctcacttgtcttgtgaaagggtactggataccaaccccctcatgctggcttagccatcaaaagcgtcccatttttacactttgtagattcctcttggacccacttttctccaaagaaccctattcccccaagttatccttccagttctctagcatcaaaacaaaattcgctttcatttggcagttgttagtccaaactgcaccattttgtaagtcccccagcattttgcagaccttggtcaaagtgacacattccaggcgagtttgggctgtgagaaacatcctgcctaaccacctgaccacaacacacaagaacatccttatcataccctgctaagcaaaggcccaactgaaggaacgtccctatcataccctgcaactggaacaaagggccaaaccacctgatcataggaacatcttaatatcctgccgggcagcaaaccagacagcccagacccctcctgcccatacctataagtccccagcctgtgaacggcagtgggctctggcattaagctgcaccccccacctctgcaggtttttgcaatatacttgtgttgctgtagagcccccccccacccccatctttctttaactcccac

SEQ ID NO: 14654 - DNA, 1049 bp, Homo sapiens
actcatgcagctatcattcaggaccttttgggagtaattcactaaagcctctatatgccatataacatcttcagtacctatctgtggtacaaagattgaagctaagtggtcataccattagaataccaaatgtgtccaacaagattgtaaatgaaaaaggtttgctggttttggcaggtctgaattactcgtccttgtgcccaggcataacatagggaacattgtcctaaccactctggaggtaaccacggccataagttagtgccacatagccaatatgtcccatttggagctagccaataaataactgatcattggcacccaatgggtggcaagccattcagtgtcttgtaatatgatagtgtggtcacagcgttctccaggtatccaccccatatctctcgtactgtttggacataggtccttggtgtgatttctttgctcccaacacaaagcattttggctgagttggccaaatgaaggggtgagccagataaatcaataccaatttaaaaggcctgtgtaacaaataattattcttgctgtactgtatccaaataattaagccaagtatagtaaagcaaaccagtcctaccatgacttgtcttttaataagtgggaaactggagagagaaaattatgtttcaaaaactgtagcacacctgttgttaaattctagtcttgcctcatgttttccaatttttagtattttctacagtttaaattctgatttttctggctacaagtttctaaaataagttgtgcttccttaaagtcctatgaactgaaaactagatgttttatcaggcgctgcctctaaaccccccaaccatcacagaaggaaatctcttcactgctggcattgacaactaataactgagggtgcccggaatccttcaccccatgtctagtgagtctacggaaccagggtaattgagacaatatctgttacaggaatcaactcctggatacatcacacttgagtcaaagcctggaaagctgaggaagcaacccctgagagcccaaaggaacgtcctaaatataatgga

SEQ ID NO: 14655 - DNA, 1037 bp, Homo sapiens
ggatctggcacacaggtaaaaacctaccaaatactttgtaactaactttgtttttaagtatacagagtaagagagctttccttttagtgttacaaaaaaatgaatccatggattaaaaatcatcaaaccattgggtgacaggttattttgataattattcttttaggattaatctctgtaaaacatactaaagcaatagttaaaacttattaaagagtttttttaaaaaaccctttttgagataaggaacttttcaattttgtgtttcactttaaataaggagctttgagtttttaagatagcctggctaaaacctgtgtaaggagatggaactttcctgtggggggaaagaagaaattaaaatttatacatataaatattatatacagattgaatgaatttaagacaaatacaaaatttatttctaattttatgatagcaacaatagtagaagtaatattgattttttaaaaaccaacttgttacagaagaaaagtagaaaatagtttttttaacagacataattgttcacaaaattgtttgataaccccttttacttgccttttcaagtttgacttttctttctccgtctccgtagattgcagctttcttttcttaggttagtgtccaggtagaaatgttcagcatgttatggactgaatatttgtgtctctccagaattcatatattacagtcttaaaccccaatgtgatggtattttgagatgaggcctttgggaggtaattaggtcatgaaggtgggtccttggtatgatgggactagtccccttatgagaagaggtaccagagagcttgatttgtccctctctgtgccatctaaggacacagcaaaaatgtggccacctgcaagtcaaagaagagagctctcatcaaaacctgaccatactggcagcctgatcatggtctttcggccttcagaagtgtgagaaagtaaattgatgttgtttaagccactcagcttatggcatttttttatggcagcccatgctgattaagattttgctaccaagaagtggg

SEQ ID NO: 14656 - DNA, 1205 bp, Homo sapiens
taaatgctagttaagttcttaggttaagctgcagagatacagtcataacctgagttgcgcatttctgatattaaccgttctaatgttaaattctgggtcctgggagcgggacagtacaagacaaagaggaagagaagagctttccctctttcttagctgctaatgtatgaatgtgggtaaggctttgactttccaaagttacttgaaattttaaattataaaattttaaaactctgaagaatcattggtagaatttcagccaatgtagtagtttagacatttaggggagaaatgtttttgctctggcctcagttgttcagttttacaaattcctgtattcaattttcttactactcagtgatggcttttaattacttcctcctcctttgcacatttgaattaacatattctctaaatgctaagcttgtacacaattgtataggggtagttgctgatgtagaaggacacttgtcacaatttgtatgtattgatcatttgtaagttgggactaagacttttctgtggtgtgtgtgtgtggtttttttttggaagggagtgtgttgttattctgtgttgctttgctttttcttaaaagatcctcttctatatatttcgtgtgatttaaatgttctttttttttatataggtttgtggtaaatatgccagctctagaacacatgaatcagattttacacatcttgtttgtatttttaccctttctgtgggcacttgggactctgcccccacccgatgcacttctcttatgggcaatggagcaggttttagagttcggccttggaggctcatctatgtcaacccacttacggtatttatttttaaatattgatgttatatgtaatattcttaaagaacatttttcttttcaagtaaatatttttttcttttttttttctgtacaggttattagtaatgttcatcatgtctgctggaacagctatagcatcatatttcattccaagcactgttggtgtggttcttttcatgactggatttggtttcttgctgagtctgaacttaagtgatatgggtcacaaaattggaaccaaatctaaggatttacccagtggtccggaaaaacatttttcatggaaggaatgccttttctacatcattatattagtcttggctcttttagaaactagcttgcttcatcactttgctggcttctcacagatttctaaaag

SEQ ID NO: 14657 - DNA, 1050 bp, Homo sapiens
tctgtagtattcaatatgtatctgaaatgttttgtggtatgtaatattttgtagtattgaagccatctgagcctcagcttctctctgtgggtagtttttaaattattcaatctctttactttttgtaggttattcagattttttatttcttcttgagccagttttagtaatttgtgtctttctaggaacttgtcaatttctgcattatctaatttgtggcctacagtggttcagccttaaagcatagttagtacactgtcagctctctttagtgttactgttttttttttttaagaacaaactttaaaatatagtcttgtttattaattatgaggttggagaaaattaacaaaaaaatcaaagaataagatttatttcttcaaaaatactggggcaataataaaattactgtatagtctgtcttatatgatcttgaaaattcatgaaaaatcttctaaggataaataaaaataatttttacatttctacaggttggtatcatacgtgatcgtttgattcagttcatctctaaattgcagtttgccgtgactgtgcttttgacatcatggacagagaaaaaacaacgtcgaaaaacaactgccactttatgtatactcaacattgtcttttctccattcgtgttggtcatcatagttttttctacactactctcttctcccttactccctcttttcacccttcctgtgttcttggtggggtttccccgacctattcagagttggccaggagcagcaggcaccacagcctgtgtgtgtgcagatacagtgtactactaccaaatggtgcccaggttgactgctgtactgcagactgcaatggcagctggaagtttaggtaagtaaatgggttgtgctcaagaatttctcactaatgtatttaaagtacaaaaaaataacaaacaggaaaacaatctttttatccaaccataagatagcataacaaccataacaatttgatgtgtaggcagaaagactaaatatgaaattagaagtttatctcctgctccttgttttcatctaaattaagtta

SEQ ID NO: 14658 - DNA, 1103 bp, Homo sapiens
gaaaacatagagtaaccagctggcaatcagtggagcttaatagctgggtatgaacacttaacagacaagatagccgtgccaaaaccatcccaaggtagctgtgtgcattcacagtttggctgtactctatgagaggtcatatctgagacttcaaactgggcagggtatggtagggagcagacagatactgacttcactacaataagccagccaatcactaaacaaacaagtacataataataacaagccctggagttaggaatgaagaggaccagcacccagaatttctacagtgttacctggaatatccaattttcaacaaaaagttgagatatgcaaagaaatgggaaagtctaacccatatatcgggggaaaaaagcagacaaccaggcttgcctgtaagagggaacagatgtcagatttaataaaagatttcatagtagtcattataaatatgttcatagaaccaaaggaaatcatggttgaagaaataaaggacagtatggtgacaatcacatcaaatagagaatgtatgtagagatagaaattataaaaaagaaccaaatgaaaaattccactagaggggctcaacagtagatttaaactggcagaagaaagaattagtgaacttgaagattctagatcaatagagattatgcaatccaaagaagagaaaagaatgaataaaaaggaagagagcttcagagaaacgtggaacaccattaactgctccaacatacacttagtatcggaaggagaggagagagagagaagggagaaaaaaaattatttgttgaaataatggctgaaacttcttaaatttattgtaaaacattaatccacacatccgggaacttcagtgaactttagaataaatgcaaagagatccgcaggcaaatacatcatagtaaaaatgtggaaatccaaagaccaggagaaaaccttgaaagcaccaagtaaaaactacttgtacattttaaggaaagtcatataaaattctgatttgtcatcagaagcaatggaggccagaagcatggaatgacatattcaaagtgccccctaaagaaaaccccaaaacagaaaggttaaccaaggaccctata

SEQ ID NO: 14659 - DNA, 1035 bp, Homo sapiens
actttaaaacttaacctaattggcatatatgaaacagaatacccaacaactgcaaaatacacattattttcaaatgcagatagaatatttatcaaaactgaccatattccaagtcataggaatggaatatattctttggccatgtatcattcacttagaaatcaataataatttcaaaaatagaaaaattctattaagttcataaattaagaaatacacttttaaataactcatggatcagacaataaattacaatgaaaattagaatatatttgaactgagtagtgaaagtgctacatgtcaaaacttatggtagacgcctaaagccatgcttagaaggaaatttatagtcttaaacgcacattaaaaaaaaaagattgaaaatgaacctagtagttaaaatattctaagaatagcaaattaaacctgaagaaaataaaggaaataataaagaacaagaattaatggagtagaaaatgaagataaagtggatcaactaagccaaaagttgattctttgaaaagataattgataagtgtctggtagactgaaaaaggaagaaacacaaacaaccaatatcaggaatgaaaggatattacaaatcctagagtcatctgacaaaatatgtgcacaacttcatgccaattagttggaaattttagatgaagtgaataaattctttaaactatggaagagccaaaattgacaaatgaaaaaatagaaaattcgagtagttccctatctgctaaagaagtggaacctatagttactttatttgcttttccatagtgaaacaacaagcctagatggattgattcgtcaatggaaagacaatcttaaattcttacaaagagcagtagaaatgcaggaaccctccccaactcattttatgatgccagaaaacctagataccaaaacctggcaaaaactttatgagaaagggacctatttcattccccccaacatcaatgcaaaaatcccaaacaaaatactagcaaactaaactacacacatacacacacacacacacacccc

SEQ ID NO: 14660 - DNA, 1071 bp, Homo sapiens
ggaagtttacagcagtaccacattattgaaactataatgaacttcctgcacatggcagttgcctaagacattttaatttgatatcataaaacatttttagatcggtgaagtaattatattatgggaaaggtgtattaagactgataatgtttgaagttaactacctcaattatatttgagaaataatagtcatcaaattgctttttatttggcttgtatctttttatgtattttgtgtacatattgtatctttttacatgaggggctgaggtatatgacctgttgaagggaacagtgcagtaggagacaaggattgtttagtcatggctgtgctccaaaatatctgtgtccatggacaagtcctttaaccttttgagtttcagcttccaaatcagtaaagccagttgggcagattatattatcacatgtactgtccagttactacatttaaaaatttttttttatcaatattgtgtgtctagtcaacataccgttgccaaataaatgcctgttatgtgtcaggcacttagatgtttcagtgttctaaggctggatttctttctcggttctgttttatttaacaaattctaagttggtgatggttctttagaaaagctgttcttgtgttcttgtaagctattgatttttcttttgggattgggatgtgtagggaaactcttgagaggaaggaggatggagatttcatgggagacaaagggtggttgagactacaggtttgaacaagcacaggacccttggtagtctgatgtgaaggacattataaaaacacattatgaaggttttttctgtcacttcaagctgggtcttgttaaacctttgaaaattctctaatacctcatttgtttttgaaagaaatctatagcaacatcattttgtcatgtggtaaatattgctgagcagtcactaaatacctatagtcttttagtttgttcagattacatctaggccatttgtttactctaatagctaatagaatgtacagctgattttggtttaactgtgcgtgcatatttgtaatttttaaccaagaagtggcatatgtccacaagg

SEQ ID NO: 14661 - DNA, 1076 bp, Homo sapiens
ttaagttcattttctcattcccaaagtttcagaagttaacaaagctaaacattttatgtcttcaagtaccattgtttaggttaaggaatggaatccatgttaattctcaagtggttgatatccttaatgaaggatctagggaaatgtttctgaacagatgtaatcagtagagccacattgaagggccccgtggtggacatggtgataaaactaacctttgaaagaaaggacagtttgagtccctgttctcctatttcgtagccaggtgttcctgggtaagctacttgatttcttaaacctgtttttttttatgtcaagtggaaatacttttgtcgtaaggttatcttgaagatttaatgaaataattatataaagcatttgagatcttttctaccatgaagaaagtgccaaataaatggtagctgttattattgagtatatgaaatcttgagatacttaggggtatagagacttgcttagtatgagagggttgtctttcagtatagcttttgcagtgtgcctggaagccaaactagagattgagtagagaatttagaagacattgtaaactctgtgagtttagagagcttgcatttgaatagactaaaagttatagaagaaagagaaagttgagtatgagtagctttatttggctctgcaaagctggcaagatgtcaagggtttggagttaatgattaggtgggagtagatggttaaattgcggataaagagtaacagtaataaagcaaaggtgaatgttcaggctagaatgatcagtcagtaaggaaggacaagggttggtattttgaagaggagttacagtttatggttagaaatgagcaggaagatatcattgctacaggaaaggatgcaaaagagtaaggaaactaaatcattctgattaactcagttattaccattttttaaaaatggagtctttataaaaggcgttaaggctttatatgtgagttctaggttaagtctgaaaaattgtcttggaatagtgtgggtcttactactgcagacccaaaccaagatattagcattccaactggtctctttcctgctagcatctt

SEQ ID NO: 14662 - DNA, 1047 bp, Homo sapiens
tttgcaaaaataatacagtgaacttccatatttatttaaatggccaattgttaacatttttccacattagttttacagacttttttccctgtgtatgtgcatatatgtattcatattctcttggcatgcacacacacattttgttattttttagttttgctgaaccatttaagactcagtatggacatcatgaacctttactcttaaatatttaaatgtgtgtcccctaagaacaaggactatcactttctcttacataaccatagttcaattatcaaatttaggaaatttaacattcatacaatactattatctaatatacaatccatagtcagattttatcagttgtcccagtaatgtcctttataacaatcttcccctccccattccttcaccctttgccttcatccaagccagtccataatcacatattacagtttgttgtgacctccttggtctcctttaacctggagtggttctttagtctttttgcattttgtttttcatgagctctgaagttttttgagggatagttctttaataactttctcatattgttccaggtttctggtcttcactctagcactaattgaaaaaaaaaaaatttgttttccgagaactgttactttcctccatattttcaaatttattaacagagaattgtacagagtgatttattttacaacaataaaattctatttgtgaggtgagtatagcctgtttggcttctaattttaaataatttttttagttagactatttagtggcttacctattttatttttttcacatataacatgtactataattttacgtaatatattccttcagcttttattttattttgtatgtgtgtgtggttcatttttctttttaggttgaatatttagtatactgattttctttagtatactggtttttttaactaagtgtgaatttttttttttctattttcaacacactattgctggcttaaaggtgaggtttcttaataaggtttggtcacatctcagaatttgataggagatttttctcattattgtttct

SEQ ID NO: 14663 - DNA, 1071 bp, Homo sapiens
ttgatatgttaaagtgttattatacttgtaccattcaattggagattgtcataaattaaatatggtattttttactcagatttgatgagactgcaactagagaataaatattacattaaaattgctgctattttaaaacatagaatgtaactgtttgtattgtaaaagttgtgtgtcctcagtgaaaaatactgccttcagcttccaaagcaggcacctgaatgcctttttcttttctctctctcttctttctttaaatacatgccttcactagattgctgtgacctactaaacctcattttatttgcttggaacatttttggcttctctgtccacaccatagaaaaggacaaaggccttccagctctccttttctcttatttgttcccttctaaatacttgactctctgggggtgtgaaaagattcagctcataatttatactactattaattttgtggtccttctaagccaatttaaaattatacttttgtgtatatattttcaaaatctttgctactgactaccttagctttaaagttgctaatttggagatgactgatagaatccctgaaacttggtggaggggagtggaaaggagcagaatgtgtttgtgtatatgtatgtgaaacatggatcttctatatataaatattctttagaaaaagcgttcagtctttttacaattctaagtaaaacgtataggtcaacagaaattaaaggaatatttcttaaaattcatttatttttcttttttgaaagcagacagaagcaaggctagtatagtatgaatggtcaggtagtttaaatgcgttgtcccacgtggaacaggagatattaactgtttttaaagctttacattatttttttacaagaatttgttttcctgtaattttcttcacagttaaaatatcctaatttatattttaacaaaagagatgtaagatacatcaaatatagatgattcaaggtaatgttttttagacctgaaactattgattcaatttatcatcagtgtttatttctattgtatctagttatctatccaaataattgtattggcttagcggag

SEQ ID NO: 14664 - DNA, 1032 bp, Homo sapiens
tttggcaatcatttaaaaaatttaaaattatataagctattaataataaaagcaacgtaagttattaagtgaaaggtaaaaatttctgtggttcacttctccagaggtgacaacttttaggttgtttgtgtatattttcggatattttctatgcatatacaaacatgggtgtgtttgggtagaaaactttttcttcctttagcataaacaggaatatagcataaacatatatatatgtgtgtatatatatatatttccttgcttttttcattatgtatattggataatctctctagatcaatatgcatatgttttcctcttttaacaatttgatagtagtccattgttcaaatataatttatttaccccaatttttaaaattaatatttaattatccagtttttccttggagtaagcatccataaatatgcatatatatgtacatatatgtctttgagcatttaggccagtatatcataagatataacaggtaaaaatcacaaggtaatgtccagtagtagaattgttgggtcagagtttgtggcttttaaatttgataaatatggcccagttgttctcaaaaaagattatgtcaagacaggcatggttgttcctacctgtaatcctagctacttgggaggctgaggagggagggttcgagaccaacttggacaacatagggaaaccctatcctttttttttttttttgagaaggagtctcgctctgtcgcccaggctagagtgcagtggcgcaatctcggctcactgcaagctccgcctcccgggttcacgccattgtcctgcctcagcctcccgagtagctgggactacaggcgcccgctaccacgcccggctaatttttttgtatttttagtagagacggggtttcagcgtgttagccaggagggaaaccctatcttacaaaaaaaaaaaaaaaaagatcttgtcaattatgttaccaacaactgtatggagattcctattgccacacaactttgcctatattggctaatattattttttaaaatcttg

SEQ ID NO: 14665 - DNA, 1031 bp, Homo sapiens
tcctgggttcacggcattctcctgcctcagcctcccgagtagctgggactacaggcatctgccaccacgcccggccaatcttttttgtattttattagtagagatagggtttcaccatgttagccaggatcgtctcgatctcctgacctcgtgatccgcttgcctcggcctcccaaagtgctgggattacaggcgtgagccactgcgcccagcctttttttttttttttttttttttgaaacaaggaggaaaaggaaagtttatagttatagaaatattctttgtagttaagatgtgaaagtgggctttattgttaaataagctattttttaaaaaaattactatttgctaaagaaacataaatctgaaatcttgcagcctgattttagctgttctgctgatttaggaaaaggtcctttggggaagcaaatcattttggttggttgggtacaggttttgcaaagttagcatcaggggaacaaaaatgtctgggtgataccaaatatacaaatgttgtacgtggttccaaatatggaaatggttttgtctaaagcagccactgaagagaaattatctaaatattagcccctttaggaaagtggaatgtgttgtctgatttggctctcaggcttagtatgaaagtttgtgcaaaagtacagcttacaaaatgctatttgttttattaaaaggattgataggaagttgacatacttagttaatttaaatttggaaggagctcagcaaacatctttctagttgtattttatgtctccctccaccttcttttttttttttaatcaaatggggaaactgaagcctaagaaaggatatatggttgcatagcccacctggacagctccagtctctttttttgtgtgtaaatcccattcagaaattaaatttcaaaattaattttcaattacattttgattacctgttgactaaatacatttttttttactgtaatgcaactgggttgtaactcaaactcatgcataagatgaaaaaactacaatattaaaaatcatttt

SEQ ID NO: 14666 - DNA, 1049 bp, Homo sapiens
aaaatcttatacctctaggcaatctaagacatacagtactgtgttaaaaattttgagcttttatttgtcatatggttgtgactctagcagaggttggatatattctttattaaagtgtagaatcctcaaaatctgcctctataaatttaaaacctataatcttagaaatatataaaatcttgacttataaaattaaatgtataacttaaaaatgattaattcttttaaaatgaaaattttaactttctaatttctcttttaagtgatttttaagaagatgatttagataatgtaaaaggattgcatctgttaaataacaaactccactgggtgcagtggcttacacctgtaatctcagcactttggaggcctaggcgggtagatcacaaggtcaggagtttgagaccggcttggccaaggtggtgaaaccctgtctctactaaaaatacaaaaattagccaggcttggtggtgggcgcccataatcccagctacttgggaggcgtagacagagaattgcttgaacccgggaggcggaggttataatgagttgagataaagccactgcactccagcctgggtgacagagcgagactctgtcaaaaaaaaaaaaagaaaaaaaagaaatacaaattactcccccttactccttttttgggtattcgtcttgttttaaaaatctttttgtggcctggcgtggtggctcaggcctgtaatcccagcactttgggaggccaaggccggtggatcatgacgtcaggagatcgagaccatcctggccaacatggtgaaactccatttctattaaaaatacaaaaattagctgggtgtggtggcgcatgcctgtaatcccagctactcgggaggctgaggcacgagaattgcttgaacccgggaggcagaggttgcagtgagctgatcgcgccactgcactccagcctggcgacagagcaagactccgtctcaaaaaaaacaaaaatctttttgagaaacttttagatatgggacaattaatgaatatctaatactattcattgtatgactagattt

SEQ ID NO: 14667 - DNA, 1046 bp, Homo sapiens
aatatccactttttatggatgagggaattgaggcttagagattctaagtaacttgcctaaggaaacaaactagtaaatggctcagcctagattcagctaggcctcattgatgacaaacctttgcttctgaatcaccatgccataatacactttgtataaaccctttttgtttttctcctttatatcagaatgtggatgatggcaacgctatgtgcattttcaaaaagttaccctactcctaagattataatgttgagtttacatttttaagttatttttttgcatacaaaaagtgtatatataatatgtatagtttaatgaataatgaaaacaaatcaaatgcttgtgcactaaccccctgggttgagaaatagggtattactggtaagtttgaaccctctatcttttttctattatattttctcctcctcccatagaaatgactacttctttgaattttgtcattctttttcttttcttcatagattggccagatattgttggatctctaaacagtatactatttagttgtggattctatataagtgtatacattatatatttgtgttcttttttaagatatattttaaaaaatttgaaacaggatcttgctgttacccagggtagagtgcagtgggacaacataactcactgcaactttgttctcctgggctcaagtgatcttcctgcctcagcctcccatgtagctgggaccacaggcatatgccatcaggcctggccaatttttttattttattttattttttttcagatatggcggtctaactttgttgcacaggctgatcttgaactcctgggctcaagtgagccttctgctttgacctccctaagtgttgcgattataggtgtgagccactgcacctggctaagaattattttactgtggtaaaaaacacacaacatgaaatttaccattttaactgctttaaaaattaaaaaaaaaatttgttttttttagagacagggccttactccgttgcccgactggagtgcagtggcaccatcaaggctcactgcaaccttga

SEQ ID NO: 14668 - DNA, 1049 bp, Homo sapiens
aaaggattggttttaattctagatgctgtaatgtatgcttgtgtaaggatgaggttaggaccttgagaggggtgataaatagggaaaagtagtagtgtcagtggatgggagctccttgtgaggtcaaaggatagagtagtggtatttaatgcaagtcatctgaaaggagagggaaaggtgttcagagagtgagatgctagaaacagacaacccagcagagagatatatatatattgataatgacaagattgcaggctgaaggtatgagggtgagtgacttaagtgggatggggcaagagatcattggagtgaggcagtccaaggaattaaatgtctaggataatgcctggcttatttatgaggatgttcaagttgccaaaaatgatgataggtatagtggtgaacagggagaccagaccatataagccagatgctgaaaactgtcctggggggggaggagcagatacttttaggggaggccataactgaggataaagatggtgggattccagaactagtatcactgattgaagtgtctgcaatatgagtatgtattacgtattgagaatactttggatcatattcactataagtggttccagagggtgatggggaggacatgagaatacagtgattgtgatcatggcaggaaaaaggtgtacaacatttaaatttaaatggacttgtatagtgttgtggttttttttgttgttgtttgtttgttttggtttttgtttttttgagacagagtctcactctctttgcctaggctggagtgcagtggcatgatcattgcctgatgcagccttgacttcccgggctcaggtgtttctcctaccccagcctcctgagtagctgggattacaggtgcacaccaccactcccggctaatttttttgtatttttagtagagacaaggtttcgccatgttgcccaggttggtatggaactcctgggctcaagcaatccacctgcctcagcctcctaaagtcctgggattacaggcgtgagccaccatgcccagcctttgaatagtgttttaggaagtt

SEQ ID NO: 14669 - DNA, 1028 bp, Homo sapiens
tcggcttcccaaagtgctgggattacaggcatgagccaccgtgccaggcaacgaaaatactctttttacagttagtttctggaaagtgtaagaattctttggtcaagtggaaaggacttgataaatgtgtagctatagctaacacttttttttttttgagaacgagtctcaactctgttgcctaggctgcagtgcagtggtgtgatctcagctcactgcaacctctggctcccaggttcaagcaattcttgtgtctcagcctcctgagtagctgggactacaggtgtgtaccaccatgcccagctaatttttgtatttttagtagagatgggatttcactatgttggacaggctggtctcaaacccctgacctcaggaggcctcagcctcccaaaatgctgggattataggcatgagccaccacgcccagccagctagcactcagtgaacatttactatgtatcaggaattgatttaagttcttttacctataataactcatttaattaagttgattgttgggtggccatttgattttttaaaaggtttccatttccccctctttattagtgtaattcaaaaatagttgtcaatactaatcagaaaaataaaaaattacaaatataaaatataacttaggttttgaaacaatctggggaacgggtctcaaacttgtctgttattttattaattgattttccctagtgtttattagggatttaaatgattaattgaaaatgttagcaaatgttgagcaaacattgatatactttgctttcaagaaaacaaaaatgagaacattgtatttttagaactatttcaccttgagttaagcattgcttgtcataaaccaaatacagttcttgccttcatagccccacattctctgtatggatcttctggaattttctgttgttgaggtaggagatgatagtttattctcacacatctgctttatatagcttatataatttagtctataattatttgctagtatcaactgtttttaattgattcacaagaatgta

SEQ ID NO: 14670 - DNA, 1200 bp, Homo sapiens
gatgattggggtggtacctagacccatctaaaacagtatattaacagatcccaccaagtccccaggaatctggttatagagaggtttgcctctccagttcattgttttttcaactcaagtcttctaggaagttgtaagcccttcttaatgttgcactaccagaaaaggggatgcaggtatctgggaaacctggcttgcctgggaattcggtttgctttatttggggcaacgaactttaaccgaataaagcttttataagcagccactctttctgggatttctcatggcagaagttgtgttcattttctccctcacacatactggagcgctcaaagttctttatcctctggccagtgaggcctcattcagctagcacctctttcttgtaattgtcatttgctcagttgattactgaactttcaaaagacattcttacaaggaaaggaagaaaaaaacatctgttttagtgcttggggtatatagggctctctaaagagcaggcccctggcagaggcttctcttgcccaggtctatggatgatattgggactggggatggaggtgaccatacagtagccttttacatgctctttgacttctccctatcctgctcttcttcctagtctctcactcaatttgttttaatttataaatttgtttgatctgtaaaactaaactggtatcacttgggatacctatatctgaaaagtaagctccaaatgaaaaagaacattttccagaaagttttttggtaagattttaaatagaagtgactagttttcaagtctcactctccttatcccataggggcaaactattcagatgtgttgtagatttgaacattggcttaaatgttatgttttatttctgtccttacagctgtgaaagttgtgtagatttactgtttgtgagaggagctggaaactgccctgagtgtggtactccactcagaaagagcaacttcagggtacaactctttgaagatcccactgttgacaaggaggttgagatcaggaaaaaagtgctaaagatgtaagtattcctgctcgaatgattcagtcaacaaagaggactttaacaattatgtcagtaattgattattatttgctcataaatgtggacagattagcaagtaaataactataaattcatttaagttcttagagaactgagtaatattatttatctttgttaaagaaga

SEQ ID NO: 14671 - DNA, 1049 bp, Homo sapiens
atacttaagtaaagaacctatttaatattgtcttttaggaaaaatatgtttaatagagatagtaacacttcatagctggggaggaagactatatgggtacatgcatctgtgtgttgataacatattagagtagtttaaatgaatggaaaacatattctgatttttcaaaaatggggttcctattaaccatatttatagtgactaaagccatatgtttatcattatttgtgcttctgtggatatagtagtcttaaagtactttgaagcagttgactgttgaagtggcattctattaatcagtattattctggaatcagaggttggagtaatctttgtgccttttctttctgatgtgtttagtcaaaaggaagattttatcaagaaaaaatgatttcagttttcttaaataaaatttcagagatgttaaaaactttggaagttgttatatgttgatttaaaaaataatgctgctttttaaacttgcagtaattattactaagtgcgggtttggaaatgacacaaaggttatatactgtgaacattagaatgagactatgaggatcaaacagcaatcatttttattctttcaaacttaataggtaactgtactcaatatttactattaaaaataagattataataaaatggatcattctttagaagatttatatatgataaacttaacaattcagattcctgaggaataataaatattctaattcctttaatttctttactagaaaatccagaaaatctttttgtttcaactgttacctgaaacttttctcatatgtctaagttcatttgttatgccatagcaaaagcatgtggaaaacataatttagggtttctctgggatctttcagtgccataagagccactgcttttccattctgcatgtactcattgcactttgtatgttatcttagcaatcatgagtgactatggattttagctgaaaagatggtagaattgggagtgacaaggcaaagtggaaaagttagaatgtagactgagaagaaaaaccagaaagaaatctacaagaactg

SEQ ID NO: 14672 - DNA, 1029 bp, Homo sapiens
attgataggcaagagcaagtctggatattgggggtatacaacatgtaatgctttctttaccaaaatatagaagctgtggctcagaccatttaatttgaaagtgattctgctattatgtgtattcatgaaggactgtcttcagttgcagtatcgggaaactctcttaagcaacctccacttaattgtctcattgaagtaactgtcattccccagttcttccataaaaggtactcactgatacccacagcataatgaatgcattgtgaatgccatcaaccttcttatgccagttgtacttgttattgtagttatgtagttatgtaattaaatacatatttaatattatatgtaatttaaatatttaaagtgtgtaaggttggggaaaaaattgtaaaactctagaaggattctgtttctcaggtttttaagtcacttcttaaaaaatggaaattggccaggtgcagtgactcgcgcctgtaatcacagcactttgggaggccaaggcaagaggattgcttgagcccaggagtttgagatcagcctggacaacataatgagatctataccaaaattttaaaaagtagctgggtgtagtggcacacgtttgtagtcccagctacttgggaggctgaggtggatctctgaagtctaggagtccaaggctacagtgaaccatggttgcgccactgcactccaacctaggcaacagagcatgcccatgtctcaaaaaaccagaaaacagaaaaggaaactgaacaatatagatgacagttatggcctatataaggaagaagcaaaactctaaaatctagaatttgctctatgtcattaagttagagaatgactatatacttcctatatatgttttaagttaaagtatttgaagagagagacaggtgtatgtgtgtgtttctctcctttaacaaacttatttaaatgttcaactataaatcctcattgtgtttattaaagagtggttctactctatttaaagatattgatgatttttgggaagtaacctcttggatt

SEQ ID NO: 14673 - DNA, 1027 bp, Homo sapiens
gttgcttccaagttttggcaatgattaataaagctgctgttaccattcatgtgtgggtttttgtgtgaacatgtgttttcaattcatttggataaatacctaggtgcttgattgccagattatatgatagagtatgtttagttttgttagaaactaggaagctgtcttccaaagtggctataccatttcacattcccaccagcaaggaatgagagtccctgttgctccagatctgcaccagcattttatgttgtcattggagttttgccattctaataggagtgccttagaagtagtggaagtgataataaagatgaatcagacctagaaactgccctcaaggaacattctaataggtcagacaagatgtgcacattgaaaataattatacagggtaggaagtgggtaaatgccagcagagcgatattagacaatgtattgtaagcattcagggatggagagattgtaactgcaaagtgtctcataaggaggagctggtcattaaaatgggtatagaagggtgagtcatatgtggatattcactgttgttctgggttgaggttggtactgagatgagccctatgggtagggaacagtttaatcacaggtatggaaatgggaaagtgtaggggcatacaaatgcagaggactgctaggtagcagtggttttcaggcattgagagaaatgacacaactagttttgtaggcattgtagataaaagttcaggtttggaatcagatagcctaggttaatggctgggcatggtggctcacgccagtaatcccagcactttgggaggccaacgcgggtggatcacttgaggccaggagttcaagaccagcctggccaacatggtgaagccctgtctctactgaaatatacaaaaattagccaggcatggtggtgcatgtctgtaatccaagctacttgggaggctgaggttggatctggtagatgttgaggatggtgagagttgtgaaagatcattggatttggttgcttagaggatggcctattaaatacaag

SEQ ID NO: 14674 - DNA, 1292 bp, Homo sapiens
aagtgttcaatccatatttggtcagtctttatattctgttgatgatcactccttatcatttttaagcctcatccccactctaattagattattactttatttagggctcttatttctattctttcttttttttttttttttttttttgagatggaacctcgccctgttgcccaggctggagtgtaatggtgtgaacttggctcactgcaaccttcatttcctgggttcaagcgattctcctgcctcagcctcccgagtagctgggattacaggcatgtgccaccatgcctgactaattttttgtatctttagtagagacagggtttcaccatgttggccaagctggtctcgaactcctgaccttgtgatccacccgccgtggcctcccaaagtgctgggattacaggtgtgagccgctgcgtagggctcttatttcttatctgggttatttgaatatacttctaactagtcctcctattgtcagtcttgaacccaattgatctttatgtataccttactgcctctagtcatctttctaaactcatccctcaaattcccttaatatgttcccagtggccttagtatagcaaaattccactagtatggtataacagaatagttgttttatttaatagtaacgtgtctacatgaaataaagtaaattctattttcttcaatatggaattgctacattattaaataataagtgactagtgtgttttatgcttccaataaagaaagtattagagtgtggtatatgattgctcttggctcctaaatttattccacgccatatataaatttttgttttagactcgagaacaggaagaactggaagaagctttagaagtggaacgacaggaaaatgaacaaagaagattatttatacaaaaagaagaacaactgcagcagattctaaaaaggaagaataagcaggcttttttagatgagctggtatgtattaatgctaattgtgattgtaaaaaacattcttcaggatttacctttcctagtaggctggatgatggcatttaaagggcttttccacagtgtttgtaatctggttcacctttagttttgttggttatgtattgatatcagtgtatttattgctgaataagaggttgccctccatccacactgaacaatatgtttttatgctcacaattctgtgggttaggaatttaagtggttcttttgggcttttctgcttccctaatgtattctcaggacacctctccatgtggttttgatagcgacaggaggcagccaaatgcctaggcagataggga

SEQ ID NO: 14675 - DNA, 1050 bp, Homo sapiens
aacttggagaggaaccaaggaaggatgtataaatatgattaaggtttctggaaatagatcctttgagatgtgacagaaaagactgaatttatttgtttaataaacctagagaaagttgaagggttcaaaatgggcataaaataatgactaagaaatgaggattttattattatatattcacataggtagggttcagtcagtcagtgaacatattttgattaggaatattatgaaggttgtgccggatttattatttgaagtatattttctaggaattaaactgtcagggagtggagtaatgttaggcatagggtcttagagaaattaatgtaatttgtgacttcagaatttaagaaggttctacttatcactattttatgcatgaataggagaaatttttttttttttttttttttttttttgagatggagtctcactctgtcccccaggctggagtgcagtgatgtgatcttggctcactgccacctctgcctcctgggttcaagtgattcttctgcctcagcctcctgcttagctggaactacaggtgcatgccaccatgcccggctaatttttttttgtattttcagtagagacggggtttcaccatactgaccaggctggtcttgaattcctgacctcatgatccacctgcctcggcctcccaaagtgctgggattataggcatgagccaccgcacccggacagaaacttcattttatagattattgtgccctctgtgtggtgatagcttttgaactcttaaagtgagagctacaactttgtttcttggccaggtgttagttattttgatctatttggttcaaatcctgtcaatataattatgcagccttctatttctttatcattttacaaatacttctaattatttttacttagcttatggttatggttactattcttcattacatcattcttagttgaaccagtgaacagacctcaaagttttttttttccctgattcattactagataatttgtgtcaataaatatccatgcaagtaaatcttagtcttttgggaacaagcg

SEQ ID NO: 14676 - DNA, 1070 bp, Homo sapiens
gatgcacctgcctcagcctcccaaagtactggaattataggtgtgggccacctcacctggccttatttagtttctttaatgaagattattgatatgatatggctgtgtaaaatagtctttttatttctgtattattgattttcattttagaaattagatccacaaatgtaattacttctgatgcatggccttttatccttgaaatggtaaataacacatactttttcattgctgttacccattctagcaaagtttcactgttttatcaaaggtattcaagttattttccatgttctgcatagtagtaacatgtacttttccactaggagcatttgagttgagaatgagaactaatggggaataattgtagcctcctgttactatgtttcatggcacaaccaagagacttttttccttgcctttatacagaagataggcagaatagcagtgagataggtgttgggttttaatgtttgagagcttcaaattctggctctgtgagttatgcttttgggacttgggcaaataaccttattcatgcttggaataaccttacagtgtattgtttgtgagaataagataatataatgaaatgctcaatctttgagcagccttcttagatgttgtcaaatgcaaagatgagttcctccatggataacatggtagattaacttaaaaacaagcaaataaaaagaaaccaagaacagcaacaaagtaaaaagaaagagagtgattaggtgactggctccaaatataagataaacatttcttaaatctggatgtagaatctgccaaaatgttaagttgtcaaaaaacaaagggaaaatgatctgttttaagccataaataggctaatcagaaataatgacatggtctggtaagaaatattaatgacttttaaagtcattaaaggattacttaaaggataattgcattttccagataacagggaacctaaaactaactttattcttttttgggttcatactttatgggaatttctattaagcagattatcatctagtgaatacatgaaaagacaaacattggtctggtcatcaagtagaatt

SEQ ID NO: 14677 - DNA, 1074 bp, Homo sapiens
gatgaaaccccgactctactaaaaatacaaaataatagctgggtatggtggtatgcacctttaatcacagctacttgggaggctgaggcaggagaatcacttgaacctgggaggcagaggttgcagtgagccaagattgtgccactgcactctagcctgggtgacaaaaacaaaaacaaacaaaacaaaaccaaaaactggttcctattcattctaactatttttttttctacccattaaccatccccacatcctctcccacctcctcactacccttcacaacctctggtgaccttccttctactccctatcagttcaatttttagcttccacaaataagtgggaacatgctaagtttgtctttctgtgcctggcttatttcacttaacataatgaccaccagttccatgtatgttgtttcaaatgacaggatcgcataccttttttatggctgaataatactccactgtgtatatgtaccacattttctttattcagtcatctgttgatggacatgtagattgcttccaaatcttggctattgtgaacagtcctgtaacaaacatgggagtgcagatgtcattttgaaatactaattccctttcttttgggtatatacccagcagtgggattgctggatcatatagtagctctatttttgttttttgacaaacctcgaaactgttctccatactggttgtactaatttacatatccaccaacagtgtacaagattttcttttttccacatcctctccagtactcgttactgcttgtctttggataaaagccatttaaactgggatgagattctatctcattgtagttttgatttgcatttctctgatgattactggtgatgttgagcatttttacatatgactgtttgccatttgtatatcttcctttgagaaatgtatgttcaaatcttttgcccatttttaagttggattattacattttttcctgttgagttgtttgagttccttacatattctggttaataatgccttgtcagatgggtagtttgaaaatattttctcccattctataggttgtctctttgttcatcga

SEQ ID NO: 14678 - DNA, 1051 bp, Homo sapiens
actattaaccatcacacagagtatagaatgagttagggagtgtttcttcctcttcacttttttagaaacatttgagaaggattggtgatagttcttctttaaatgtttcatctaggttacccagtttgctcatagttctctcatataatcctataatccttttaatttctttagaattggtaataatggctccactttcatttctgattttagtaatttaagtcttctctcctttttccttagtctatttagcatttctgattttactaatttaagtcttctctcgttttttcttagtctgtttagctaaagatctggtaattttgttgatctttttgacagaatcacctcaatttatttatttttctcttttttctattctctattttgtttatttctgctttaatcttcattattttcttttttctgctagttttaggtttagtttgttcttctctttctagttccttaagtgtaatgttagattgttgatttaagacttttcttgttttgtttgttttttttttgagacaaagtcttgctgctctgttgcccacgccagagtgcagtggcatgattcagctaactgcaacctccgcctcccatattcaagtgcttctcctgcttcagcctcctgagtagctggaatttacaagcgtgcaccaccattcctggctaattttttgtagttttagtagagaccgggttttaccacgttggccaggctggtctcgaactcctgacttcaagtgatctgcccaccttggcctcccaaagtgctgggattacaggtgtgagacactgtgcttggtcagatttttcttgttttttaatgttagcactcatagctataaattttcctcttagtactcttttgctgtgtcccatacgttttggtatggcttgttcttgtttttattcatttccaactattttctaattttccttgcgattttttttgaaacattggttatttaatagtgtattgtacgatttctacaaatttgtgaattttctagtttttcttccattattggttgctaacctcatc

SEQ ID NO: 14679 - DNA, 1055 bp, Homo sapiens
gcttttagtgtgaggcctggagtgctggaaggagttttctaggttttcttgttctaccctctagttttcaacaggctctgtaagcctgagccacagagggcttctctcttggtgttgctcccctatagtagattgcccttgctttttacttagaataagtcttatggtgggaagaaggtttttcttgcttctccttttccaacgttagtcataggaggacctgtgtgcctgaggatcaggatggtgctttcttagtgttcctacttctttcccagaggccaacaatttgtatctgttacttcagggtacaggtggcttttctgtccctccccagactcgcaactgaagtttgtcttgttttgttgcaggtggggaatcttgggcacagggctgtttcctgcctctcccctagacttatgctttgcatcagtgtaggaccctaggtgtgagttggtttcctgcctttcctcagtggttggtttctctttcctgtttcaatgtaggactaggaatgcgggcagtaggttttctacccctcctccattggcacccaatctttgctcctccgtagcagtggaggcttggatgttttttttttttaaaataatttatttcctcttgcatttagtgcttcattattgctgattttattgggtctgtttcatggaatatcctcctcatctttcttttttagtcttctatggtggtggtacttcttagaacatgaagatttaaataagggttagaattccctgtaaagtaggtttagcctgattgtctattttttcccagtaagttattaaattaaataaacttgggcaacactttgtttggagccctttttgtgtttctttctgcctttacctctatgggttggagttttaaatgtaggatgtgtcctttagataaggtataaccttagtgttcttacttttcccaagtttttcatacttaacatctgatttgaagggagggaggagcactttttgtgtgtttgtgtgtgtgtctgttggtggtggtggtggtggtagggccttcatcaagcattgaatatt

SEQ ID NO: 14680 - DNA, 2092 bp, Homo sapiens
cacaactagattcatccatttcaagttattaatcaaatataactactgtcttcttttttctttttgaaatggagtctctattgcccaaactagagtgcagtggcgtgatctcggctcactgcaacctccgcttcctgggttcacgcaactctcctgcttcaaccttctgagtagctggaaaaacaggcgcacaccaccatgcctgtctaattttttgtatttttagtagagacggggtttcaccatgttggccaggctggtctcgaactctgaccccacgtgatccacacgcctcagcctcccaaagtgctgggattacaggcatgagccaccgcgcctggccataactactattttcactaagtatacaagtgatttatttaatgtgagctgttcatttgtgaatgattatggaaataaaaaaaaaagacttgttggcaaagtgttgaatagataactttattgttattattttatttctttcatgtactccagcagataaagataatgtaccttctgaacctactcttaaaattcccaagaaatcaattgacagattagttataagtaagaaatttaaaacttgattttaaacatttataatttatatccgcatgattttttgtaaattttggtttggattcttagaagttcatatcacattttaatgaatgtttatgagtaaatttctgtattactcaaatacttgaatagtgaaaaataattaaaaattacagagtatttaaggtagatataaatttgtcatatatatggtttcaggcaaactttgataccggccatgaaaatactacatgatgaaatatttaagtagtttcatataagagttacggttttattaaaagcactgctagtttatatttatgtaaatatatgcattatgtaaatacataatttatatatatctttaaatttctgtgtaaaataatcatatgtaaagctgagaagtaagaatgacttctctaatatgatatttcagaatgcctttctcagttttatgggaatatctattactttcattctatgacatgttgtgacatttttatgataaaatatctttatttaaggtgtgtattcttaaattttccttatgcatgatttaaatgaagctgtttgctaccaaaattctgcagaatgaaatttttttcttttactgatacataatattttacatatttatggggtacatgtgaatatttttacatgcatagaatgtgtaattatcaagtcaggatatttggggtatccgtcaccttgagtatttattatttctatgtgttggtaacctttcaagtcctctcttctggctacttagaaatatataacatattgttgctaactgtagtcaccctagtctcttattgaacattagaacttatttcttctatctaactgtaagtttatactcattcactaacctctctttatttttcctttccgccctcacacccttcccagcctctgctatattctagtgtctatctccatgagatcaagtttttatgtgagtgagaacatgcaaaagttgtctttctgtgtctgatttattttacttaacctgatgaactccaattccctccatgttgctgcaaatgacgtggtttaattcctttgaatggctaaatagtaatacattgtgtgtgtgtgtgtgtgtgtgtgtgtgtgtgtgtgtgtgtgtgtgcgcgcgccacatttttttaatccatttgtccatagatggatacttagattgattctacagtttttgctattgtgaatggtgttgtgatgaacatgtaagtgcaaggtgtccttgatatactgatttcttttcctttggttagatacccagtagtgggattgctggatcatatagttctattttaattttttgaggaatctccatactggtttctgtaatggttataccaatttgcattcccaccaatagaatcctcttttctctgtatccttaccagcatgtgtaattttttgtctttttaataatagccctgctaactggggtaagatgctatctcattgtggtttatatttgcatttccctgatgattagtgatgttgagcattttttcat

SEQ ID NO: 14681 - DNA, 1026 bp, Homo sapiens
aaactttattattgtcttattttaagaaattgctatgacctccccagtcttcagcaaccaccattgtgatcagtaaagcagatatcaacatccaggcaagagctttcatcagcaaaaagattaggactagccgatggcccagaggatcattatcatttttcattaatacataatctatttatttgggattttaactacatttgcaaaatcattttttatatataatataatcacagcaatgaagactgtcaaattgatggtcctatttatacccaaggactgagaattatgcaaggaatggatacaacggggtagaatattgagggccatgtctaaattctgcctactacaagcgagataggttttctcttgctacttatctttctcaaaatattctaagcatttttatacatttatactttgaagtaaactttgttggcaaaagcaacaaagcactccataattgtttcaaaatttgtgtacatttgaaaatttttataaaatactgtgaatcaagtaatgaaacatcaaaagccaccaacaacttagctaataagatacatccatccccctatatagtaatcaaacaccaatccttttgggattgtacctggaatttaaacttacaatctgatcagagaagaatgggcatttaaaatatacttagtttttatatatatcacacatttcttggaaattaattttcattatattctacttttgatgctgttgtgataaagttttcatcatgctttctaactggttcttgctgttatatatgaaaactattaaatgtaattttctacataatattttactgaattctaatagtttctatacctagttctattaggtgaatatctgggtttttatctaggagtcagtcagctgaaaaaaaattttttttcttttcaatgctatatttgtgactttaggtttatattttattgtattttggctagaacttgtagaacttttagaccaagtataattctaataactgtagtttctttctgtttttttttc

SEQ ID NO: 14682 - DNA, 1461 bp, Homo sapiens
aaaaaaaaaaaaaaaaaaaaagttgctagaatcaattttaatgaaacaaagattgcaacagtattgcactttctagaattaattgtgaaataaaattttttatattctgccaaactcatccttatcactaagatatttcctagttatctgaatatctgtttcttcagataagaaacttttgtaattaaaattaacaaaaagtattctccaggtgactatgagcagagataaattgatgaatctaactataacatctattgaacataactatgtaaaaacaaccaattttaatgcactcattgacaaatctgcagaagtcaaagctcaaaacaaattataatgtgatagtccattttgtgcttataaattgtgccatttttaaaaaattaatagatattttagtttgttacttatttctttcatgatataaagattattttacgtttaaatttttttattggaataattatgtgtacaaagtgctataaaaggaaagcctcactgtgtgctttttctggattgttatttttttctttattttttatttttattatactttaagttttacggtatatgtgtacaacgtgcaggtttgttacatatgtatacatgtgccatgttggtgtgctgcacccattaactcgtcatttaacattaggtatatcttctaatgctatccctcccccaaccccccgaccccacaacaggccccggtgtgtgatgttccccttcctgtgtccatgtgttctcattgttcaattcccacctatgagtgagaacatgcggtgtttggttttttgtccttgcgatagtttgctgagaatgatggtttccagcttcatccatgtccctataaaggacacgaactcatcactttttatggctgcatagtattccatggtgtatatgtgccacattttcttaatccagtctatcattgttggacatttggcttagttccaagtctttgctattgtgaatagtgccgcagtaaacatacatgagcatgtgtctttatagcagcatgatttataattctttgggtatatacccagtaatgggatggctgggtcaaatggtatttctagttctagatccctgaggaatcgccataccgacttccacaatggttgaactggtttacagtcccaccaacagtgtaaaagtgttcctatttctccatatcctctccagcacctgttgtttcctgactttttaatgattgccattctaactggtgtgagatggtatctcattgtggttttgatttgcatttctctgatggccagtgatgattagaattttttcatgtgtctgttggctgcataaatctcttcttttgagaagtgtgtgttcatatccttcacccactttttgatggggttttttgtttttttcttgtaaatttgtttgagttcattgtagattctggatattagccctttgtcagatgagtaggtt

SEQ ID NO: 14683 - DNA, 1511 bp, Homo sapiens
cagttcgagcttcctggctgctttgtttacctactcaagcctgagcaatggcaggtgcccctcccccagcctcgctgccgccttgcagtttgatctcagactgctgtgctagcaatgagctaggctctgtgggcgtaggaccctccgagcctggtgcaggatataatctcctggtgtgccgtttgttaagcctgttggaagagcgcagtattagggtgggagtgacccaattttccaggtgccgtctgtcacccctttctttgactaggaaagggaattccctgaccccttgcgcttcccgggtgaggcgatgccttgccctgcttcggctcaagcacggtgtactgcacccactgtcctgcacccactgtccggcacttccctgtgagatgaacccggtagctcagttggaaatgcagaaatcacctgtcttctgcattgctcacgctgggagctgtagactggagctgttcctattcggccatcttggctccccagctttgaatggtgtgtctggattgttatttttaatttcatggttattacagaaaataatttagttgtgtagaggcacagatatggtaaaaaaaaaaatctgttctggctgtctaatatgctatgtatgcagctgcctaatagagtccactctggggatggacttctgtgttgtaggtagcttctgtgttgaccaaattatcttaatttagtcataaaaaattctacatcctatttggttacattattttaagtaggctatagagccttagggagatttaaaaaagatatccacaaacttaagtagtggtcaagataggtcctatatagaaggttaaaagaagtgcgattattgaagctagaatcaaatggctatactttgggagagcagagtgaacatgggtagcaaatcaaattttagtttatgagggatttttgaagggaataatgtttttggaaggaaaattaccaataagatggcaaaatgtggactagatgaccagccagcgttggctgattattctgaaatatttcaaggtgagagaagatgctgattgattctatgtaggtttgttttttatttgaccgagagcaaggtgctatttcaggtaatttttaatgcagattgctgttcctggattctgcttgtctcagtgtaactttttttactctgcccagcttctaaatcttagctttttgttctactatttacctctgtatttctaaataacatcatcatactgcagttccttggtttccaattttatagctgtctcttgacttcctagtatgagaaatgaagatttagccatctaaaacctcttctctacccttatttcacttgccctattatctcttaatgcaattatattacgttttgaaaattgagtcatcttccctatattcatggtgaatatgaaaatcttattttcagctgagccacatattttaaacttattgtgtttcttagatttcccataatgattgccatgtttttggtgtctcttcacattttt

SEQ ID NO: 14684 - DNA, 1019 bp, Homo sapiens
ggcatttagtcctataaagttccctctacacactgctttgagtgtgtcccagagattctggtatgttgtctctctgttctcgttggtttcaaagaacatcttaatttctgccttgatttcgttatgtacccagtagtcattcaggagcaggttgttcagtttccatgtagttgagtggttttcagtgagtttcttaatcctgaattctagtttgattgcactgtggtctgagagacagtttgttatcatttctgctcttttacatttactgaggagtgctttacttccaactatgtggtcaattttggaataggtgtggtgtggtgctgaaaagaatgtatattctgttgatttgggttggagagttctgtagatgtctattaggtctgcttggtgcagagctgagttcagttcctggagagccttgttaactttctgtctcgttgatctgtctaacgttgagagtggggtgttaaagtctcccatttttattgtgtgggagtctaagtctctttgtaggtctctaaggacgtgctttatgaatctgggtgctcctgtattgggtgcatatatatttaggatagttagctcttcttgttgaattgatccctttaccattatgtaatggccttctttgtctctcttgatctttgttggtttaaagtctgttttatgagagactaggatcgcaacccctgcctttttttgttttccatttgtttggtagatcttcctccatccctttattttgagcttatgtgtgtctctgcacgtgagatgggtttcctgaatacagcacactgatgggtcttgactctttatccaatttgccagtctgtgtcttttaattggagcatttagcccatttacatttaaggttaatattgttatgtgtgaatttgatcctgtcagtatgatgttagctggttattttgctcattagttgatgcagtttcttcctagcctcgatggtctttacaatttggcatgtttttgcagtggctctggagacccctttt

SEQ ID NO: 14685 - DNA, 1046 bp, Homo sapiens
tgtgttgaaatatttcctttacaacatgaacatactcaaatttccatcttaaaaccacatagtcgcttcatcaaccctgaatcttcctctgactactgctctttcttccatattcaatgaaaaacctttgaaaaaagtcttatacttgctctctctacttccttatttctgattcatccaccaaacctagtggaatttggcttttacttagaatctgattttgctgattcacaatcgacttgctaattacaaaatttggtgggtaacttgcggtccttttcttattttacccttctatcgaaccattctcttattcttcaaactgtatctttcatttgctttatgacactacttcctttttgtttttgtttttgttttttttttcttcctctgatttcttctgaatccttttggccagttcttcttcctctgctaaagttattgtgtgaagtcattccttgaccttttgttctcattcactatcactaattgagtacctgtgtgtatggtaggctcttttttaggcacttcttgtatatcgttcctgataatttataacaaccctgaacaggccacatacctttcctgagaccagtactatgggggtaggatttaacatcaaatgtttgattctaaagctatatggtaatagtctatttgtctacttcaactgctataaccaaataccacacactcagtggcttaaacaatagaagtctatttctcataattctggaggctgggaagtcctggctgatttgattgctggcgagggctctcttcctggccttctatctgtgtcctcatgtggcagagagacagcaagtttgttctctggtatctgttcttgtaagggcattaatatagtcatgaaggctccaccctcgtgaattcatgtaaacctgaatgcctcacaaagaccccatttccaaatactatcacattgagagtaggggcttcaacagaagaattttaagggtagaggtaacacaattcagtacatagcaaatcgttttcagactttttaaaggaacacagctgttttt

SEQ ID NO: 14686 - DNA, 1053 bp, Homo sapiens
ctcccagcactttgggaggccgaggtgggcggatcacctgaggtcaggagatcaagaccagcctggccaacatggtgaaaccccgtctctactaaaaatacaaaaattagccaagtgtggtgacacacacctgtaatcccagctacttgggaggctgaggcaggagaatcacttcaacccaggtgatggaggttgcagtgagctgaaatcgtgccactgcactccagcctgggcgacagagcaagactccatctcaaaaaaaaaaaaaaaaaaaaaagaagaagaaatgaggcatcaagccatgaaaagtcatggaggaatcttaaatgtatactgtcaagtgaaagaaaccatgtgatccagcaattcctcttctgggtttatacccaaaggaaatgaaattggtaccttgtagagatatctatgctcccatgttcattgcagcattattaacgatagccaagttagagaaacaacctaagtgtcagtaagtgagtatataaaaaattgtgatatgtacgtacagtgcaatattgttcagacttaaggagatcctgccattttcaacaacatgcatagacatggagaacattatgctaaatgaaatgagccagacacagaaggaaaaatactgcatgatctcacattcatgtggaatctaaaaaagtcaaatacatatgaacagagtagaacagtggttatgtgggggatgggaagatgttcatcaaagggtataaagttgcagttatgtagaatgaataagtctacagagctaatgtacagcatgatgactatatgtaatattgtttactgaaaatttgccaagagagtagatttcaggtgcttttaccacaaggaaggaagaaagggaggaggaagggcaagagggaaggaagggagggaggaaagaaaagataactgtgagagggtagatacgttaatttgcttgactctagtaatcatttctctgtgtatatcaaaacatcatgttgtacaccttaaatgtatataataaaacaaaaaaatctgaaaaggctacatactgtatgattc

SEQ ID NO: 14687 - DNA, 1090 bp, Homo sapiens
tcacaagcacttcatttgacaacatttactggtagtgtatcttttttaaggttttgaaaatatttttcatagtaatttctattgaaaattataaaattttcagaacagtagatattttggtcattttttaatcaaatttaagatcctgaaaatgataagacaaagatatacatttttttctagggtcatgggggagcattttcccccatatattttgattttcatttatgcatgtgttctgtactatttgagtgcatatagaacttcagtggcatttagatattttgtgggaccaccagattaatgagacacattgaatagaataaaccagttagtatccatgactaaaaacatgtttgaaataaaattgaatctctctgagacagaaaggcaaacttattttttccccgtagcacatccgtttgtttagggctgagtaatcctttaagaattgctgaacttcccccaagtgctgaaaacctaattctgttttaaaaatagctgtaagtaattctgtcctcatacatatattttacatgtttaacaaaaaagattcttatcttcataaactgtaatgatgtcttaggcccaaactccaattagggttggtttgttttttttaagtttgtatgcttaataacgacaacttgggaagcattttcagagtgctgcgaaaaataactcataagaatacagtatttggaagcacagagactgatttttattttttggatttcagtggagtgttaatatttcaaatacgtgagaataggaaacttcctcttcagaactacaatcacagccgtaaatacagtagagtcatagcagtagatgcaatagaatctcatcatgaaactccatgaattttgaactaatcacatcaccaaaggagctccaatactgaaaaatgaaatacattgaaaatatatctcaagatgaaatgaaaattctaagtgttactaaagcttctgactaatgttctctgtgatattcatttcctttgaagtcaactgttaatctcagcattcaaaagtagtttgtttaaatactgatttaaaaaagaaaaataattctgaagagtggtacttct

SEQ ID NO: 14688 - DNA, 1027 bp, Homo sapiens
ataatatattcaacagcttcacatacatagaattttctctattttattttcttagattgccactacatttttattgctcttgctacatataatcattgtttttccaagagatagtactaattggcacgatcactagcaatgtatgaagtccagttgtgccacatccttgaatatttttgtttactaattttgctagattaattgaaacagtctcattatttctttaattagcaccagtgattggattttcttcatgtgtatttactagttgtatttctttcatgaattgtttctcctttgcatacaaatctattgaggtcttgggaattaactttaacttttaaaaatgtctacatatgtatctcacatattgctcatattgctatcacataaaaatatctactttttggtattttaagtatatccttctggctttatatgtgcatccagttttgtttttttcaatgaacaaatacaaaatcacgttaacctacctttttctcattctgtattctaatgcctttatatgaaaattttaatattttacaattggtgattaatgccctttcctgaaatttggaaaaatgtatatagaaaactataaagaagaaaaatgacctattattttaccacccagagataatggctatcaatatattttagttcctttccatttttaatgcatccatgtttttcctcaaaattatcatgctatatacacacaaatatatgatgtttactgaatattcagtatattgttatttcaaaattatcatggtcttggaggtttgttttcaatttttattattttaaatgttttcagtaaacatctttttataaaagtctttgttcttcaggaacagaaaaccaaacaccgcatgttctcactcgtaagtgagagttgagcaatgagagcacatgaacacagggaggggaacatcacagactggggcctgttggtgggtgggggcaaggggagggggagcattaggacaaatacctaatgcatgcagggcttaaaacctag

SEQ ID NO: 14689 - DNA, 1060 bp, Homo sapiens
aggacttctagtgtatagttattgatggagttgttcttgaatgaggaattctctcgaccagcttaggacatacttgtttctttacatataattcagatcacttattctacctttgtcatttttgtcttttagtccttcaaagaaaagaatgcagaatgttaccaatacagcaattgctttaagttttctcatttattttatatctgcactctttgggtacctcactttttatggtaagtacattttaaaattatagatgacaaaataatagttacatagatggcctcacgccaatctatagactttacctatgccttttattactaagttaatttgctcagatcaccaaattacaatgcagtactgtggtggctcttgaggcctaaacaattggattatctttcttttagaaaggtagttcaggtttaagattaatgacttcttatgaaaattttcttaaacacttaagtaaaacttcaggcttagggacatgattctttctataagaaaaaatgtgcaattttaatgattctgtttttcttaaattttgaattcaatatattagtctaattcagaagtgtgggggttgggtgagtcagtcatcttaattgcaaaagaacaagttgagaaaggaaagggttttacacagaactatatctgtatacttagatgtcagacatctctgccttcagatctaattatcacaggattcagcagatgtgcattctatgatgcaccatgaccttcctccttaattatttttacaggttcttttaaatttatgcaacaaaaataaaattgtgttttatttcttttgcaaaaactgtctgctttgtatgttgactttttttcctcttctgataagaacctcaagaaaaagtaaagttctgtgtacaccatcaggaaaagcattatttccaatgtgagcatggtgccctgctagagacgctacaaagaaagttaaaacagattgtcaagcttttctgatcatcattaataaaacaaaattacttaaatatataaactttatttttggatgttgggtttgttagtttttata

SEQ ID NO: 14690 - DNA, 1027 bp, Homo sapiens
tgagaaaaagggaacaaaggctttgggtataaatgcatctgcatggatgtcttgaatctctaatgctgagttttgtaagagctggggcttcaagcctcctccctgtgtgggctgcagtgccaagattacagcagggactggataaattttttggcatgtgaccgcctgctgtgctcttagcaatgggaagtgtagtgaactattttttcatatttacaggctgtgaaacatataaaataaaatagtaagtggtatttctttcccatggcatgatttctttttctattataaattgtctgtttttttaatctgttgcatttaatgaaaatcattctttgagacttttttcatatttttattgttggtaattttaaaaattatgcaacctaaaaaaattgcatgtgaaaactttttctagcattaaagctaagtatttttatgaagcttacacagaaagggttagtatataaacagtttatgtgtataaatactttataataatagtttatgctgtatttttgaaatctaaatgatgtaggaggcaaaaatatcatggttgttgtatatgtttctctcagcaaatatctggactttgacatttcctcttcgctatatgtttatttttctgtaatacaggccagaaaagctgtaacaatgatgtttttctccaattttccattctcatggattcgccattttttgatcactctagcactcaatattatcatcgttttacttgcaatatatgttcctgacattagaaatgtatttggtgtagttggtaagttttctgtttcaaaaagttcacataataaaattgataaaattgctacccagcctcacatctgaatccagcaatatcctctcttttttttccctccactttaaaggtgccagtacatcaacatgtttgatttttatattcccaggactattttatcttaaacttagcagagaggattttctgtcatggaaaaagcttggggtaggttgtttttgtttctttctttcaagacttctattttaa

SEQ ID NO: 14691 - DNA, 1031 bp, Homo sapiens
tcatggtacagtgcagtatacttggtgagtgttgatggtttaagagtgtgccctgaacaacgaaggatttctttgaggctgaaatcctgtgggatccatggaatgggagtttcacctgtctttggcttctgctcctttccccagcatgtgtagagcttctagaacagtccccagcaagagaggatcacttggtacacctctttcttatcctcactgtctccagtctctgctgtaggcctgctagtgatgatcaggatacaggttttaacatggccaagctgttaataacctgagattgggcaccatgaacaataagcattaaaaggcaataacaacaacaacaacataacctgttaattttatgcaggcttaattttttaaagaactatttcttcctaacttgcttttactcttcttcatctactttctcatacctatgactgacaatgataaggacacccacccactatacacacctaattccatccctccaaatttgatttcgtgttctctagagctggcgtgttatgtgacctattgtggggagaggctcagctgagggactctgtgatgccaaatggacaaaggcacacttttttctccaggtcccagcctggtgaaagtcatagcacctgagaatttggagctgactctctcctttggaaattgtgccttccaaaaatatatcttacactgcctgtacctgcatgcaataggttttggttcttaccaactgcagcttcagtctgaacttgagttctaccctcatggatgcaaatcaaaacagctcagaatcaagtctgggaagcaagtcgaagtggtttgatttgcatggggagcttttgtctctgcatgaaggcagccaaattccctaggctccccagccctccggaaatatgctttacaggacccgggggcccaggcccagtcgggtgggtgtgatttgaatgttctctgctacagctgctgcaccgggccctggtcactgctgttggtttcgctccattttactgcctcagaatccccctgtg

SEQ ID NO: 14692 - DNA, 1038 bp, Homo sapiens
atagctaatcaagcatggaccctgcccttattctctttttaaaaattttcttggctattctcacatatctgttctcttaaatatactttagaatcatttgctcaagtacctcaaacccaaacacctccaaaagaattccttttggattgacatggtatcaaaatatgtaaactgacttcagtcccagatgttgtcgaaacttcattcccaagatctgaatagagcagtcagagcggattgtgattgaaagaccacctccaaggccagcctgcctctaaatcccacctgttttgttttggtgtcttgaaattccagcattagagtgcagaaaaatagttctaggaccttagaggatgaaaatgtatgcagtttgtgttggaaggaccagcataataactaatgtgcaaccatcactgcacttacaaattaaggtcacagatctagacaaagtattgtgtgaattaagtgagtcagtgagtgagtgagtatggagagggactctgttaagaacaggggagctagaggggaaatgactggatctggaactgagagcacccgagtagctgagaatgcggactctaaatcttctggggacaagaggagaggagcaaaagccccacagccacctctgtggttgtcacacttcaatctggcagctagagaaaagcccgaaccaggccaggtaaggctcccctcaaggactatgtagattgtgtgctacaggcaaaaaaggggaaaaccctccaagaggatccagcagtgatcacagctattgatttgtactcccacggcccttgcggccatgcatctcttaaaatcaaatgaaacaaccatcaacaattgtggtaagaattttccagtaggagaaatagagaaaggaaaaaaaattctgagaaaacaaaacaaaacccttcttgatgttttccacagactgctttagaaagagaaagactgatgcaatccaatcaaggacagtgatcctcggttgacccaggatatttcacagacccagaatgcagaaggcacagacgcccacaa

SEQ ID NO: 14693 - DNA, 1045 bp, Homo sapiens
agtttattccgtatttttcagtttctgaaaagtgtatttgttttctatggactcataaatattaatggaaagtttcaataatttagatggacaggataattgcattgtagtggtataactgatagggccccaacttgtttttatttgttacaaaactatacatttatggctgagaattaataaacatactaacagtaatcataaaggaaataaaacctcagccattgtaaaaaataaaaataaaaaaaaccacaacccccccatctgccaaaactagatataattgattcttgcttaattctgaaagctcatttactttttggattataattttgtgaactaactctggataattttgcctattttgaatagttttagataatgcctattttggcatctccctgaatatttctgaccatcccttcaacatttatttggtctgtttaaagaagacacattaacatttgcctaagtcacatgaattaggatgcagaatctataattatggactaatgatacacaaatacaggctttgaggagtatttattggacaactaccataattatcagtgcatcatagtgtgatggttgggtgtcagccagattggggttcagctattcattctgcctctcattagcagggataatttaacccctgcaagcctgttctctcatccacaacacagtacctgcctcacagggttacttcagaacacagtgaggacttatgtaaaccatctacacagggcatgacatatactaccgcagaaaaatgattgttgatgtcactttcattaccaccactctaccctcagcacttcaatatgaagtgatgggcccagcccttttctgaagttaactttgaaagcagtaagatatttatttacatagaattcaagagaagggatttttgagtacaacttcctcactggttttgcttttaatgtaggattctggaatgtaaatcagtaggagatttctagttactggtggaagagaagatggcttccttatcccggaatcacagggattgggggtaaattct

SEQ ID NO: 14694 - DNA, 1100 bp, Homo sapiens
cccgcccgcctgcccgccctgggctcctgggccggcctcggcgttaatgggattggggggggcagcctttttgtttctgctgctgctcccctcccctctcttcccccaacctcgccggccgggctcccccgctgtccacgtcgccatcttgtcgtggggggtgggagacgcctcgaaagtgctttcaggggccggggtctgagccctgcttgccctccccgccggccgtgggggcctcgcgccgcccacctacccgcctcaaaaacccagcctgctctgtggccccatccggaggggactttacccagcctgaaaaccccgggaagagaaatgagctgcagctcggtagccgcggtttgcacccggagcttccgctccttcccgcccccatcctctccagttccattgaaaactcggccctggggcggaccctgcacgctggtcctggctttccagtggacttggggccttgagttcccgactgagggactcgcgtggtcggatgcgatcttgtcctgtagttgtccagccgtcgcgggtgtctttgcctttgtgcattagggatttgccgcgatggccttaagatgcgaactttttagtttgcacgtgcaggttttgtttcgttttaatcgccttgaaaaacttgcctagactgagagtcagagtaatgggaatttagggaaatggcaacattttaaagagaacttcagaattggatacttgagttcatatcacctgtcacgagaacgcagatattataaatgaatatatgcctcattcattcttcaaataatgaaaatgtaggggctggttaaatttaggcagttttaatgatactgaaaaaagtatatgatgagtgaatgaaatgcggcactaaaatgttgcaaaaattttcgaactctgtctcattttcctgaaattgaagtatattaaaggaaaaccgtcaacatatatctaaagtaagtaatcactcggttagaacttaatgcaagttttataaatcaccttgaagtttgagtctaaggggtacattagagattaagaattgtgagttggaccagtggtgttaagagcggactcccccatcccccaacacacac

SEQ ID NO: 14695 - DNA, 1020 bp, Homo sapiens
attctattttgattgtccttttgtttgaggaagcagcatatggtggttaagagcataggatctagaggcagatacctctgagttaagggtcccagcccttcacttgtgagcttgagcaagttactgaatgcctctgagcctctttcctccttttgaaatgatgataagaatagcagccatctgagcagttattgtaaaggttaaatgagataatgcttgtgaagcacttagcccattgcaggagtcttgatgacactgtgtacttgaaaatagatgttacctgttaaaattcttgtttaaacttccacaactcttaaaactcttttttgctagtccttccagctgtttcctttagtttcttttctgtgtcttcatgcatcttttctatctcctgaaagtgaaaagactaacattggatccagagcttgaaaagcgtttttttcctgttacaatgggcaaaagagtacatccttgggttatattggcacctagtatcagttatttttcttgagcatctgatctgctctctactctagtggaggcctcctgcttcacaattgctcacccctgtgttttctccccaaatagaatactgagtttactctggactctagagtcaaacatacacagtattctagtcttactgttcatttaagcaagatatgtgcaagacactgcattcttagtactggcagtaagttaaaacatttttcgtcttgatgccaaagtttagacaattttataaaaattaacctttgtaaaagataatgagttgataaaatattctcagtaaagcagctacgtggtagaaaaactgtcctttgcttatgagtttctccagagttaagaccattgggttccatctgaaggcaagacttcaagcttgtcttactggtctgttttgtggctcaatttgtatgaagtctatgcactcttccacacgtgtgtatttactgaactatcgagttattttagactgagaaagtattggagttcattcctacggtccactgcagagca

SEQ ID NO: 14696 - DNA, 1050 bp, Homo sapiens
ttgtattttagagtgtcattttcttgaactttatcatcattaaagttttaaatttggaacactggcaatttgataagtatattaggattcttcttattgcaagtagcaaaatacaactcaatctagtttaagaggggaaaatgtagtcattggctaacacaatctaattttggtttaagagacaaatctagagtctcaaatgatctcagagtgtaataatccctgacttttgtcttgatattacttggcttgtatacctttgctctatttgcatgctggccttactctgccactgacaggctgtctgtatggtgtggaagaggacggctagcatccccatacctgcatccatacagtttgtaatataaaaaaaaaaaaagtaaaaaaaactccctctctcttctagtgtctatatatcagtttcctagaagaaaacgttttgccctacttggccatgtgaatggagttccctgattacatgagtcaaatatgtcttattgtagcatatttgatggtcttcttgtagaatattatcttactatacacagaactcttgaccagtaattaatgggccatgagtttttgttgcaagtcatttgaattcatattctatagttttctaccaagtgtagtcattctgcaagctgttcttgtcatgacttttgggaagttgagtatttcttctatgggttagggttttcatctcaagaaaaagatgatccttttctctactaaatatgtgttaagatcacacatttttctagatcgtttagctctactgtgtgatcttacacaaattgctttattgggatgataagaataattgccttataggattgttatgagaatgaaatgatacatcaactcatatgaaacactcagaacagctcttggcacaaagtaagggcttaattaagtagaaactatccatatattcataatattatagtattggttaagttgttttcaacattgtttagaatcgctcaagccttctttgtgataatctgacgaaggctattcaccaccagtgagtaaataatagtggca

SEQ ID NO: 14697 - DNA, 1041 bp, Homo sapiens
tcttttgctgtgcagaagctctttagtttaattagatcctatttgtcaattttggcttctgttgccatggcttttggtgttttaaacatgaagtccttgcccatgcctatgtcctgaatggtattgcctaggttttattctacggtttttatggttttaggtctaacatttaagtctttaatccatcttgaattaattttagcataaggtgtaaggaagggatccagtttcagctttctgcatatggctagccagttttcccagcaccatttattaaatagggaatcctttccccatttcttgtttttgtcaggtttgtcaaagatcagatggttgtagataagcggcattatttctgagggctctgttctgttccattggtctatatctctgttttggtaccagtaccatgctgttttggttactgcatccttgtagtatagtttgaagtcaggtagtgtgatgcctccagctttgttcttttggcttaggattgacttggcaagcattctgtgttttgagaattcttccaggggactgtgatgaaaactgacgtttgagaaccttcatcttagagtaaaaactttacatacacatttttgttgttttatttatctagcacaatacttcttttttttgaaatggagttttgctcttgttgcccaggctggagtgcaatggtgtaatctcagctcaccacaacctccatctcccaggttcagttgattctcctgcctcagcctcccgagtagctggggttacaggcacgtggcaacatgcctagctaattttgtatttttagtagagacggggtttctccatgttggtcaggctggtctcgaactcccgacctcaggtgatccgcccacctcagcctcccaaagtgctgggattacaggcgtgagccactgcacctggcacaataccttatatataatcagggctcaaagatttgttgagaggctcaacaccaattctggaccaggaaagattttatttatatcactagtcaggaataatctaaaaacaaaaagcacattc

SEQ ID NO: 14698 - DNA, 1032 bp, Homo sapiens
tatgttcttaatctgaagaacaatagacattctctataaaacaactcttgcttattcatgaactttgtacacaagaagcttaataagacgggctcaaaattatttttctaaatatatttcctatacaaaataatttcaagatataattgttacttttgtgtctaatactgtatgttaaataataaaatggtaagcatgtaaaaactacaataccacaaagattgagctattttgccagtagtatactccaactttagttctagaacagttgtagaaatgggtaaacaaactgttttaactgtactcttaactgaaatatagtaccttatgcagtagcagaacatatcagcagaagaacttcacttgacctgtacttaaaaacaaaacagatgcaatttataaaatttagagaaatatagtgaccttatttgcatgtggaaaatgtacttctttctgatctacatatcttctgttgtgcaatgtaagcagtaaaacaaatagtacaggattcatctctgtgggacctagaccccctggtctaacaaataattcttggtcagtactgtaattctgtggtataaaactgataaaattagccttcctgtgactagacaagaagccgggcagtttaaatgctgaaactcacaagaacttcagaagctttagctttaagctttaagcttacttagaaatgttataagacctccagtagtcacatatgaagaatatcatgaagatttttccattaaatctttattatagatcccttgattggtttctgtctagactcattgtgtgataaaggacataataatttttatcaccttcatctaatataggtttgtcaactctatattagttgttttcttgaaggctggttttcttccaaaattcagtcttattttcagtctacactagcttttaaatatactgtcctttagatgctttatctaacctcaaatttctaatggatttgtcttagacacttattgccactccttagatagtcattgctatctttgaagttctgga

SEQ ID NO: 14699 - DNA, 1052 bp, Homo sapiens
atgtacaaaagcaacccaatcaccttcagcacatgtcttcaggacctcctgaggctgtgtcaccagtgtgtccttaaccttggcaaaataaactttctaaattgattgagatttgttctagataccttttggtttacagtttgaaagccacttccacatctttgtagcaatgcctcaatcctggtaccaattttctgtgttagtccactcgtgtgttgctataaagaaggacctgaggcttggtaatttataaagaaaagaggtttaattggctcatggttctgcagcctgtataggaagcatggcaccagcatctgcttggcttctagtgaggcctcaggagcttccaattatggcagaaggtgaagggggagccagcacatctcatggtgagagagggagcaagagagagaaagaggacgtcccagactcttttaaacaaccagatcttgtgtgaactaactgaacaagaactcacttagcaccaaaaggatggtgctaaaccattcgtgagggatccacctccatgatccaatcacctcccaccaggccctacctccaacattgggaatcacattttatcatgagatttggaggggacaaacatccaaaccatattgtgtatctccctggagggacaagctgccagcatttctacccgctctcatgttctgttgcaaaggctaaattccagatgagtgtggcctggagaatggaaagactggggactcctttcctcctttcagactgcattcacagagcagtggctctatcccaggtgtagcagactgagagtagtggagccccagttgcccttattgcagctcacatatagggtgcgagttccaagcaaggacaggcaagctgagaagaatgaatggaagctacttcccccttgcagagccttgcttataaagcaggagagtcagccaggcgtggtggctcacgcctgtaatctcagcactttgggaggccgaggtgggcggatcacttgaagtcaggagttcaagaccagcctggccaacatggtgaaaccccgtctctactaaaaa

SEQ ID NO: 14700 - DNA, 1050 bp, Homo sapiens
acatattaagcgaactgttttgagaacaaattagatttggcatctgcatttgctcatgtctcaaacatcagaggaggttactgaaagacgtacaaaattgttaaaaattctttggtgaaaagttgaaacttctaatagcatttgtttttttttaatctagtggtaattgagacactaggttgaagagcactagttctggttctgccattagctggcaaattatgtaatttctgtcttatctgaatttgtaggcatgtggcatggcatgtgagaggatacttcacaagtctaacagtctttggaacgtggatatttaacagatgtacccttacagctggttttgttttatctgtgtttacttatagacaatttttagtgctggcttatatttcaatacttttaacaatactgtttaaaagatactcatttaaaaagacacgtattatcacatagctgtcatataggatgaagaaaaaaattcaccgagctgaagttacagaagaatttaaggacccaagtgatcgtgtgatgaaacttatcacttctgatgtattagaggtaaattttcttttatgctcttgaaaatttttaaaaattgttttattgccaactacatattgaggttataccttcatctactggatactgatttttctaatgattttaaccactctaggatgctatttctctagagtatcagacataaaatagcctaaatatatcaaggcttacaaatcttgaaatagcgtgagaaaaaaagatgtagaagactggacctggactgaagatgtgtggattctgttactaaaactattgtttgtatttgactttagttaggtcataaaacaagagtttaaagtgactttacttacttttttaaaaaaacaatatacatgaccaggcatggtggctcacacctgtaatctcagcactttgggaggccgaggtgggtggatcacgaagtcaggagtttgagactagcctggccaatatggtgaaatcccgtctctactaaaaatacaaaagttagctgggcatggtggcgcacgt

SEQ ID NO: 14701 - DNA, 1004 bp, Homo sapiens
taagcctaaatgtctccctcattactattaggattataatattttatttcattcggttgttctgcaaattgaaatgaggtgatgcctaaatagtgctgagtgtggtatattacacacagtatatacccttaataaatgttaattccctttttctccagccctactcagtcttttcttgtattacaattgaaagacagggatcagatcttagatttactcaaatgtttgtttagatgcccccatgttctttttttttttttttttcttgtccctgacacaggatcttcctctgtcacccaggctggaatgtagtggcacgatcttggcttgcagcaacctctgcctcctagtttcaagtgattcttgtgtctcaacccactgagtagctgggattacagttgtgcaccaccatgcccaactaattttttctatttttaatagaggtgaggtttcactgtgttgaccaggttggtcttgaactcctggcctcaagcgatctgcctgcattggcctcctaaagtggtgagtttacaggtgtgagccactgtgcccggtcgcccccacgttgcaataacatcagcctgtcaggttgtttgtaattcaggtagcaaattgatttttgggagcactctgggtctgttctgtaaagtaactttatttttgagcaaggatccttaatctctggcctggagatggtccatgtccctctcccccaccacattgtatgaaaaattgatgtcatacatatggatcctttttttttgagatagattctctcactctgtagcccaagttggagtgcagtggcgcaattttggctcactgcaacctgcaacctctgcctccagggctcaagtgatactcatgcctcagcctctcgagtagctgggactacaggtacgcaccaccacactcggctaattttttgtattttagtagagatggggtttcaccatgttgcccagggtggtctcaaactcctgagctcaggcgatccgcccgcc

SEQ ID NO: 14702 - DNA, 1030 bp, Homo sapiens
gatttctttgtcttggagctagttatttagagagcaatctttcactcccttgtctaggggaggagggtgggaaataagcccagctgccaatgttttgggagcctacagagagaatcagccacgaggctcaccattccttatgcaggtttcactcagcccctctattttcaataagaggcctcatctccttcctcacctacaccagtttcctttgagcccacatcctttctcgtttagcctcttcagagagcaggccttctgttttgtacaggagatcagttgcctagctctgaggttgaggaatgagacactattctctatagattttcaatgcacctgcctgttttttcagtcccacctcagccttccaaagtgctaggattacagatgtgagccactgtgcccagccctttgcccgttttttaacggggtggttttttgtttgttgaattaattttcttatagattatgaatattagacctttatcgaatgcaaagtttgtgactattttctctcattctgtagggttgtctgtttactctgttgtttcttttgttgtacagaagctctgtagtttaattaggtctcacttttcaatttttgttgtcaactttgtcaaccatcaggtggtcgtaggtgtgtggctttatttctgagttctctgtcctgttccattggtctatgtgtctgtttttgtaccagtaccattctgttttggttactgtagtgtgtctgtggtttctgcatccatggattgaaccaattgtggattgaaaatatttgaaaaaaaaaatgcatctgtaccaaatatgtgtggacttttttccttgccattattccttgaataatatgacaatcatttacatagtattaggtattataagtaatctagagatgattgaaagtatatgggaggaagtgcataggttatatgcaaatactacacaattttatatcaggaatttgagcttctctggattttggtatacgaaggaagtcctggaactaatcctccatggatactgagag

SEQ ID NO: 14703 - DNA, 1036 bp, Homo sapiens
gcatttgtcttaggtgagcctcagagggatcactttgaatagaatgggaggctggtttgccctaagcagttccagcttgacttttccctttagcttagtgattttggggtccgaagatttattttcctctcacactgctaaagaaattaaattcccaggcttctctggaaattttagcaaacatttaagaaaggagtgatctagattctttcagaaaatgcaagagggaacactttgcagcttactgacattgcaagaaagaactaaagaccaatatcccttatcttatccaaaaaaaaattcaaaatggattatggacctaaatttgaaacctaaattataaaacttgtgaaaaaatatgtaggagaaaaatgtttgtgttcttgggttgggcaagatttttaaatacatgacacaataacacgagcaaatcatgaaacaaaaaaaaactgataaattggcattctcaaagttacaatttttgtcttcaaaagacactgttaagaagatgagaagataagccacagactgggagaaaatttttgcaaactactacgctgataaaggtcttgtatccaaaatagtaatatttaaagaagtctaactcaataaatatacagcccacccaatgaagaaatggctaaaacatttcaccaaagaaaagatatggatggcaaataatcatatgaaaagatgctctgcatctttagttactagagaaatgtaaattaaaaccacagtgacactccactaaaccctgaatggcaacaacaaaaagaccccacaaagcaaaacaaaaattgtgatgaaaaaagctgttgaggatttggaacaagtggaacctgcatacttttctggtgtgaatccagaatgatgtggttactttagaaaacctgtagtttttaaaaggtaaacgtgtacttaccatccgacccagaaatactattccttggtatttactcaagagaaatgaacacttaatgttcacacagaaatgtgtatgcaaaagtttatgtggctttattcataattgcaa

SEQ ID NO: 14704 - DNA, 1010 bp, Homo sapiens
ccccaaaaaggatatgtttgctgagccctttaattgttgaaaatgaaccttgaaaaaaagaaaaattaatgataggactaggaatgtacaccatccaggaggtagaattaagaaagtttaaatgcaatatgtgaaaactatacgcaggctgggcgcagtggctcacgcctgtaatcataacacttagggaggccgaggctgatggatcacttgagctcaggagtttgagaccagcccgagcaacatagtgaaaccccatctctacaaaaaaaatacaaaaattagcagggcatggtggcttatgcctttactcccagctacttgggggatgaggcaggaggattgcttgagcccaggaggcggaggttgcagtgagcccagatctctccactgcactccagtctgggcgacagagtcagatcctgtctcaaaacaaaaaagaagaaaattataggcaaagaaatgtagatttcttttatttaatatttaaaagagagttgttgtgaagttgatatgaatttatgtgaaataagactaccaaggctgggcgcttggctcatgcctgtaatcccagcactttgggaggccaaggtgggaggatcacctgtggtcaggggttcgagactagcctggccaacatggcgaaaccttgtctctactaaaaatacaaaaattaactgggtgtggtagcgcacctgtaatgccagctactcaggaggctgaggcagaagaatcgcttgaaactgggcagtggaggttgcagtgaactgagattgcaccactgcactccagcctgggcaacagagcaaaactccatctcaaaaaaaaaaaaaaaaaaaaaagactaccagactgatgtggtatttttaggatttttttttcttttttttttttttttgagatggcccgacctcttcttttttatcatatgatctctaactgatgtatgtgacacaataatacaaaactatttgagctataaaagaaatatgaaaggcttctgttttctt

SEQ ID NO: 14705 - DNA, 1032 bp, Homo sapiens
attaagaaataatattaaatacaatagcctattctctgagtcttcactgtatgttcccctcctttttttctttttaaagacaaaatgcttgctttcacatgtacaaaggatctgtgtcataatgccccctttcctactttcatcaaataaaagattatgtctggagtagtgtaaattcacttattttatttttttgagacaaggtctcgttctatcacccaggctggagtacagtggtgcgatcatggctcactgtagcctctacctcctgggcccaagtgattctcccaccccggcctcccaagtaactgactacaggtgcacactaccatgcctggccaactgtgaatttttttgtagagaagaggtctcaccatgttgcctaggctggtctccaactcctggcctcaagtgatcctcccacctcagcctcccaaagtgctggattacaggcatgagtctgcccttggcctcgtgtttacatttgagaagtttttgacttatgtatagacctgtggaactgtctccctgtagctccttgctataccctgaatccctcttcctcatccagccaatgatagctttctgtctctgtggattagtttgcgttttttagaatgttatgtaaatggaatcatgtagtaagttctcttctttgcctggcttttgcttagcataattattttgagactcatccacattgtatcaatagctgatttctttttattgttaagtaatactccattgtactgatagacgccagttcatgtatcttttcacccattgatagacatttaggttgtttctggttttgggctattaaaaataaagctgccatgaacattatacacagtctttgtatgcatatctttcatttcccctgggtagatgtctaggagtagaatgactagatcctatggtaggcatatgtttaatttttcaaagaactactatacttttccaaagtggttatataatataaccaaaatagtctatgagggttccagttgccccagatccttgccaacagtt

SEQ ID NO: 14706 - DNA, 1056 bp, Homo sapiens
tcgaactcccaacctcagatgatccgcctgcctcagcctcccaaagtgctgggattacaggcatgagccaccgtgcctggcgagatttgaattttttaaaaaaattccactagaacaagtatttccttaacattctagtatgaaaaccattatctaaagtggttttaaaagagatgtcattttttttttttttaatctttcagagacagggtctcactgtgagaaccccagctaacttttatgttttttgtagagatggggtttcgccatgttgcccaggctggtctcaaactcctgagcttaagctgcctgcctgcctcagcctcccaaagtgttaggattacaggtgtgagccactgcacctggccaacttaaattatatctatatatagatattgtttaaaaattacataatatttaggacctatgaaaaggtataaatgattatacagtaagtatatacctgctttagcatcctagttcagaaataaaatattgctaatttggttgtgacctcttcctcctccccagaggaagctgctgtactgaatttggtatttatcatgcttatgtgttgcttaacaattttgttgcatatgaatgttaaggttgattttcaaagtatttgacagctggtagtgtgtgggcccggccgtgtcaagttgtaccagcctaatattagtcctatcatggatccctgggagatactttaagattctatccagcttggtgcggtggctcatgcccgtaatccaagcactttgggaggctgaggcggatggatcttgaggtcaggagttcgagaccatcttggctaacatggtgaaaccctgtctctactaaaaataaaaaaaattagccaggcatggtggcacacgcctgtaatccgagccacttgggaggctgaggcaggagaatcacttgaacctgggaggtggaggttgcagtgagccaagatggtttgtcactgcactccacaccctggtgacaaagcgagacaccatctcaaaaaaaaaaaagacaagaaaaatccaacaagagtctaattggctgggc

SEQ ID NO: 14707 - DNA, 1051 bp, Homo sapiens
aatcagttttgattgttggtctctaaggatgaaaggatgagggatacattaatttgctgggcaattgattttcccttgggataagagagaaacaagaccaaaattgtcagtcatcaaaaatggcacagccactttcgttaataaattatgtttgggtttggaaaacttccagccctataaatagattatgggaagccttcagggagagacaaaaaggtgcaccatgactgctttcatataaaaaaaatagcaggcccattgaacttggagaaaaaaatgagaggcctataacctagaactttggtcaaaataggaactatgattcatagctaaaactttactttctaagtttgttaccactcacttccaagtttaggaggaataggtcaaaagtttggcaggaggatttttgggaacaatttgtaccaacaggagatttctgagcagttccatttttcctgctgagaggtggttaatttggttacttacattctcatattttgccgtagtagagattaagaaaaccactggagtggaaatgagaaccatctctacattttaatactgtgattgaaatagaattatggaatgcttctgaagatctacactgttgtaaagtgacaccattctgattttctgggcttctcataggaatgttgaaagtcagcaagtggagcttgatatttaacagtggagttggggatcaaagcggcgttatctttcatgagtagatgtgttccctatgtgtgtgttctttgctttcttaatctctgtgtctgtgtcttttttcctgtgtttccctgacagttctactttatgactgtctataaggtgtggcgttctgtattttatagccaaggtcatttgcattagctacacttttttttttttaagttaaaacttttttttgagacagggtctcattctgttgcccaggctggagtgcagtagtatcatcatggctcattgcagccttgacctcctgggctcaagtgatcctcccaccttagcctcccttgagtagctgggactacaggtgtgtgccaccaca

SEQ ID NO: 14708 - DNA, 1028 bp, Homo sapiens
catatatttttatatatacttatatatttatggaaaattttatgtttatataaatatataattataattatatatatatttctaaagaattagaaaaaaaacccaaattaatttctcccttagttaattaatctgccacatcaggaatctgttgcttcatttcatgcggatgtcagtggataagatgttgcttattcaacaccactcgaagaaacacaagctttgcatagccttagtactatggcattgcagaaaccgttagaacaatggcactattactgatgtttgttattggaacctgtaacatatttctgattgaccagccagatagactattgaattatggagactgttagccttatgggaattttattactctttagaatagtgtttgaaaggaagagtttaaaatccaagcatttcactgaggagagataataaggcctacaaccctgctgcagtttccagtttattggtcgtgctttgtgtgaattatttgagccttctagcaagctctgtgatgcaggtggagccgtagatccttgtgtaatagcagaggaagtggaaagtggaagctcagccgcctgcttgtggtcatggtatgggaacacggaaagggggatgagaagcagtcagctctttccatcctgacaaatgtcaacttgaataatgtcatcattaggatgaattggtgagcagctaaaattccatttatggttttaattagagatgagtatagtaattgatattaataatggtgttaagtcgccaaagaaaacttaaaacatattccatatgttgtatttatcaggtcaaggaatttctatcactcttgattaaaaacaagtagtaatgttactgaatgagtaacatgtggaggccgggtgagcggtggctcacaccagtaatcccagcactttgagaggccaaggtgaaaggatcacttcagtccaggagttcgagaccagcatggataacatagggagaactcatctctacacaaagtaaaaaaaaaaaaaaaattagct

SEQ ID NO: 14709 - DNA, 1032 bp, Homo sapiens
caccaggctaattatttctattttttgtagagagagggtctccctatgttgcctgggctggtgtgaaacccctgggctcaagtgatcctcccaccttggcctcctaaaatgctgggattacggatgtgagccactgtgcccggcccgtactgcagtatttagtcacagttttacatgacatgagagtcttcagaatgaaggcccaaagactcagggtgaagtatccatttttatgctgtggtttgatgcatggacaaccgtgtattaatatgatcagacaaaaaggatagaatctagaagagatagactgagggggaaattcattcaaattcttcttggcctctctgtgtagtattccttccatccaggtatggggcagggcccctttctggagtggttgggtcttgtctttctttctttctttttttttttttttttttttgagatagggtctcgctctgtcacctcggctgtatggagtccagtggtgtgatcttggcttactgcagcttcgtcctgctgtgctctggggtgatcctcccacctcaggctcccaagtagctgggactacaggcgtgggccaccatgcctggctaatttttatatttttagtagagacagggtttcaccatgttggccaggctgatctcgaactcctgagctcaagtgatccacctgcctcagcctcccaaagtgctgggattacaggtgtgagctactgcgctcggctattaaggggttttaggactcacaatcaaacaaagtaggccagagaatgtctttatggccagttcttacacagaaaagcaaggggaagtttgttgtaatgtttttaggttttatttctggctttagggaaatggggttctgatttctatgacccaccttgatgaagagggattccagtttccatggcttgcctctggagagaatgaggggagggagacaggagggcaggtggtcagagagaaactttgcttctgaggccttcacttgggagtacagttttttgagccccaacagtagattaga

SEQ ID NO: 14710 - DNA, 1049 bp, Homo sapiens
aaaagttattattgtcaaagaactacatcttatgtcattaaaatatgtttaattagcactcttcaggaaagaaagtggtgtaacttttttatcttttatttttgaagacagggtcttgctttgttgcccaggctggaatgcagtggcatgatcatagctcactgtagccccaaactcctgggtttaggcaattcgcttgcctcagcctcctgagtagctagaactacaggcatgcaccattatgcccagctaactttaaaattttttgtagagatgaggtcccgctttgttgcccagactggtcacaaactcctagcctcaagcaatcctcctgccctggcctcctaaagagctgggattacaggtgtaactttttgaaaaggaaaattattttgttatgtacatgctgacattttctcagtggtacttttgaatgttgtaggctggagagaaacatgaaaaagaaaatgaagaattcacagggcaactaaaagtggctaaagatgttgaaaaactcattggacaagtggaaatctgggaggcagaagccaaatctgttttggatcaagatgatgtggacacctcaatggaagaatctttgaaggtatgtgtgtaaaagtattaagagggtactttcatggttgtgcatttatgttttaagttaaataagaagttttaaagtaagtagtaataagcctacagttttaattttctttgttgggagttttaaaaatgaatggattttatccctggatcatttgctgttattttgcttgaaagcagaggatagattaggagaccactgataatacctatgaatgttaagctcttggacttattttcttagctataacatgggggttaaaatattttcttgcaccagaggacaatgaggagacgagtgagttcagtctcattatagctcagtgcagagtacacgtaagagataatataatcaggctgggcgcggtggctcacacctgcaatcccagcactttgggcggttgaagtgggtggatcacaaggtcaagagatagagaccatcctgg

SEQ ID NO: 14711 - DNA, 1031 bp, Homo sapiens
aggagaatgcaactaaccaaagctacagtgagcataacctaatcttcttctgagtatacaaatagttctttcaagcagagacccttttgaaccattatgaatactgattatctgtgtatattgttattgagggtagaagaggttgagcttgatctgtacagatgtttccatttcattgagatgaacaagttcatttatcatttgccttttcttctgctgcattataatgtatttcattttctgtgggaattgaattttctaaattcctgaagtctagataatttggtatttactgtgtgttacagtccagactgtcaatcagatcatgtggaggaaggaatgagatgaggtggatttgtttttagaggtctgctcctgcatggtaggcttctgtctacttttgactatgggtatggagtctcaggcagaaatagcattttggggctgggagtcttcctttaccatgctgccataccagttagaaggtgagactctcctctgtcctacggaaagacttttctctgagctgagacatctcaaagaaattgtattatctcctggtttgaggtataaagaatcaatgatacatttttgaacataagcatttatcttttccagataaaaagtatgtttaagatatttcgtttactattttgcatattcccttaggcaatggaacccactatgaagtttagcctggcatcagtgttaaggcctctgcaagaagaaagcattatggaaaaggattacagtgcatctataaatagtttactagagaggtaaactctttttaaaaacaactggaaaatccaccagaagtctttcatcgatgcaaacatgttagactttttaaaagttttattttcatttagtcgtcattttgcatatgatccagtaacttagaaattctatggtattttctcacacgcagttgacagtaattttaaaatatttctttgtgttattttatttttcttatttttttgtttgttttttgtttatctttgtgttattttatttttaatatttta

SEQ ID NO: 14712 - DNA, 1028 bp, Homo sapiens
gttacacccatttgatctacacgcaatgcagaatattatactgaaatacaaaacacaatttgaaggaatgaaccacagggtgcagaggagtgaagatactctcaaagctctggaagactttttggcgtctctcagaacagctaaactctctgctgagcccgttacagacctttcagcctcagatacacaggtggcacaagaaaatacgttgacagtaaaaaataaagagggagaaattcatctgatgaaagacaaggccaaacatttggataaatgtttgaagatgctcgatatgagctttaaagatgctgaacggggtgatgacacctcctgtgaaaacctgcttgatgctttttcaataaagttatctgagacacatggctatggggtacaggaggaattcactgaggaaaacaaattactagaggcttgtattttcaaaaataatgaactccttaaaaatattcaagatgtgcagagtcaaatcagtaaaattggtcttaaggatcctactgttccagctgtgaaacatcggtaagtattgtccatccatttccatccaaggtgactgacatctttctgtattttcacttctgttaggtgaaagaaattcttcctatgtctttctgcttctattccatcccactctattcagtgttcagcattcttttctgtagacttttcaagcaaacttcctttttgttggtattgtacctgtacaaaacgttgcataatttttttcctctttaaagtgtatcttatggatgaaggagtggtgaagtcagatgtacataaagtactgtacatgagttacttccgattcccttgtccttctgtgtgtttactgtggagttctcctcaggacagatgactggcagactccacgctgtgatattaatgaaaccagtggtggaagatgcatatgccacatcttgtccctgcttcttccttagttatttggtcccctcctcctcccagcaggattagggtaggaactgagtggaagggcaggagactgaatttaagag

SEQ ID NO: 14713 - DNA, 1085 bp, Homo sapiens
tgccatgcactcagtggcagcactgctgagctaagggaggatctcgaccaagccaagacccagatcgggatgactgaatccctcttaaaagccctgtctccttctgacagcttggagatcttcactaaactagaggtgctaccgagctgcttgtcttctgtggttcagatttattttcacactatttgcagttgtcttgagctcttagagttaataaaaatagaaaaaaaaagtcgaagaagaaaactcagaaaaaccgcttttgtatatttagcattttcatctttgaattgctttgtgcatgataattatttgatattaacttgcattgtatcatacatttactagcaaagagaaagtgaatccactcaacagagagtcattgagatttttacaaaacaattgagatctaatatgctttgtgtaatttgagcctgttttaagatttaatggttgttgtttgtttatgcatttaggagatacaacagcagattctacagcaaaaacacagtatgatattacttgagaatcaaataggttgtctgactcctgaactctctgaattgaaaaagcaatatgaaagtgtcagtgatttatttaataccaaaaaaagtgttttgcaagatcacttttctaagttattgaatggtgagtgcaacatttctcttattttgtttctgggactcttgaagtatgaatgtagtactgtgaacacaaaagctaatctaagcctgacttagagatggtttgcacagactacattcaaggaaataataatcagataaatcttttgggagcaaagactgatttatgcttgacataaataacacctagttcttgcaagctccaaacctttatttctttcttgaaggtaagtcactaaggtcctagtgtttgacctgctcattgtggttggtgagtctggggaaatactggtgcacaagcggtccaggcagtgtctttgagtgtcctgtatgcttggacgtttggtatagaaaatacactacaattatttgatgaattgtagtaaaaatactggaggcatagaactgtatctaaataaatagggaggccgggcgcggtag

SEQ ID NO: 14714 - DNA, 1030 bp, Homo sapiens
tctatataggttaagtgaagcagcagattaggatatggtaaaaagtgaagactgtctaatctcttaggattttatgtgcccataaagagaaacgataaagaggaaaaacagggaaactcatacattttctaatttattattttttttctaaaaaatcataatacaacattacagcttatctagtatggaatgatctttcttgccccatccttccgaaatagcagcctacatgacataattgctttttaaaaactgaaaacctttggtctgtaattacttctttgatttccttatcattgacgtaattgttagcatttctgaattgattttgttcttttcagaagtttctgagcatttctaatttgatgtttaagaaggcatttgtagataaatcttggaaggtacaggcaaaatgtgcaaagctctagctgtgggtgagtgacccggaacaaagcctggagtcagaatttgaatgagaaggaaactacttactggagagttttcaatcctggggtaaattatgtctatttctggtgttgtttatcctgttaactcagtagaaaaaaaaaagttataacagagcacatagttgggccatgtgtcaactacagtgtcctacttgccctttctggccagtatgcaaatcttgcatcttactgtagaggtattttcacaatccaaaatttatgccttaatgggataaccaacttacatggtacattttttttttttttttttttgccatctataaacaacgtgcatttgagaacatgctccaaagttgtaaaatctcaggctgaaaaagaccttagaaattgtctaacgtaacccttttatttcaggtgagggaattgaagtccagcagagctgggactagaacttaggcatcctttatttattttttatgaattttagagacagggtctggctctgtcactcaggctggagtgtagtcatagtgcagtcatagctcactgcagccttgagttcctaaccctaagccatcctcctgccttagcctcctgagtag

SEQ ID NO: 14715 - DNA, 1109 bp, Homo sapiens
gaagcagaaaatcagattaagaagtgtgacataaggaacaagatgaaagagactatcttatgggccaagaatttgttgggtgaacttaatccctccattccccttctcccagatgacattctttcacagatcagaaagtgcaaagtgacacatgatggcattctagctaggcagcagtctgtggaatcgttggctgaagaggtcaaagataaggttcctagccttacaacctatgagggcagtgatttaaataataccctagaggacttacggaatcaataccaaatgctggttttaaaatcaactcaaagatcacagcaattagaatttaagttggaagaaagaagcaatttttttgctataataaggaagtttcaacttatggttcaagaaagtgaaacactgataattcccagggtggagacagctgccacggaagctgaactaaaacatcaccatgttactttggaggcatctcagaaggaattgcaagaaattgacagtggaatctcaacacatcttcaggagctaacaaacatctatgaggagctgaatgtgtttgaaagattatttctggaagatcagttgaaaaatcttaagattaggaccaacagaatacaaagattcattcagaatacatgtaatgaagtggaacacaagataaagttttgcagacaattccatgaaaaaacatcagcgcttcaggaggaggctgacagtatacagcgcaatgaactattacttaatcaagaagtaaataaaggtgttaaagaggagatctataatcttaaagacagactcaccgctattaagtgttgcatcttacaggtattgaaacttaaaaaagtgtttgactatattggactaaactgggatttttcacaacttgaccaattacaaacccaagtatttgaaaaagaaaaggaacttgaagaaaaaattaagcagttggacacatttgaggaagaacatggcaaatatcaggcattattaagtaaaatgagagctattgatttgcaaattaagaaaatgactgaagtagtactaaaagctcctgatagctctccggaaagcagacggctcaatgcccaaattttaagtcagagaat

SEQ ID NO: 14716 - DNA, 1034 bp, Homo sapiens
atagatgttaccctttactacaggaggaatttgtccacttctgattattcagggacacctttactggctccaagttccatacctcttggtgactgtcttcctgccttttagtgatttctgtctcattggcacagcacatcactaatgagaaggaaagtggggactttgcagaaaccaggcagccaatgtcatcagccttctatcagcctcaacaaaccttttgtttcagaggttaagtgtattgaccaaatgataattgcataatttttagtaaaattctgagtcattcttgacccgtattacaaccaaggataaatatttagtatggaaaaatgtgaaaatgtgaaatcaagctaggcatgacctcagagtaaaccaccaccatgccattctaggggcatgcttttcatttattcatgtgcagttaggtactgtactttaggtatgcagttttacatttcataagcagtgggggagatatgcaggtataagcagtgggggagatatgcaggtatttgtagaattgactgaaatattaaggagaaaatgtaaaggtttgctattttggcatgaaatgtagcaatagccagaaaatcaacttgcattttaactgcagttttttttactgattactgattacttcactgattacttagatcagtgttgtgttgatgcagaagtgaagcaatgtgattcaccaactgaaaagttaacttggatactaaaaggttggtgaaattatatcaagaatgtggacttgtagattccaaagtgtagtgaaagcaggaattgcttttgattctgtttactagttgtgtgaccatacagtgcctgctcatggtaagagcccaataaaggctagctattattaatttacagttatgctttagagaagacatatttatttaataagaaatacttatagtaatactttttacacccccccccccccgccaaagtgtacaattataaaacatccatttaaataagttttgcttttagaatttggggctatcatatagagaaggtatttt

SEQ ID NO: 14717 - DNA, 1036 bp, Homo sapiens
atgttcaccaagaaagtggctcagaagacagcatgctaaggcatctttttctatttaaattaatatcagcaggctggacatgttggctcatgcctgtaatcccagcactttgggaggctgaggcaggtggatcacctgaggtcacgagttcaagaatagcctagctaacatggcaaagccccgtcgctactaaaaatacaaaaattagccgggcatggtggcaggcacctgttatcccagctactcgggaggctgaggtaggagaatctcttgaacatgggagacagaggtttcagtgagaggagatcatgccactgcactccagcctgggcgacagagcaagactccatctcgaaaataaaaaaataaattaattaacatcagcagggtctaaaactgtcagtaatagggttttcctttgtcaaataggtttccacaaatatgggtattctacccagcgtgactatgtataactttagatacccaacaactgaagaactgaaaacctataccacccaacttgaagacctgcgccaagaagcaagtaaccttcagacacaggtagaagctgcacacaatgtgttttcctcattgtaataacataaacaaaggagatatcatcattgtgacttggtcataattgtcgtcactgaacaagtcatggaacacataatggaatgggtcctaggattgcaaattgaattgatcttgcttgccaactctaatatattttgtagtggttccctagggactgtgtgcaaaggattctgagtccaggatcagcaggaaagaggatcatgattgatgagtgccgtctgcagtggtgatctgggattggaagggtgaagaggagagtagggagggagtataggcatggttttcaaccctgagcagacttaatactgaggtaattaatgctaggttatgtgaggtgtctatcagagaagatagtaggagacagggcccaagttggagtgatgactagctatggcatgctcctaaactacttataactgttcaagaattcagggtaact

SEQ ID NO: 14718 - DNA, 1050 bp, Homo sapiens
tcctgtttttaagacactgtacctcctctttgtaatcaaccccttcaagcttctcttttgtgacttcttttccttctcccagctatacttgatttcattaaccgctttctcctacattagaatgtggagggtgggaaacagtggtaaaggagacagtgtaatttatctgggaccacactttcacctggatcgccctgctaagggatccttcatctcatgatttaccttttagttccatgcagtactcaaataactacctaacgttgagcttcttaaactcatttttctccaagtttaacatcgtaagtttatttatttgttctgctacctagttcacaaagcgtttgaagcaacttattacaaaagaagcataacataaatcataaactataatggaaactaggcaaaatataggtctaggaaggcaaaggtatcttaattttctttttcttttttcctcttgattcaggaaaatatgacagaagaagcatatatcaatttggataaaaaattgtttgaactattcctgaccctcagtcagtgcctcagcagtgtggaggagatgctggagatgcccagactttacagggaggatggttctggccagcaggtgcactacgaggtagggcacttctcacgagcccatgtgttggccattacagcagccccgtgagttaagcccacgtggaagcctcttgaggtcagagctcattcattgtcttccttcctctccactccagacgctggctcttgagttgaagaaactttatttagcgctaagtgacaagaagggtgatcttttgaaagccatgacttggcctggcgagaacaccaacttgctccttgaatgttttgacaaccttcaagtctgcctggagcacactcaggctgcagctgtctgtagaagcaagtccctgaaagctggcctcgattacaaccgcagttaccaggtatgattccgagcacacagcctattttggcactgttttaagttacagcatgaacccctaatgcctattcctattcctggtgacatttgttaataagaat

SEQ ID NO: 14719 - DNA, 1045 bp, Homo sapiens
gatgttttgaacaacacatagaatttggaatatacaggagaacctataaggtgaataaagaattgggaggtgataaaagtaagatacttttatcttattatttaaatttattatttaaattaaatttattatttaaattattatttaaatttaataatttaaattattaagtttggcatcttctttacctcattgtttactggaaaccacaagtgaacctgagtcaatcaacagaggcactgagctaaatgctatgagaattacaggcaggaagtaagttgagtcagttacattagtgggagtaggtatctgagcatctgtaaaaccaagtggtttgagagctcagatcccatcttcctgggattaggaagagccttacagaggggctgcgttcccagatggtcctgaatgagggattgcggttactggtggcagagagagagacacatacattgagagcaaacaggtacagaatagagcagcatcgaagccgttcaggaagtgatgagaagccccactggccccaagcataggagatgagctagaaagatgggctggggctaaatcttagaagactttaaatctctgctaaatacttggccttctgaaaaaatatctgagtcatgcctggttccttagcagtggagggtttgctgaagacaaatattagggggatttggctggcaacatagactggcccaaattcaacttctctccacagccagttgggggaaaaaaaacaaacctacagaaatgcatgatggaaacctaagtaaggattaagagcacaagttttgaaccattcttgactttcccacttattcactgtggaaacttgagtatgtgatttaacctttctaggcctcagttgctaaatctgtaaaatgggtctaattggcttacatcagaggccgctggtgctgtctgctgtgaggatatgtgtcatgcctttggtatggggccagcacatatgagccagcatttatggagtggttgttttcattacttttccatgagaagactcttaggtcgtgtgtttattgag

SEQ ID NO: 14720 - DNA, 1043 bp, Homo sapiens
aaagtagataccattgtcccattttacataccaagaaggaaactgaggactgaagctaagcagcttacccacagttacatagccagcatgtgacgtaaccaggatttcaacttaggcagtgtcacttccctgacagcccagaccctctcatttgaaacactgaaatgagcagtacgtgctgagtgctaatcccttcagcactaaggaatttgggagggaatcatttttcttattttaaagcaagggccaggctgagacagacagctagaatctaagaagctcttagctgagtttattgttcaggtgaatctgtgggttgaggcagcaaacttggacctgtcataatcagccttacatagaatcagccttacatagaatccctgatgctgacttcaccctgggccttgtacaaaggaagggaagggttggaagcacaggctgcaaactttacatttgaacagtggcgacaagaacctgctctgcgggatgccctgatggcttcatttgcccacaggatccaggacaccatgtagcctcttccatccttcccacagtattctgctttggccctgtgggcagggaacagcagctcttgttaaaaataagatcggccaggcatagcggctcatgcctgtaatcccagcactttgggaggctgaagccagtggatcacctgcagtcgggagtttgagaccagcctggcttacatggcgaaaccccatctctaccaaaaatacaaaaactacctgggcgtggtggtgcgcacctgtagtcccagctactcaggaggctgaggcaggagaatgacttgaacctgggaggtggaggttgcaatgagccttgatcacaccactgctctccaacctgggtgacagagcgaactccgtctcaaaaaaaaaaaagattggaaggtgatcctacataggtacccggccttgttactgcaagatcttaactataaaactaacttcaaggttaagaatggttttcagaagtccaaggcctcaataaatcagttttaattcactggaggaaaaaatggg

SEQ ID NO: 14721 - DNA, 1034 bp, Homo sapiens
tgaggtacaccaatgggccaccccccacatagagggcatagctggccacagtgctacaccacctgcctgattgccaagggtgcccagcacgtggccccagaccaatctgagtgacttagtgttggcaaggtcccgggacctgtgcagacttcttctgggcttacccagcacgggctccctggagcccagggcagctttcagattgtgttcctccccaggagcagggaacctgtgtggcaggtgccccgggtattttggcagaactagttgattagtttagggatctctggaaatgtcagtttcctgaagagccaagcactttgtgaattctggtttgtttgtaaaacagcattattataatgtaggtatggtcaatgagcagtggtgtccatcacatatattatagaagcaagcgaggacattccaccctagaaatggttcagaaactcataggcacccttagctgatggaaacaatcaatcatatttaatacgcttagaatcagttttactccaatcagctggcaattttgagctgccggttatacaccaaaatgttctgttcagtacctagctctgctcttttatattgctttaaatttttaaagaaattgtattgcatggatgtggttatttgtgcatattttttaacaatgcccaatctgtatgaataatgtaaacttcgatttttttttaaaaaaattagattttagctggagcttttgactaatgtaaagtaaatgccaaactaccgacttgatagggatgtttttgtaagttaattttctaagactttttcacatccaaagtgatgctttgctttgggttttaactgtttggccacggcgggggtgggggcggggggttggtacagaaacttgaagctgtttgtgatatgtacaactcagatgtttctcattaaaaaacaaaattagccagacttctgttgtactgaattctgtaacaaagcagttcagtggtatgcttaatcttccaaaaaacaaaaattattatttttaaaatatttggagaggg

SEQ ID NO: 14722 - DNA, 1051 bp, Homo sapiens
accttttctacctaaggttttgttcagtctttttgaaaagcaggaaggccaggtccttgtgaggcttttctcattacaagctcttggcaggttcttccctccaagtggagaacccttaccttccccattctttctaccttcccctctgatgatccagagggctgcaagggacctagagctgttcattggagccctagtcagctctagcggccagatctatggttaggtaatcctccaatagtgagactaattctcagtgttagaattaggggtctgcctgttctcaccagcagacccactggcatcaactctcctttgttgacatatagttaagcaccgcttcttacagatcctcatactcagagccaaccttgtcttgtctcataactcttgctactggcagaaggtgataaaattgtggcctagaggccaaatgttttttgtttggcttacagaattagattacttctcaacacatttattactttacaacattagattacttcttaacacacttatgcctgtagttacacataaaaatctggatgcttgactttttgaaagatgtgaacagtttagcaatactgtactgtctatcttcatgccatcaatttgttggatctgagtagatgctgcctaccccctcatccttgagtgggtgggggtgggggaggtgggacctcattgttcaggaatcctaccacacttggttgcctgtaccaggactccgaaggttctttcctctttgagacctttttctgaatgaacttatggtccacttttaaaatcctaaattttataaagccttaaccagtccaacctagtccgtttattgcattagatcagaggttgtcaaatggggcagttttttcctccctctacctcagggcattgggcatgcctggagtcttttgggttgtcatatggggaaggggtatgctattggcatctagcagtagaggccaggactggtgccgagcatcctgcagtgcacaggatagtccccataacaaaggatgatctggtccaaatgtcagtggtgctgagatcg

SEQ ID NO: 14723 - DNA, 1029 bp, Homo sapiens
gggacagcagaaaaatattttcagttatacagacttagaaacatgtccacctacctttcctggaaaactgacttataagttacatttcacttacttgaaacatgaatgaagataaattctagaacagagaagttgtggcttccttactggcagcaagtgataaaacaatttaatctcagagttaagactaaataactagtggtaggtataaatatgaatgaaattgtaaaaaaataatacttttgtatttagaaccacctcctttcctactttgatctaaaaattccggaatgtatcaaatctggtaactgaaccagtgagggttgggtggtggggcaaagaacatacatagaaagtgaccaaagaggaaacatgagaggcacgaaaagtctagggaagcccctacgagaagcatctaatgtacttagatacaaataacccattaaaaaaaaaggtagaattcccctcaaaggactcttctggctcttgcaattcaaattagcaccacaaaactgagaactgtctgtataagggacaactgaagctaagattcaggccatgtcctgagatctgaggagagcgtccagtaatagcaccaatatgacaagctcagaaaatcctgtgttacaaaagccggcttctttctctgccatggtcctgttaaaaggagctgtgcttcagttgtctttgatatgaagggaccaccacctttccctctgtgataccctctgcaattctgggagaaacacaacttatggtagcatgtatcaaccttgagaaggagaaataccaaccactggagcatgaaacaatattagtacaataaaattttacaaataaatggttataatgataaactataaatatgttcatggtcaaagaaacagagggaacatagtgagacactgcatggtggttcaaaggatttagcctctgcactacaagtttctccctgtctctctcttttttttttaagagacaaggtctctctctgttgcccaggctgcccaggcatagtaccatgactca

SEQ ID NO: 14724 - DNA, 1032 bp, Homo sapiens
caaattaacattttaaaatgggtgctcattatatactgggtagttggttttaagaataaaaaacagttggtattttatttgccacctgagagactacaaaaggattctccaggttctgtaaaaccacttatgcatcttgtgaatttttgcaggtaaaataattttctccctaagaaatagcaaacatctgtcattccatagcttttaagttaagtaggcactggagcctgatgggactaacacaccctacaattctgctgagtttttgtcgtaactgatcaccaggactgtgattctgagacttagttttgatttctcccccacttgaccagatgataaaaaaccaaatgggagaaaagttgtgggtgatgtggcatacgacgaggccaaagagagggcgagcttcatcactcctgttcctggcggcgtagggcccatgacagttgcaatgctcatgcaggtaattgtgaataaaagtttctataagagttctgaaaagctgatcgagttttggctgcttttctccccaagtagaaatgtcaaaaacctactcagaagtaaagatgtgaatttattgagaaaaagggaagggaagaatagagaaataagatcaggcacattaatagaggaaagtagggatggcataattccagtctgttttggaatataataactttgaaagaagaaaagtgcgatcacactggcttggccaggtctgttttggtttgccttccctttctttttttttttttttttttgagacggagttttgctcttgctgcccaggctggagtgcaatggtgtgatcttggcttaccgcaacctccatctccctgattcaagtgattctcctgcctcagcctcctgagtagctgggattacaggtgtgcaccaccacgcccggcgaattttgtatttttagtagagacaggtttctccacgttggttaggctggtctggaactcccgacctcaggtgatccgcccaccttggccttccaaagtgctgggattagaggtgtgagccaccgtg

SEQ ID NO: 14725 - DNA, 1085 bp, Homo sapiens
catgttaggtgcctcttgactcttagctaggattgaagcatggtaataagtgggtctgaagcagttcattttgtgattgaactggagtgacctggagcttgaaactgaggtgaggattaaaataaccacctcttctaagtttcatttatttcattttgcttagagcacagtagagagtgccaagcgtttcctggagaaatttaagccaggaaagtggatgattcagtataacaaccttaacctcaagacacctgttccaaggtaaaaataaagttttactgatttaaaactttgtgaattgttggtttttagttgacagatactgtgggttcacatatgctccctctgaaggtgccttcagtggttggggttgggttgggggcttgttactactgtgggattaattaaactcagtggataaacattaatacctattttctatgtttccaaagtgacattgatatatcacgatcttgtaaaccgaagcccattggtaagctggctcgagaaattggtctgctgtctgaagaggtagaattatatggtgaaacaaaggccaaagttctgctgtcagcactagaacgcctgaagcaccggcctgatgggaaatacgtggtggtgactgggtatgctttttattcatgttgccatccaaatcttagtatcagtcctgatactaaggcgttgcatttgcacttggcacatgtatgtagaggtgcctttaatttgattttagcattttcacccgtatttgatctcatttgatccttacagcaatcctgagaggtaggtaagaatagattataatcatagatgagaaaattggtcaaggttatccatctagtaagtggaagagtttggtcttaaaacccggtcttaagatagaatcaccttttgctgttgttgttgttgttgttgttttgagacagagtctcgctctgttgcccaggctggagtgcagtggcacgatctcggctcaccacaacctctgtctcccaagttcaagcggttctcctgcctcagcctcccgagtagctgggactacaggtgcaaggcaccacacccagctaatttttgtattttta

SEQ ID NO: 14726 - DNA, 1046 bp, Homo sapiens
atgggggtttgctctgttgcccaggctggagtacagtggtgcagtcatagcttactgtagcctggaactcctgggctcaagtgatcctcttgcctcagcctcctatatagctgggactacaggcatacactgctatgcctgactttgtctttcttaatctttagattacgagtcattctctaggatctgctaggtatgacttagtgattcagatacacttaattctttaaacctttttctcttttgctttcgtcttgaagaataactccaacacccctgggagaagggaaaagcacaactacaatcgggctagtgcaagcccttggtgcccatctctaccagaatgtctttgcgtgtgtgcgacagccttctcagggccccacctttggaataaaaggtactagtgagactggaccatgggtggtgacaggggacctgcttctccttcagtcctcccaggcccacgcaacctatgatacttatggggtcttcaactcatttcaacaccaggaatgtcattctcacaaacctctgtagtcatgcttttgatgaaggctgtcattggatctccccagctcctgctgtcactgttggccactgcacagggattctctgggatgggtgatatgtagctggaggtgcttttatttgaccctcatagtccactgctacagtaaccataaaggtaatcatagctactgatcatcttacagacactctagagacaatgacaaaccccacagatgtttcaccttgttgggaataagaaaagcctacctttattgaatatatgctttgtgccagatattgtgctgagcagtttttgcatattattctatcatccagtacgagatagtattgtcaccattttaaaatagcagcaactgggacttcagaggtggcttggtcaaaggcacctgtattaagtaccagagtgattcttccatgtctatttcaagctctaaattactaccatactcgcactttaccttcagatttttattgctgcggtactaagaacatgtgtttttttttttttttttttt

SEQ ID NO: 14727 - DNA, 1029 bp, Homo sapiens
cgcgctcagccttacttttttcttttaacaattaaaaaaaaaaaaaaatagaagaggccaggtgcagtggctcacacccacaatcccagcactttggaagcccgaggcaggaggatcgcttgaactcaggagttcaagaccagcctggacaacatagcaagaccttgtctttactaaaatattaaaaaaaaaaaaacaaaaaaaaactgaatgtggtggcatgtgcctacagtcccagctactctggatgctgtggcgggaggattgcttgagcatgggagattgaggctgcagttagctatgatcatgccactgcactccagcctaggtaacagagcgagaccctgcctcaaaaaaaaaaaaaggaagaaaactttacactctaaggataaataaaataccttctcaaataaacccactgcttctttataccctgaaatgcatgttgagcaacatgagacacattctaactctatagaattattgcttctttgataattcaagaaaagacaaaggcactgatcaaacttgtttggtgccatttctatataatctaataaggttgttgttgttgttgttgttgttgttgttttgaaacggagtctcgctctgtcgcccaggctggagtgcagtggtgcgatctcggctcactgcaagctccgcctcccaggttcatgccagtctcccgcctcagcctcctgagtagctgggaatacaggcgcccaccaccacgcctggctaattttttttgtatttttagtagagacaaggtttcactgtgttagccaggatggtttcgatctcctgacctcgtgatccgcccgcctcggcctcccaaagtgctgggattacaggtgtgagccaccacacccagccctaataaggtttttttaaatttttatttttgggatagagtctcactctgtcacacaagctagagtacagtggcgtgatcatggctcaccacaacctcaaaatcctgggctcaagccatcctcctgcatcagtctcccgagtagttgggactgc

SEQ ID NO: 14728 - DNA, 1028 bp, Homo sapiens
atctcaattctctttcattgatctatatgtctgcccttacaccggtaccatatagtcttgataactatagctttgtagtaagttttgaaatcaggttgtatcagccccccaacttggttctttttcaaggttgttttgggtattctgggtcccttgcttttccatatgaattttaggatcagcttgtcaatatctgcaaaaaaaaaatcagctatattttgatagagattgtattgcatctttagattggtttgttgagtattgccatattaacaatgttaaatgttccattccatgaacaaggaatgtcttttaggtcttctttaatttctttcaacagtgttttgtggttttcagcatacaagtcttacacttctttcgttaaatatattcctaagtattttattctttttgctgctattataaatgggagtcttaattccattttatgattgctcattgctagtgtacaggaataaaatagatttttgtgtgttgatcttgtattctggtacattgctgaacacttttattggttctaatagttttgtggtagattacttaggattttccatatacaagttcatgttatctatgaatagagattgttttatttcttccttttcaacccagatctcttctatttctttttcttgtctaattgccctggctggaactccagtatcgaatatagtggcaagactggatatccttgtcttcttactaatcttagtgaaaaagcattgtctttctccattgattatgatgtacctgtgggtttttcatggatgttctgtgtaaggttggggatattctcttctcttcctagattgttgagcgtttttatcatagaagagtgttggattttgtcaaaatttttttctgggtgtattgaagtgatcaggtgatttttacactttatcctattatcaacctgaattattttaattaatttttagatgttaacctaatcttgcatctctgggataaatcccacttggtcataatgtatggttgtggttgctaga

SEQ ID NO: 14729 - DNA, 1022 bp, Homo sapiens
ttcctaggcttggctggggtagggaaggttattcatgggccagggatgtcttagggagatggagacatggaggttgttccttccacactcaattgtcacttgggcttatgaaacataaggcacccgggtactggtgggggaggtggggcaggaggatgtgagggcgggctttttctttctgctgcctagactcccatgggcttctctgtctagcagcagcctgctgtcctgtctagggtagggggtcccgcatgccagccttttgctcttttccccaagggccagagttggaccaagaaaaagggaggtggtgaggtggatagactgtttttctcataagcagatgctcccagtatctggtgccttttgcgtttctctccggtccccaggaaacatcctagaagacaaggattttttttttttttttttttgagacagagtcttattctgtcacccaggctggagtgcaatggcgtgatcttggcttactgcaacctccgcctcccaggttcaagcaattctcgttgtctcagcctcccaggtcgctgggactacaggcatgagccaccacacccagctaattttttgtatttttagtagagacggggtttcgccgtgttgaccaggctggtctcgaacttctgacctcaggtgatccacccacctcggcctcccaaagtgctgggattacaggggtgagccactgcatgcggctgaaggtaaggattctaaactcggagactagaaatgtcctaaaggtgtctgcaacattggatgaggagtacaagtgcatttttctgggatgattcctccctttttatcacattctcagaagtatctttgattcagaagagttaggaatgcctccctatttcagttgggttttctgccctttctccacagaggtccagactcattttgcttaattttttttctagctggggcctgggaggtagaggcttcagggcctgggtggtagagctgcctgacaagtgttcagcagggctgctgggtcagggccc

SEQ ID NO: 14730 - DNA, 1024 bp, Homo sapiens
tggaggacaggacccagctggccccagggccagccccagattgcatggtctgtgcccaacagggttgcattcctctgcagccgccgcctcctcatttcctccctgagcttgtttgtccaagccaccaagccatgtggtcccgctggcttcatcctcctctggattcctgcccccctcccatgaagggaggaagaggattcagggtcagcctaggggaccctggctccctccgataggcaggaaggaggagggatgcggaggagaggctgagccttccacgggcctcctgttaggggtgttggtggaggccaggttggggagggaagcctaaggaccctccacacctcccacagccagagtcagttgaggctgggacaaaggggaaggagagagggaaggaggaccgcctgaccttgcccagaaggagcttcctctaaactgccctgggaaggaagcctggtatgctggtgtggactggagctgtgtcaacctcgtttgggaatactgtcaaaagactgtagagtagaataaggagagaaaaaaaaaaaaagaccttgctagggcactgggagagcttagccctggtgtggcacacacagggtctcccaaagctggatgcctgcattttcagtctagttggtcgaatgtcttggagcctgggtgacaggagggatgtgtggggagctggcaacagaatggtcacatgcagctggctgccctggaccaggccaggggacctggggtggtgagatgctagctcttccactagagcccttcctttctcgggtctgtggagttgcttgctggaaatgcctcacttcaggtgctgatttggcacacgtggaagggggagggtgggcccttgtccctaggctccctaaagactggcccagggaaacagttgagggagatgtttgccaccatctgcccttcagcaaggaacctgctctctgccccagaggaggacatgcctgcaagtgcaccaaaggcctactttattgctaggtgagtgcagtcacctcac

SEQ ID NO: 14731 - DNA, 1024 bp, Homo sapiens
cagtctcagctcactgcaacctccgcctcccaggttcaagcgattttcttgcctcagcctcccgagtagctgggactacaggcgcaagccaccacacccagctaatttttgtatttttagtagggacagggtttcaccacgttggccaggctggtctcaaactcctgacctcaggcgatccacccacctcagcctcccaaggtgctgggattacagtcctgagccaccacgcccggcccctatcctcaaatatttcttaaaataattttgaatagctatgtggaagactttcacaatccctttattgatgaaccttataatactggaaaatgtgcccataatttaaatagcaatgtgatgaacattcttacacataaatctgtgcctataattctgatcttaccttgaagtacacttatagaactattacgtcttaagaccaacagtaaaaaattaactttttacaatatttctacatccatcagtgtatttgattctcactaaagaactgtgaaggaatgaacagggttttgtttcagtgattgttttctgttttgatgagatgtgccaagtatactaaactttttaaaggaacaaattttacaaatagggctcatgtcggccgggcgtggtggctcacacctgtaatcccagcactttgggaggctgaggcaggcggatcatgcggtcaggagttcgagaccagcctgaccaacaaggtgaaaccccatttctactaaaaatgcaaaaaaaaaaaaaaaaattagccaggcgtggtggcacgtgcctgtaatcccagctactcaggaggctgaggcaggagaatcacttgaatctgggaggcggaggttgcagtgagccaaaattgagccagttcactccagccggggtgacagagtgagactctgtctaaacaaaacaaaacaaaacaaaacacaaaaaaagacaaatagggctcatgtcaactggcatgtttggtgagggaatcaaactgataacaggtgggctagcccgagccgcttca

SEQ ID NO: 14732 - DNA, 1040 bp, Homo sapiens
gtaatttcaaaaattatttggtatatgacctagaagtaaatgctggccattttttagttttgttttgcctttagacattttaagtctgttaatcatcttcactaaagattttgaaatgtaaagaaattaaattcctgtttctgatattttagggtaatacctgcctggagaatggatctttcttactgaactttacaggctgtgcagtgtgcagtaagcgggattttatgctgatcacaaacaaatccttgaaagaagaagatggagaagaaatagttacctatgatcgtaagtagactttattttttaacctgagtgtgttagcaggtgtcagcttttggaagtcgatatgttacacaaaatattctgaggcctatttcaatattgtattgcgcacataattactagttaggtctttaagaggaaaatgtcattaacacctcatttatctgggatatcaaatagtctatgtaaatgacttttgcagataactaaagcttacgattcaggaactgaattttttttgtttatcaaattatttttcacggacatatttttaaaagctttatgctgccttaacaagatatactttttattattgttattattgtgaccttagggtcatccatgtgagttttcacttttctgctacagtataataccatgatatcctccaacagctattaaagtgtttagggctgcttgtccctatactaaatgacttcaggaatgcagtgtttttttcagtcttgtttctgctcagaatgtctagctttttttttcttctccaatctcactgtcagtctgttgttccttacttttgctgctaaataataagctgccttcctatccttcttctcgtcctcaatactgggaaaccaaataaactatgtataaaaaaatcaattctgaggttagcactaaggatttctgtaagttaagtatatgtatacttcagtgcccaatattgtgagaagtatttaactgttcacattccctttttgcttgtctcctggttcttgggtaccttctaaacacat

SEQ ID NO: 14733 - DNA, 1044 bp, Homo sapiens
gcactagggaaggtagagaagggaagacaatgtttgccgcttccgtggtcactctactgctgttgcctttgcttctggagctgcttctaccagcactgcctctctccctcccacatcactgccagggtctgagtgagacctacccccaaggactcatccaggcagccacaccggtggtttgaaataatctttattttgtaaacatctgtgtttaaaatagatgaaccctgctcacaattcatatatggacccgagacacagtacacgaagttcacccgtcacagggagatagtggaggctcaggagcaggtggcgtgcctggggctggatggagtctcaagacagcaggtgcagaggtggtgacgagtaaacaggccagcagagcctggttaacagtctgggcctcaagacatgccccaggccaccaaaagtttagggtgagcgtagctgcaccctaaaatcccaattctccttctgctcccataccttttcccagtcatggcccttgtggatagggcctatcagtctatagaatcctgattccatgttttcccttccagaacccctagggtacagtacaaatatagtccttctttcctgagggggctaggagagaaagacaatgaatggcaccctgcctgatcttcagggaaagctgaaatactggtccacagattggagccactgcccaatataacttctcaagtccctggctgaagacagacttgagggctggcatcacctacttccctagccccagtgtgatgtggcataggtcttgatacccaaggagtcccatcttcaaggaagcaactccagcctagtcacagcttcatcctagagttagctgtctccttttctcattagccagtgatttacaacttcctgctctcctttgctttccaccatctaagctataccctgtccctaagtcctgagccaccctctcctgctgttttcctggtttggtaagtcaggaggaaaggtttgatggttctttccccacttctttttggaggagtaaggaagtgaggttcttatcct

SEQ ID NO: 14734 - DNA, 1022 bp, Homo sapiens
gagcgggtctggggtgtggggagaatcgctttaacccaggaggcagaggctgcagtgagctgagatcatgccactgcactccagtctgggcgacagggtgagacttcatctcaaaaaaaaaaaaaaagaaaagaaaggaaaagaaaacgaaatgcaaatatgcaaattcttgggccttacctcagacctatagaatcaggccctctaggtatggggtcccgcaatcagtttcaataagctctcacagtgattctcacacatgcgtaagtttgagaacgacattaggacaaaagttttgcacctgaagtgtcaagagagcgagagcacaagagttctctgtttctcaaggtgtgctttgcagagcttcggctttagaatcacctggggtgacttaaaacaaagacaaaaacaatgaccttgacgtgcctagacctactgaatcataatttgagggtgaggcccagaaatctgtatttttaacagcactgtgggtgatattagatagaagtagtttcaagagctatatatgtcatggaagaaacatccattggcctggagtcagaaagacctggtccaagtcctggttctggcacttactgtgtaacttcaggcaagtctcaacttctcctagcttcaatttttttttttttttgggatggagtctcactctgttgccagggatggagtgtagtggagcaatcatagctcactgcagcctcgatcctccaggactcaagcaatcctcccagctcagcctctgggtaggtagctgggactgcaagtgtgcaccaccatgcccagctaattttttttttttttgtagagatgaggtctccctgtattgcctagactagtcttgaactcctgggctccagcgatcctcccgcctcagcttcccacagtgctgggattataggcatgagcctccgcaccaggccgattttcttaagtgtagaaggagaatactgcttccctcctaagggctgtgctgggataaattaaacgatgtatgtgaagcactg

SEQ ID NO: 14735 - DNA, 1179 bp, Homo sapiens
gtgtagaagatagtaagaaactaggttatgtagctaaccgaggtgtcatacaaaatcgaggggaaatacaaaagattttgagctttggtctgaaaagaggtacacttctgaatgccttttatgttaaaagatagacaaagttaaagaattttatattcacaaagcaagttatatgagcgctaacttattgtaagttgaactatgaagcaaattaaaccactgagtgttactgagtttgggtataatttgcaaaatgaaaacccattttttgttgacatttggaaagtgcttacagaataagtcagtgtacaaaataagtgaatttgcatgttatgactggctacataaagaaaagttaaaggtatttaaaaaattatataataatgctaactgaagcttgagtagggctgaatttcatatatttttattttgtttcaggttgctgcttttgctcagaggacatccatgaccctaatggtctttttgttcaagataaagtgattttttgcctttgttgattaactggacaaattcaggttagtgtattttgtggacagcacttccctgttctaattatatgttaatattttgagaaatagataattttgtggttaaagctacatgttatgtaccagtaaagcagaaaggccaagtcagtctaaactctgttgaattgtgtattagttaagaaacattttcttactgcctactatatacaatattcactgcataaattgaaaaaaatttacttccttttaaatagttttgtactttaaattatggggctggataaaacaagttgtggttgaatgcggtacactgaacttttggcatcgttgtgtggcatatttggtgctaaaaataagcaactcatcttaaacatttctgacatttttagtagctggcttttaaaggtattcttgtccagatttcagtcctacattaacatttttatttatttttagtgttcattctattaattttgacaaatatatatcaccacaattaaaacattctctaaaccttccaaatttgctcgtgttgcctatttgtagttaacctctccttatacctcaatccctagcaatcactgatctgctttctatccctgtaatttgccttttccaatgttatttaattggaatcatctaagatgtagtttttaaatcctggctttca

SEQ ID NO: 14736 - DNA, 1020 bp, Homo sapiens
tttagtaattaccaaagaaataataaaccaatattaaagttcagttacaaaattaaagtcaggactcacaaacaaatcatgttaaatgagttatgaattaaattagtgttattgttgagtttaactgtgtgtcaaatcaatataatttctttgacataatcacagaatagaaatcaatgtatgtgtggtacattgtattgaagggttacaaagtgatgaactagtgagtatgtatttttaaggatgttatagacctatgaatttcaattatatttgtttaaatgtgaatcacttttataagcagcagcaaaatatcattgcctttgtattttgtagcaggtgatttagcttttgtgtatattcagataaatataaattttaatttattttattttgactaaagtttaagagataatttagcatattgtttgctaatcacttttaagtaatctcagtttagctggttgtggtaatgtgtgcctgtagtcccaactactctggaggctgaggtgggaggatcccttgagcctaggaatttgaggatgttgtgtgctattgttgtgcttgtgaataaccacagcatggtactctagcctaggcaacatagcaagaccttgtctcttataaaaagaaaaggaaaaaaaaaagaaatttcagttaataattttatttgacatgttacagctccttatttgaccctgaaaatgttgcagtgagaatagcctttgcatgcatagtccttaaccctgaagaaaaggataaaagaaaataaaatcaaaacttagttgaaaatcaggaagtgcggacaagcttctgtcgagaaaatggaggtgaatttatgtgtaaatgttaaagacatatggatatgttgattatagccatctttaagtgtttgtgttataggcagacggtttgcagagttagagtaaatggattaaagatattgctaaaattaaaataactttatttttcaagtttttttggtattatgtttgttttttcaggaaaccagatacttaa

SEQ ID NO: 14737 - DNA, 1030 bp, Homo sapiens
ggcatattccagaaactggcagaaggctgatctacttggtttctaagcaagggaaagataataactaatatttatagattgttttactgtgtacaaatcacttttatgcatattatcataatcttcacaattatgtgagtttctacgattatgactcctactttatagcagggtaaactgtccatatgtgattgatttgaaatggttgctctttctaatattaacacatcatggtgccaatcaagtatatattatttatgtgcacacacacacacaattggagaaaatggtgatatatatacacatttcatttgaatttactagtattaccatttttcagcagtattaatttatttagggctgaaggtacagatggcaagtccagatttctagacccatttgagtagttaattgtatcagtaaacacagcctggtgtgttattgtgtgtaattgttaaggtgagtgagatattcttgataagaaccttataaatgtgattatgtgtttgtactttataactaggaagattaatttctaagatattggctgatttcagtgaattagtattttgtattcatgtatttatgatgctggcattttaaattcatatgtatatactatgacactactgataagaaatatgaagtatgatagatgagtataagtaatgaatgaaaatcaaattttataatcttggtaggatttatatgaaaattttcttttctctgtcctgctctgccctcttttcctccctgtcttaccctcttcttctctcttttcatcctctcctcttccttcccctcctctcctctttcttcccctccctttcccccacctctctttttcgttgtcttcatttcagtttagttggttttaccaaatgcttttacataaagtaaaagtttatttcagctagcattaaaggacccttttaatttataatactatttttacttgttcctttctacttctttcttacattaataaacacattatttgtaaattacccttttcccgtatagggagcaa

SEQ ID NO: 14738 - DNA, 1021 bp, Homo sapiens
ttagaattatagaaaattagcaaagagagtacagtcactgtatactctttgcccatgttcccctaatgttaacatcttacgtagccatggtacattcatctaaactaataaattaacagtagtgaaatactctaaactacagactacatttggatttcagcagtttttccatggtgtccctgccctgttccaagattcaattcaggataccacagtatatttagtcattatgtctccttagacttctctaatctatggcaatttctcagttgtttgtttttatgactttaatagttcaatacttttgaagagtactggttaggtattttgttgaatgtccccagatgaggatttgtctgatattttcttttattattagactggattcatggttttagaggatgagtactacagaattgatgggtccttttttagtatcatttagaatagtttcatcatataagttactcttgaagggactttataatcatcccctccttgtactttcaactcttgggaaccactgaactatttttcaacctatagtttttccctttctgtaatgtcatgtaaatgaagcacacaatatgtagtctttggttttgtcttccttcacttagcaacatacatttaagattcattttgttgagtaaatcaatggcttatttctttttattactaactagtattcctttgttttctatgtatcatgtttgttaatctgttcacctgttgaaggccatcttgattttttttttgcagttttttgtctgttatgaataaagctgctgcaaacatttgagattaattttttgtggaaaaatatgctttcatttttcttgggtggattaactttgaaacctcaaactaaaacttcttaaagaacccataggagaaaatatatgggactttgggtttagcattgaatttatagacatagtaccaaaaccacagtctataaaagaaaagaagtcagtatattgtattatatttaaaaaatttaaaaattttgctgtgtgca

SEQ ID NO: 14739 - DNA, 1019 bp, Homo sapiens
caatttgcctgtcacctgcagagttaagtggtataatggcagctgaacaatgagggaggagagtggagttgagaactggtagaaatgaaatcactcatacagggaacatgttttttcttgagataatgaacatatagcccaaaatatgtggttgagtacattttgtttttgattgattgttcaaagatataatttttaagtcttcatatataagttaatgtataattatgcaagaaggaaaagaaagtgatgatggcactttgaggactttcaggcttagagctaattagtctgttatctggtagagcactaatgtacatggctgatttaatatacagattaacagatttaaagcttttaccctttacttgttattaggcagttaggttatcttccaacttgttggccagtcaacaccaatgtgtttcctccaagaatctcagtatatgctattttatataccttaaataatttaaatacatttcttactctttccacagcatgtagagcgcatgaagtacaggacaataaagcttcctacacatatcaccaggaggatctctttgaaagattcactgcaggactaccagagagaataatttgtctgaagcatcatgtgttgaaacaacagaagtctattcacctgtgcactaactagaaacagagttacaatgttttcaattctttgagctccaggactccagggaagtgagttgaaaatctgaaaatgcggccatggactggttcctggcgttggattatgctcattctttttgcctgggggaccttgctgttttatataggtggtcacttggtacgagataatgaccatcctgatcactctagccgagaactgtccaagattctggcaaagcttgaacgcttaaaacaacagaatgaagacttgaggcgaatggccgaatctctccggtaggtcctaaaatactgaatgaagaatgatgaaatattgtactttgtttttaggtgtagggcttcattccgctaggaaaaatagttaa

SEQ ID NO: 14740 - DNA, 1035 bp, Homo sapiens
ttcagccccatccccagctgtcctaagtatttttagtaagtgttggtggttctttaaaattcaacctaagcgtgtcttcttctgagaatcctttcttgacctcattcatctgaattaggtgccctttctatatgttcacccagcagccatggcctgctcctgtcattgtactctccacagtttgataacttttagtgcatttgtcttttagctgaatcttaagtgagtattttgatggaatggattatatcttattcatccttgtatcatagtgtttagaatctggcgtctttaataaagtgaattaaatgctcattgaatgaatgaatgaatgaatgagcccagttgatttggggaacattgtacctgattaaaaaatcattctttgtattctcaggagataacggtcatcttagacatgctgatctatgcctgttatatctttgatcccacttattacttagtccagtacctctggcatagtgaatgctgcatgaatggattggaattaagggctgtattttatataaatcataaacattttcttctgtagatttaattattttataattaaaacttaacatctttagatgccatctttttttagaaaaagattttattgatctgccttttaccactttgatcaaagtacaccttttgggtttcatggttttatttctttttcttttgtttttttctttttagacaagatctcactctgttacccaggctgagtgcagtggtgtaatcactagcatgctcactgcagcctcaaccacctgggctcaagtgatcctcttggttcagcctcccaagccagctgagaccacaggcacatgccatcaggcctggcaaatttttgggtttcattacatttgactttttgttgttgttgtccagccatagaattcttgtcaatattatatagtagtttcctctgaaattttgcattttcatgtcattgtgaaaggtattagagataatattttttgtaggtcaggccacaatcacagttatcactgtgataaaataaaa

SEQ ID NO: 14741 - DNA, 1019 bp, Homo sapiens
tgtttaatatctcagctgaaaattagttgttgcctttctcttaaagtattgtggcatgtaaaccaagagaaatgtgcactattgaagcattgaagcaggctttttttttttttttggtgtatgtcatatataatctagtaacagcatactttacttatgtgattaacaccacaggcaagtcacatactgtaacaatttgcatgagttggttgtaactaaaaaacatgtaaactctattgcaagatacttaaaaaaaactgggaataaacaaaaggacattgcttctagatctcacctagttcttcagaaagtttcttattaactgagggattaattatgaagatttttctgcgactttgcatatgcagctgtatatacaattgtttttttgtcagcttcatttttaaaacaggcactaaatccctttggatatatatgagagctttcactttggttttgtgttataattgttcctctggtgtaaagtagttcatgaaaaaatggttgagtgcgacttgaaataaagtatatttaaattctagacaaaagaatgactagatttgagtggtgggggagaactgacctattatctattttttttccttcattcaagcataagtggcttcctatagaggaattaattgtgttctctcagagaatacctaagtggtgaggtctgcttgctagctagctagctacctacgtacctacctaccttcctatctatctgtattagatagatagatatattaaaggagctgttcaaacttcagcctttggtggaaggcaaaagaagactctaccagaggacctgatactaagcttacatttaagggattttattcttttgagtaaatagcctagttctgtctaatgatactaaaagatatttcattctgagtaggacagtttatcttctagaacatccttagaagttttcatgcatattcaatctccttttcccctttaaataatccctattgatctgcagtctgttgagttattgaaactttatttga

SEQ ID NO: 14742 - DNA, 1060 bp, Homo sapiens
ttggagtttcatttgctctttttttcttagtttcttagggtagacgctacaatatataatctgcagtaaatctcattctttatatttttcatttcagacattatagttttcatctgtagtagttcaacttgggtatctattaaaattttttctttctttctttcttttttctgagatggagtctcactctgccaccccggctggagttcaaaggcgtgatctcgactcactgcaacctctgcctcttgggttcaagcagttctcctgcctcagcctcctgagtagctgggattacagacgtctgccaccatgcctggctaatttttgtatttttcatagagacagtatttcaccatgttggccaggctggtcttgaactcctgacctcaggtgatctgcctgcctcagcctcccaaagtgctgggattacaggcgtgagccaccgcacctggcctattaaaattttaacatcttttttatatcttccctgtctctaacttttgaacatatgaaatacagtcataataactgttatttctatggtgattctaacatctgtgtcagttttgagttggttttgatagattgatttcactcttctttatgggttgtcttttcttgtttttttgcaagcctggtaacttttgtggattccagacatgaattttaccttgtttgttactagaaggtcttgtataatttacaaatattcttaaattttgttctgggatgtagttatgttattttaaaataatttgatcctattttgtcttttaataattgttaagtgggacctaagcaatgtttggtctggggcacattttcctgctattgaggccaaatccttctgagcattttacccagcatcccatgaattacggttttctagtctggctgataggatcaggaactgtttctacctaatctgtatgaatgccaggtactacttcctctaatccttttagagagttctttccccagcctgagtagttccttatgtgtgtgtgctgatgagtactctgctaattccaaaatggtacctttgcagatttctggaatt

SEQ ID NO: 14743 - DNA, 1031 bp, Homo sapiens
aatgttgacacatgaaacaaatgtctaaagtgcttcacaaatggaactgttgttccaaagcatcgttcaaagttgttccactattaatttaggatgaatagtctaaatggtggctaagatttttaatttttaattgaattaatagtttcactttattcaaaaggggctattatcacgtattctctgttaatcatgtgtacttctaatggctttctgtgatagtaaataagactttcctgtgggctgccattgcatttttgctaaataatttagcatctagttaagaatcaggaataaaagagtactaagactgtgtcacaagcaaatcacagttgttgagggcatatttcaccatctcttaagtgattccttctcattgatcaatcccccttcttcagggtgttatatggaactcaatattggatcatttttataattgattatcaataccacgtgttactgttacccacatctaatggctccttcctcttggtagtagaattattagtaggtactcttcagacacagtgtaaaagctcagaaacaactctctgaggacctctagcattaaaaaaaaaaaatagcggctaccacatgtattactattttgtgtgtattttttaaagagctttagagaaggtcttttgatactttgtctcagagatgtcaaaataattttcctaggacacaaaattagtaggagatagaaccaaaattgagaaattggtatgtctggctcccaaagctctctcctctgattcagactttctgatttttggatatttacattgaggagaggacacattattgtgctctggacctcctactttgatatttgttagtgtagtaattagaagcctggactttaaaattcattgcttgggtttgatttcctactctgacatttctgaggtttgtgactttgagcaaattatttaacctctcagtgcctgccatttcttacctagtttgtaagattattgtgagattaaatgaaataatgtaaagcacttagaataggtgtacctatt

SEQ ID NO: 14744 - DNA, 1038 bp, Homo sapiens
aaatacatgtttaggtagatgaccgtttggtatatccacttatctaaactgaacagttaccttctctccatgcctcatttccaaaaggttttagtcaaagagttttatttgacatccttaaggtttatgtggaggcaaccttgaaataaaagtaattcaattaaagtatttgctatttgctagatacctatgctgtactacatgaagacagacacagtctctttcgtgtaaagggcagtcaagggggaaagatagacaactgaataagcaattaaaatatgttgtgctaatgtggtggtatggttaagactaccctgaagcaaatatctaatgcatatttggggttcttttggaagaaatgatttttaagctgagacctaaattatgagtaggagtcaaccaggtagggacatggtggaagaattttctgtcagtgggcacaacatgtaaaaagacaggcaagagaacatggagtcactgggggaactagtagtaattcattgtaaagcttgaatactgagagactagctaatgtttccttttaaaaacaagcatcacttacaggatttccattttgatggttgtgtattcttgttcttcactaaaactgacaggttttaattcgagagtcaaagctgtttttttgattttggtttagagagtagacagagttataagaaattgatttcagatgacttttttgttatctcataactattaaactgtttattcaaatatctcactcaggtcagaaggaaaatctttagcaagtagaacacaaatgaaattatactttcagtctttcctttgatactaatattttaacctttacaaaactactaagatgtctgttggaatcatctaaatattctaaccaagttgtatccttaataaggattgacgtcaggtagactaatttataaactgatattaagcaataatgtgattaagaatatatagatataatatacatattaggctatagatatgcatatgttaagtctttttacagtagtattttcagtctttgataattgt

SEQ ID NO: 14745 - DNA, 1046 bp, Homo sapiens
gtctatttttgcttttgctgcctgtgcttttagagttctttccaagaaattgttgcccacaccactgtcatgaagcttttcccgttttcttcctatagttgtatagtttcagatcttaaagtcttataaccattttgagttgatttttatatatagtataaaagttcagtttcattcctctgcatatccagttttcccaatactgtttattgaagagatgagcctttttgcattgtgtgttggcacctttgtcaaaactcaattgaccataaatacttgggtttatttctgggctttcagttctgttccattggtcgatatgtctgtttttatgccagtaccatcctgttttgattacagtagctttatattttcaaatcaagtgggtctggtgcctccagctttgttctttttgctcaagattgccttgactatttgggttttttagtgaattcatacatatgttaggattgttttttctatttctgtgaaaaatgacattggaattttgatagggattgtattgaatctgtagattgctttggatagtgatacggttatgctttacatccccacccaaatctcatcttgaattgtaattcccataatccccacatgtcaagagacctggtggatgtaattgaatcatgggggtggtttcccccatgctgttctaatgatagtgagttatcacaagacctgatggttttatcaggggctcttccctcttcacttggcacttctccttcctgctaccttgtgtagaaggtgccttactttcccttcgccttcttccaggattataggtttcctgacgcctccccagccatgctgaactgtgagtcaattaaaccttttttctttataaattaccgaatctcaggcagttctttatagcagtatgaaaatggactaatacagataatgtggacattttaataatattagttcttccaatccatgaacatggtacatctttttttacttatttgtctttttaatatcttttgtcaatattttataagttttcagtgtatggattttca

SEQ ID NO: 14746 - DNA, 1028 bp, Homo sapiens
tttacccaagactgtctttggtcttatgctatatctttctggtgttacaatatgaacatggagaataagatttacaagagaaaatatatatagcagtttcaagcatatgcagactgcctgggttccaacctgaatttaccacttattagtataaccttgagcaatgccttaacttccctttgacatttgtaaaacaaacataatgatagaattttatggggatgctgaaaggaatctaattacattagataatgtctaaaaacaatgtctgacagttagcaaaagctcagtaaatattagcctctgtcattgttattgtagtttgctattattggagctgctttaattatttagtttcttcttttcctgagtcccacttaattttgcttgccttctatgagcctttggctgaatttgaaattcaaaagttccaaatctttttgatccctattttattatagtctcggtattctaccaatgatctcaattgtaaaatgacattgccaatataatcgttgttgaactaataaatctgaaagcaaggtttctattattttggttctatatctagttgaaattctatcactaaaatttgcataaatcacttaatctccttgtgttttagttgcctatctgcaaaattaaaaatattggggcaaatgtagtttcatttgcaaattatatatagcatttgagaattgcccctcaagttttctgaaattcagattctctaagttgaggtgatgattaacctagtcagattttatttgataagagttaagaataggcatctccatttgtattagtctgttttcgcattgctaaaaagaaatacctgagactgggcaatttataaagaaaagaggtttaactggctcatggttctgcaggctatacaggaagcatgatgctggggaggtctcaggcaacttacaatcatggcagaaggcaaacggggagccagcacttcacatgactggagcaggaggaagagaattgggaggtgccacatatttttaaacaatcag

SEQ ID NO: 14747 - DNA, 1011 bp, Homo sapiens
cctggagatatcattggtgtggctggaaatcattgggatggctattctaaaggtgtcaacaggaaattgggaaggacgggcctatatccctcctacaaagttcgagagaagatagaaacggtcaagtaccccacatatcctgaggctgagaaataaagctcagatggaagagataaacgaccaaactcagttcgaccaaactcagttcaaaccatttcagccaaactgtagatgaagagggctctgatctaacaaaataaggttatatgagtagatactctcagcaccaagagcagctgggaactgacataggcttcaattggtggaattcctctttaacaagggctgcaatgccctcatacccatgcacagtacaataatgtactcacatataacatgcaaacaggttgttttctactttgcccctttcagtatgtccccataagacaaacactgccatattgtgtaatttaagtgacacagacattttgtgtgagacttaaaacatggtgcctatatctgagagacctgtgtgaactattgagaagatcggaacagctccttactctgaggaagttgattcttatttgatggtggtattgtgaccactgaattcactccagtcaacagattcagaatgagaatggacgtttggtttttttttgtttttgtttttgttttttcctttataaggttgtctgtttttttttttttaaataattgcatcagttcattgacctcatcattaataagtgaagaatacatcagaaaataaaatattcactctccattagaaaattttgtaaaacaatgccatgaacaaattctttagtactcaatgtttctggacattctctttgataacaaaaaataaattttaaaaaggaattttgtaaagtttctagaattttatatcattggatgatatgttgatcagccttatgtggaagaactgtgataaaaagaggagctttttagtttttcagcttatttactttgttttttttcctg

SEQ ID NO: 14748 - DNA, 1026 bp, Homo sapiens
atcagtaagagatactggaacaaatataagactaggtactagagattagttaaaagactaattgtaaatgagaacatcaaaatattacagtaacaggtagggagtatttcagttattcataaatgaagtcattcaaagtattaaaaaaacaagcttgagccaagcagatgctactgtcataactctgcaattgtttaagcatttacttttttacattcttgaaacctgttctggtatattatgtgtcaatattattttctgaaaagcccatttattgataaggatatatacatattatatctgttttgagaatagatgtcattaagtaggcaaattactattaaatcctactaagtggaactgtatgttctgcctaacttagctgtttttttaatatgtgtttttaatattgatctatatgacttgaaaggaatcctatttcttgaaatagattgttattttgtgaattttttgttgaaagcaatgtattagagaattaaatgtttaggcaaagtaggaaaatgttaaattaatttctaatgaatatacttagtactattatcattggtcaaagacttgaaaaagtattagttgctatacaataagaattttaactatattaaaaacacatgtgacaatttgacttcaaagtgaatatacttaatactatcatcactggccaaggacttgaaaaagtattagttgctatacaataagagttttaaatacattaaaaacacatacaactatttgacttcaagcaggcatatagtggaaagtcaatagtatgtttttagggaggaagtgacgaataagagtctatttttaatcttgctagtgatagattcctggctaagttgaacagggtgtttttaaaaacaatcagtaaaatagataaaatctattactctgtttctgtaaataggattgaagaataatgaagcatatttggaatttgaaaggtattaaaaaaagatcctgaaaaagaaagtagtgaaaccacaaaggatttcttccttcacatct

SEQ ID NO: 14749 - DNA, 1045 bp, Homo sapiens
agtgtgcactggcttctccttttcatttcccaggcaaataatgatggtgatcaccttttaatattaatttttgacatattttaaagttattctgtctttgtcttatggatttataggaattccttatgtattctgaatatgagacctttgcatggcaaatttcttctcccagtctgaggctagtcatttcactctcttaatagtgtattataataaataaaagttttcaattctaatgaaccttaacttatcaagtttgctttttatggtttagttggtttgttaatgttttgtttaagaaatctttgcctattacaggatcatgaaaatattctccaaagttttctttttgaaattgtattactttcttttttactcaaagctctatgatgcatttcaaattatcttataatgaatgatgtgaggtaaaaaccaggaatttttaaaataaaacataggatattcaattgatttggccccattttttgaaaaaaaaattgcccttaaaccattggattatagaacacttttgatataaatcaggtgagtcttactagagtgtatatgctcttccactggtctatttatgtacaaatactaccctgtcttaattactgtagctctatactaaatcttggtatctggtggtataagttccttcaattttatttcttcttcaacatttttttttgtggtgggtatactctatcctttgtgtttccatatacatttagaatcatatttcagtgaaaacaaaactgttaatattatgattgggattgcattgaggctatagatcaatgtggggagaattggcatcttaacaatatagagtcttctagtccatgaacatggattatctatccatttacttgggtctttaagttctttcagcagtattttttggtttacaatgtagaggtttcgcatatcatttgttagcgttatggctagctattttaatgttttgaaagtgctattgtaaatggtattcgttatttaaatttcattttgaattgtttaatacatagaattacagttgtat

SEQ ID NO: 14750 - DNA, 1056 bp, Homo sapiens
gtcaaattttttgcttttgttgagataaatcatatggttgtatccttaattctgtgatgtggtgaattacattgattgatttttaaatgttaaaccaactttatactcctaggataaacgttactttgtcataatgtattgtcccttttatgtaccattagattcaatttgttaatattctctttagaatttttacatctattcatgaaagatattggcctgtaatagtcctttattataatatttttgtcagattttgttatcaatgtttgttagccttgtaaaaagaattgggaagtctctctctgttttatttcaaagtgtttgtgatagattgatacgtttcatgtgtacttgaattgggaagtctctctcttttttattctctgaaagcatttgtgattgatagattcatacacttcatgtgtacttgaatgttgattctgcagtctttggtgttaatgttctttgtcagtaaggtcatattggttaatcaagttgttcaaatcttcaaatgactgatttcttttttcctgttctctcagttttgagagtagtgtcttaaaattataaactatgactgtagttttgttgacttttagttctttcagttttcccctcatgtagttggaagctcttactaggtgaattaaaacttggcattgttattttacggttgaaatgacctttttgtcattatgaaatgaccttctttatctctggtaatatttcttgccttcaagtctacttttaccttctattaatatagtcactctttcttttcatcaatacttccatggtatgattttttcttctttttagttcagccaatctatattcttgtatttacagtatatctcttggaaatgtcatatagtcaggtcatgtttgttttatctagtttgacaatctttgtgctttagttgtaataggtattctatttacatttaatgtggttactagtatagttgggcataaatcttttatcttactgtttcttttctatttgtcccatccatactttgggtgtttaaatttctttcctgcctgtattat

SEQ ID NO: 14751 - DNA, 1086 bp, Homo sapiens
gtgagccatcaagcctggctaatttttgtaattttaatagatacagggtttctccatgttggtcaggctggtcttgaattcctggcttcaagcgatccacccaccttggcctcccaaagtcctgggattgcaggtgtgagccgctgcacccagcctgaaatatctttaacacaagtttgggtctgatccatggcatgttagtgtcatcactttttcattctctgagagaaagataagaaaaatggaattctaagattttgtaaaggatatgtgtttttaagggagaaggtactagaaataataaaagtcaagaaccaaaagttcttaggtcaattattttgacctaaatatatttcacaatagaggttcaagtgggttaactagactccctgttagaacaaaaatacctatgaagaaggttaagtttatatagtcatttatttgtataaatatttttctattcagagcaattcttagtggttcagatttttatgaaggagatcgatctgcagagaaatgtgaaagtgattttgtacaaatggtgggatatggcaagattcagtatcatttggaagtttggacactgacaggctctgagcattggacactgagggagagggaggtacacgaggcctggtaaaatagtttaacttttagttttgcattaggttcatccttttggaggttagtatgccgatgaaaaacaaattcacagagcagcttggtgctgtcagtaccatggacagaatgatgtgaatgagacacatctggatttagattctgttccatttgtgtcattcatatgctttgtgatttgggcaacttaattaagtcttgtttatgacacagatgataattaacgtattgatcttagcatcttttaagtgttcctttgttccttgagtcatcactttctcttctgtccaacttaaattttatagtattttgttatctatgatttgcattctcaacttccttgcatataccctcagctttcttgtctcactctcacttaagtccagcttaaatccagccatttttaaactttaagttagtatctgttagtgtctaaattagcagctatat

SEQ ID NO: 14752 - DNA, 1028 bp, Homo sapiens
gctgtacaggaagcatagctggtgaggcttcaggaaaatttcagtcatggcggaagatgaaggggaagcaggcatgtcttacatggccagagcaggaggaagagaaagaaggaggaggtgctacacagttttaaacaaccagatctcgtgagaactcactaagtatcactagaacagcaagggggaatccatctccatgattcaatcacctcccaccaggccactcttccaacattggggattacaattctgcatgaaatttgggcagggatacaaatcaaaaccgtatcagcaccccttcatgccccaaagagaaaccaacctttatctttgaaaccttgtcactgaagctcccagcctggttaagagggacttctgattctataatctaaaaatcatgaagtcatcttagacacctccctttcatttttccccacatctacttactcattaatgtctggctccctagtatgcctggaaatctgtttactttcctggtttttattctgtataatcactatcatgagcaaaataagaacagtcccatctcatcagaaagttatttcatacctgacactttctacttcactgttcccatctcattttctaactcatcctgcttccagcttctaatttccaatgtaagaccttacaactaaataactgcatttactcactcccctagtgtgatttttaaatcacattttaaacttttatatacgttataagccctactttacagtgttttattttgctttaaacagttatttgatttttaagtgaattatgagaaaggaaacagtttttgtgtttaccaatttatttaccatttctgaagctcttttttcctttctgtaagtctacatatccatttgatagaatttgtctttggtctgaagaacactcttcagcatttcttacaatgtagattgactggcaagcattctctcagcttttgtttagctaaaaatgtctttattccaccctcatttctgaaggatatttattattgatgaatataaaattct

SEQ ID NO: 14753 - DNA, 1171 bp, Homo sapiens
gatttaattgactcacagttgcacatggctagggaggcctcaggaaacttataatcgtggcggaaggcaaaggggtagcaaggaccttcttcacatggtggcaggagagagtggaatgagagcacaggaaaaactatcatttataaaaccatcagatctcataagaattcattcgctatcacaagtacagcatggaggaaccaccctcataatccaatcacttcccaacagtttcctcccttaatacccggggattacaattcaagatgagacttggatacaaagctaaaccatatcagctgtcaattatatagtcagggaatcatagacttttagtacttgtacaaactttagaaatgatcctctaacaagctcattttcatactgataaaatgtgtgtgctaggatttcatacatgctgggttgaatgggtaggtgataggtacctccaatgtggactgttaggccaagaatgttacattatgaagggcattttaaattaggatgtgaagcaaatgcttgaagtagaagccttcatatattctagtacccaaagatactatgacagttgccatgaaggaaccttataaagctctcagccaatatatggcagataatattaatgtatagcttcagaatattggaactaaagtagattcataatttgcaggataaacaggtcaccagtttaaaaacagaaaaaaatccccacaaaaaaaacaaaagaagcgtaagtacttaacgtttattgtgtcacagaaatctgtagcagattctgaacatatggtaggttacatagatggtatattatgcatatggtatatatataacatacatatttacttatggacacatatttgcctaaattgcattaagttctataatattactgagtaataattttcctccttttctgtattgatacagcatctgtaaatgcttatcaataggcaaatgaagtgaatattttgcagatgtctacagtttatcactgtctccctcacatctatcacaatgtgtggcgtatggtaggtgcttaataaatatttgttgaatgagttaatgaatgtgtcctatgattgcccccccgcaacccacgctgccttttgaaagactcattgctttgaaagaatatgtagaaagatggatttcatttttatactgatggtac

SEQ ID NO: 14754 - DNA, 1585 bp, Homo sapiens
ggtcttaaatgtacttaccacagaaaataagtttgtgaggtgatggatacattaattagcttgatttaatcatttttacaatatatacatatatcaaaacatcacattgtgcattataagtatatccaatttttatttgtcaattgtaccttaacaaaatttggggtgggggaaacagataagagaaaatgaaacaaatttattaacatgtggattgcttatacacaggagagtactcaatgattagtaactcaaagcgtttgttggaatttgggcttacgtatccttttaaccaaagaataattttgtagagggaagacaggacgaaggaaagggactttgagctactaagaacagcaaattgtaggataataaatatacgcgggaaatcaatggaagataagggatagtatggtttgctcagtagattcttctagtgctgtcttttggctgataaggttctggaattgtctttggtgataaagtatcaactaagaatcgaatagtcctgccctttctagtagagaggaggagggcagaggattttgtgtctgtgtgtgtgtgtgtttgtgtgtgtgtgtgcgcaaacttgccttttcttaattgacgttagctcaaaataatccttatgcgaaagtggcgtattttggggtggcatactctgaattccttgatgtgtaagatatattcacaggttctagagattaggacatcgacagctttcgtggggagatattctgcctacaaactatgcatttaaaattcattttctcctttaagggattttattggtataaatatataatctatgaagaacttatgaaataagttttaatgctctagacctctcaaataataacttttaattattagactaataaacgtagtttcttgaatgctagaaatatgattttcaaaaataatatggggtgtaacatctaatgtgactaacttttcacaatgtattaagatgtaatttaagcttcgtatcacatgtgtaggggttgctacatggtgggtttactatatatgtacctgattcttttttgataggtctactggtccaaaggcaagaatgaagagttctttctgtattatttttgaatactagatttcatcttaatgacttcactccttttccttttagctctctaaatttttcttgtggggctggttttatgctcatttgagcattcacatgttcattcagccagagcttaatttaggaccaatcctttctctaaaggaaatgtaagcaatcctaagctagtaactaagctggttgttatagtctcattttacattccaattctaatgtctttctttatttcttatgaccaaacctttttctagtagttcattttcagtatcccgtctgatttactaccatatctttgtgtagaaaaaactgctgctaaaacttaggcctcatggctggttttttatttttattttttttcttggccaacttaatcttgctaattctgattgcttgcatttccattcactggatgcttatcattctcttaagtgatggtaatttctagtctggcttttcttgcttactgacaaaaccttggttctg

SEQ ID NO: 14755 - DNA, 1639 bp, Homo sapiens
tgtctatgtgcctgtttttgtgccagtaccatgctgttttgattactgtaggcttgttggagattttcaaatcaggcaatatgatgcatctagctttgtgctttttgctcaagattgttttcctatttaaggtctttggtcgttccatgtgaattttaggatttttctaaatctgtgaaaaatgccattggaattttgacagtggttacgttgaatctgtagatcactttggatagtatggacattttaccagaatttttacaattcatgattactgggtatctctcaatttttctgtgtcttaaatttttttgtgtgcgtgtttcgtacttttcagtgtgcagatttttcaattccttggttaaatttattcctctgtgtgtgtgtgtgtgtgtgtgtgtatacgtctgtttttgtagctatggtaaatggtattgttttttgatttttttcagatattttgttgttagtgtatagaaatgctactgatatttgtacgtggttttggatcttaaaactttactgaatctttggttagttttaacttttttttttgtagagtttagggttttctatacataagatgctgtcagcaaccaaagacaatataacttcttcctttccaattttgatgttttcatttccttttttgcctaatttctctaacaaagacttccattaactacgttgaatagaagtcgtgagagtgggtatgcttgtctagttcctgatcagagaagaaaagctttcaactttctactgttgtgtatgatgttagctgcacacttttcatatatggtctttattgtgttgtggtgcatccttttataacgcattgttttattttccctttgccttcttctttgacacactggttattgaataacctgttgcttaatttccacatagttgtggtttcctaccacatttcatatcattgtggttggaaataataaatgataccatttggatcttcttaaatgtattgaaacttattttgtgggctaacatattacctattatggaatgtttggtgtgcacttgaaaagaatgtggattctgctgcttttggaaggaatattctgtgtatatctgtgaggtccaatttggtccatagtgctgtttgattctgttgtttcattattgattttctcactggatgttctctttattgctgaagctgggatatagatattttctactgttattgttttgctgtctatttctccatcagtcctggtagtatttgtttacatatttaggtggtctgatgttgggtgcatataaacttacaattgttatattttcttgatgaactgaccactttctaattatataataaccttttttttttttttttttctgagacggagtctcgctctgttgcccaggctggagcacagtggtgcgatcttggctcattgcaacctctgcctcttgggttcaagtgattctcctgcctcagccttctgagtagctgggactacaggcaggcgcctgccaccacgcacggctaatttttgtatttttggtagagacggggtttcaccatgttggccaggatggtctcgatatcttgaccttgtgatccacctgcattaccctcccaaagtgctgggattacaggcgtgagccacca

SEQ ID NO: 14756 - DNA, 1764 bp, Homo sapiens
tagcccatttacatttaaggttagtattgttatgtgtgaatttgatcctgtcattatgatgttagctggttattttgctcgttagttgatgcagtttcttcctagccttgatggtctttacagtttggcatgtgtttgcagtgggtggtaccagttgttcctttccatatttagtgcttccttcaggagctcttgtagggcaggcttggtggtgacaacatatctcagcatttgcttatctgtaaaggattttatttctccttcacttatgaagcttagtttggctggatatgaaattctgggttgaaaattcttttctttaagaatattgaatattggcccccactctcttctggcttgtagagtttctgcaacgaaagcatttctaagagaagtttatagcaataaacacacagatcaaaaataagaaagatcccactaaaacagtctaatgctgaacctcaaaggactagaaaaaacaacaatataaatccctagtttatagtagcaaagaaaaaaacaaaggtcagaacagaaataagtgaaatagagactgtaaaacaataggaaagatgaacaaaacagaattgattttttcagaagataaacagttgacaaacttttaactaagaaaaatgacagaagactgaaatatataaaataaaaaatgaaagagtaggcaatacaggagataccacagaaatacagatgacaagagactactgtgaacagttatacacaaacaaattacataacctaaaacacatggatgagatcctggaaatgtacaactaccaagaatgaatcatgaagaaatagaaaagctttacataataacaagtaaggagattaagtcaataataaaaaatagctcttatgtgaaaaagttcaggacttgatggtttcacatctgaactttacaaacatttaaagaagaagtaataccaatgcttctgaaattcttccaaaaaattgaggagtagataaatctttcaaactattttaagaggcctgtatgaccctgataccatagacaaacaagtatattataagaaaaaattaccagccaatattcctgataaacagatgcagatattctcaataaaatactagcaaattaaattcagtaacacattataaggatctgttgtcatgatcaagttggatttatttctgggatgcaagtttggttcaacttatgcaaatcagtggaggtcatacactacattaacaaaaagaaggacaaaaatatggctatctgaatagatgcagaagaggcatttgacaaaatctaaaatattaagtaaagaagattatattagtccattctgacattactataaagaactgtaggagagcagccccagtgcttatagataaaactcccatctccctaggacagagcacctgggggaatgggcggctctgggtgcagcttcggcagacttaaatgttcctgcctgccagctctgaagagagcagcagatcccccagcacagcattcgagctctgctaagggatggactgcctcctcaagtgggtccctgaccctcatgcctcctgactgggagacacctcccagcaagggttgacagacacctcatacaggagagctccgggtggcatctgccaggtgcccctctgggacgaagcttccagaggaaggaacaggtagcaatctttgctgttctgcagcctccgctggtgatacctaggcaaacagggtctggagtggacctccagcaaactagagcagaccttcag

SEQ ID NO: 14757 - DNA, 1035 bp, Homo sapiens
gaacttgaaagtaagaaaacaatctgatataaaaacatgcaaaggacctatataaacatttttgaaaataagacatataattggccaacaggtttatgaaaaagtgatgaacattactgatcatcaggaaaatgcaaattataactctaatgagatactgtcttatagctgttagagtggctactttaaaaaagaccgaaggtaagtattagcaaggttatggagaaaagagaacccttgaagactgttggttgggttgtaaattagtattacagccataattgtaaacagtatggaggtatctcaaaaataagaagtagaactatcatgtcatccaacaattttactatttagtgtatgtccaaaggaaatcatatcagtatctcaaagagatgcctgtatttctgtcacggcatccttggagtgttacttttctagctgggaacctctgtggctggtattgcctttgtctgaattttgcttgggcctgcttggcttgttctgcctactctgcctggcaggatacactctgctcgcactaacagcctgccaagggtgagccaggtacggagtggtgaggggtgtgtgagttagcgtgtgatctggccactgcacacagccaggcacactagttgtggtgtggtggacagctccaggtgccggcaccctgcaaggctgtggctcaatgaggcttactgcaagcagcttccatggctgccactggggtaggcagtggtgcctggaagcttggagacttcaggaactgcagagccccattgagggtgtcacagctctggcttggggagctcttaagtctgggctccctgaagtgctacagctcttctctccttcttgtcacctgcaacgtggcaagcaaggggcgtgtttcagccctgtttgtgttactgctctttcagtcgtgccgttccgcaggtcctgagttcttgtcctgtgtccaggaagaatgagttatgtggacaagtggagggtgaacaaggtgaagagatcctttattgagtgacagaacagcttaaa

SEQ ID NO: 14758 - DNA, 1072 bp, Homo sapiens
taactgataccaagacatgttgtttacccttaggagctatttctatctaaaagcgttaaaggtgttttgctcaaataactaaatttaaggtagtttgaaataagtagcataagtgtagtgctaccaagatgtagtggatattcagagggaagattattttggagaccacggaaaggctttaggtgatggtttctaaatggaggcttttagaatcaataagatttcatcaagttggcttatgaggatgtaggagatgaactatttcagaaggtactcattttttacatcaaatacgttcaatgattctagtcttttgggaataggaaagtgatggtgaaggggcaacctctttagttttcagttttcgggattcatatactcactctatgaccattttttccagtactatttaaaaatttattctgcctttgtaatactgggaactaaagcatagcaccattaattggaagtcttaaagatgaacaaggcaatgttttaatgtaaatgtatgattttcttattatggaagaagaaaaaccaataatagattgacatttgtgcaataggactgcaaatagtgggtgttttgtgggagaaaaaattgtttcccaattttttgggaaaaattcaagtaaatattaaaaattgctgaaatacaaagattttcccccatatacaatacttttgtaatatactcatcatgtttttcaatgcatctcattagccatacctcttaactgcattgtaaaaaccaaaaaattaagagggaatattttaaaccaaatattctaacttcaataggcatcatagtgattatcatttcagatttggtgtccttgtaactgggctgatttatcataggtggtggatgtgtaaacttacctgtgtatgatcttgttgagggcaagaattgtggcttttcattttttgcgtttctgataaccagcaaagttcctatcacatagaaagccctcaggaaatgttactgcctacctaaatgaatactccaaaaccctttatgactaataatttctatgtaaatattgtagattgtgttgatcagtgttcttcc

SEQ ID NO: 14759 - DNA, 1059 bp, Homo sapiens
atagatatttgtatgcatatgtatgtgtacgcattcgggtatgaatagaaatccacaaacctaactgaatagttgctttgcagacacttggttatgaaacactatccactgaccgaaatattttttctggctataattttggagtataattaaaatataaacttgtaagttcctctttttaaaaagatactttagaaaaacagattttactcttttcattagaaaaatattccaatatgtaacagtatatatactcagaaatgcatatgtctgatttaaaatgatttattctttagttttaagcctatgtatatattttaaaaataatttcttattttaggttcgggggtacatgtacagatttgttacatgggtatattgcatgatgctgaggtttgggatatagatgatcctgtcacccaggtactgagcataatatctgataggtagtttttcagcccatttccccctccctcccccctccctcctttagacaactctaaatgtctattgttctcatctttctgtccatatgtattccgttatttaggtcacgcttacaagtgagaacatacagtatttggttttctgttcctgtgttaattaggataatggcctccagccacatccatgttgctgcaaaggacacatttcagtctttttatggctgcgtagtattccatggtgtatatgtgccacatttgctttatcgactctaccatcgatgggcacctaggttgattccatatctttgcgatcgtgaatagtgatgcagtgaacatatcggtgcatatgtctttttttaggataatttatttgcctttgggtatatacccagtaatgggatggctgggtcaaacagtagtcctgttgtaagtttttgagacatctctcaactgctttccacagtggctgaactaacttgcattcccaccaagagtgtatatgtgttcccttttctccccaggcttgtcagcatttattattttttgactttttaataatcaccattctgactggtgtaagatggtatattgttgtagttttgatttgcatttc

SEQ ID NO: 14760 - DNA, 1104 bp, Homo sapiens
ggctaaactcacctagaaggatttttttctgaagacaggccaagataatcagacatctcctggggatggtggggaatgaagaatgcaattagatatccagggtgatcagttatcaatgtttttgctgtactgacttagcagagttttttgctaaaactgaattttacaagaaagtgcacagatgggcctaggagaaggcttggtcaagcaaataatcttcatcagttataaagcccttcacataataaaagcggctttaataattgtgaatttaaccttgcatagaaatttttcaaataagaaactaatatacttcaagaatatgcaggggattttttactagtaatttagttacatgtttccctctttttgttcgttagaagttacatgagggcagttatgacttctgttcactaaggttaattccattgaatacatacaaagcattattttcaaggccaaggccattggtagtggtggtaggggctggaacaaagaaatttattagataagatacccttaacactgatatacgtccattttgttttaagagcatttctgtagagacaaaaaagcatagaaaatatactcattgctatttggagtactttgtggtaaatctggaatccttgcttttgcttttatagtagttccataacaaggttatttttaaaacatcatccaaaactgaaatttcaacattaattggattggcacttctagttgtaaatcagcacttccagtcataaatcttgaggaaattggtatcagacctcatgatattctgttttcagtaggttagttttctcagcattattttgtgctaaggagaagaatctctgtgttttaaaccttttcaaagctatgtaacttgatatttgctcttttaaaatcttagccatcaaataccagctctactgcctgtgtccgtggctttccattctccctatcattgccctgttagggcatcattatcagttagagagacttgtattgcttccatactattcttcactgctagatgaaagtttctaaagtttagctcttatcctgtcattacaaacttgaatatgtagaataattccccattgactaatgtgtttt

SEQ ID NO: 14761 - DNA, 1031 bp, Homo sapiens
cagtgcctggccagggctgtcaaatcttttttttttttttgagacagagtctccctctgtcgcccaggctagagtgcaatggcacgatctcagctcactgccagctccaccccctgggttcacaccattctcctgcctcagtctcctgagtagctgggactacaggcacccgccaccatgcccagctaattttttgtattttagtagagacggggtttcaccatgttagccaggatggtctcgatctcctgaccttgtgatccaccgcctcggcctcccaaaatgctgggattacaggcgtgagccaccgcacccagccggctgtgaaatcttaaagctccaaaatgatctcctttgactccatatctcatgtccgggtcatgctgatgcaagaggtgggttctcatggtctgggcagctccacccctgtgtctctgcaggatacagcctccatcccagctgctttcattggctagtagtgactgtctgtggcttttccaggcacacagtgctgtcggtggatctgccattatggggtctggaggatggtggccctttctcacagttccactaggttggagccccagtaggaactccatgtgggtgattcaaccccacatttcttttctgcactgccctagcagaggttcttcatgagcgccccacccctgcagcaaacttctgcctggacatccaggtatttacgtacatcctgtgaaatccaggtggaggctcccaaacctcagttcttgacttctatgcacttgcaggctcaacaccacatgaaagctgccaaggcctggggcttgaaccctctgaacgcatggcctgagcttatactggcccctttcagtcatggctggagcagctgggatgcagggcaccacctttctggactgcacacaccatggggacccttggcccggcccacaaaaccatgttttcctcctaggcctttgagcctgtgatgggaggggctgccatgaagacctgtgacatgtcctggagacattttccccattgtctagggg

SEQ ID NO: 14762 - DNA, 1024 bp, Homo sapiens
gtggtaaaaatagcaagagaaatagaattagaaggagagccggaagatgtgactgaatttctgcaatctcatgataaaattttcacagatgaggagctttttcttatggataatcaaagaaaggtgttccttgaggtggaatctactcctggtgaagatgctgtgaatattattggaatgacaaaaaaggatttagaatatgacataaacttacttgataaaacagtggcaggatctgtgaggattgactcttccaattttgaaaaaaattctgtgaataaaatgctattaaatagcattacatggtacagagaagtattttgtcaaaggaagagtcaacctgtggggcaacttcattgttatctttctgttgcaaccaccaccatgatgagttagcagccatcagcatcaaagtaggaccctccactaacaaaaactttacatctcattgaagggttagatggtcattagcattttttgcaataagatcttttaaaatcaaggtatgtacattttgaaaacgtaatcctattgtacatttaataaactgtagtatagcataaacataactttatatatgcactggaaaaccaaaaagttgtgagacttattttgtcataatattcattgtattgtggtggcctagtactgaacatgcagtacctccaaggtgtgcttgtaatttgtttcttttctgtttttctctttgtcagtcttagaggcagctttttttttttaagatccagctttttgtttcattgttttattattttgctgtttttaatgttattggtttgtgctctttattatttccttctttctgcttgatttagttttattatgcttgtcaatttctagattttatgcttatattattgatttgagacttttactgttttcaaaaaaatgcacttattgctatattgtccgtatagcactacttttcctctattccaaaatttttgatatatcttattttcatattttttttcagtttacagagtgtgtgtgtgtgtttgtgtgc

SEQ ID NO: 14763 - DNA, 1028 bp, Homo sapiens
gcttttattggatgaagtcatcaatagatgagagtatatcaaattgattattagtgctgttgaattcagctatatccttattgatttttttcttgtgagatttgttcatttatgatagaggattgttagtctccaactgtaacaggggtttcatctattactccttgcacttctatcagtttttgcctcatgtattttaatgttccgttgttaggtgtatatatgctaaggactgttatgtattcttggaaaattcatccctttatcataatatattgcccctctttattcctgaaaacttttcttgctttgaaatctgctctgtctgaaattaatacgctaccttcactttcttttgatcagtgttagcatggcatttctttctccatcctttcacttttatctgtaagtatttttaaatttgaagtggattttttggtagaaaatgtataattggaccttatttttttaatctaccctgacaatctctgttttttaattggtgcattcggaccattgacattcaacatcgttattgatgtaggtgaattaatatctaccatattttaaacttttttatttgttgcctttgacctttgttcttgttttgtctcccactcttctaccttttgtgtttctaattgaacattttatgtaatttgaatttctcttttgtcatagcattatcagttaggcctctgtttttaatttttatttttattatttttttgagacagagtctggctctgtctcccgggctggagtacagtggcgcgatctctgctcactgcaacctccgcctcctgggttcaagcgattctcctgcctcagcctccctagtagctgggactaccagtgcgtgccaccacgcccgggtaattttttgtatttttagtagagatggggtttcaccgtgttaaccaggatggtcttgatctcctgacctcatgatccgcccacctcggcctcccaaagtgccggaaatacaggtgtgagccaccacgccctgcctgtttttattttttaat

SEQ ID NO: 14764 - DNA, 1021 bp, Homo sapiens
caaaatagacaaatagatcaaggaaaaagaatagagagcccagaaatagacccatataaatatagttgctgtggtctgaatgtatatatctgcccagaattcatatgttgaagcttaacccccgatgtgagggcgtttgaaggatgaggcctttgggaggtgatttagtcatgagggcagagacctcatgaattggattagtgtccctaataaaagaggcctgagacaggcccctttcccctaccaccatatgcgattatagccagaagacagacatctatcaatcaggaagtaggccttcacctgaatttcttggcaccttgatcttggacttccagacctgcagaacagtgagaaataaacttcttttgtttatcagccacccagtccatggtattttttaaatagcagctcaaatagacttaagacaatgttcaactggtctttgaaaaaggaataaacaaaatacaatggagcaaagatagtttttttaacaaatggtgctggaacacctggacatctgcatgctttaaaaaattgaatctggacgtagaccttacacccttaaaaaagttaattcaaagtggatcataggactacatataaaacacaaaactataaaactgccagacaataatataggagaaagcctaggtaaccttgggtatggcagtgattttcagctctaaaggtaccatccacaaaagaaaatattggtaagctgggcttcattaaaaactctgctctacaaacacaatgccatgaaatgaaaagagaagccacagactgggagaaatattttcaaaagacgcatctgataatgtactattacttaaaaatatacaagaactcctaaaactcagcaataagaaaatgaacaaccctaggccgagcgcagtggctcacgcctgtaatcccaacactttgggaggccaaggcaggtggatcacttaaggtcaggagttcatgaccaagcctggccaacttggtgaaaccccatctctaccaaaaatacaaaaat

SEQ ID NO: 14765 - DNA, 2039 bp, Homo sapiens
aatgaaccctaatgtaaactgtggactttgggtgataatgatgtgtcagtggaggtttatcagtggtaataaatgtgccacttcgttggggtatgttgataatgggagaagctatgcatattgcagtacaagggatatatgggaaattatatggaaaaatttctcacttcctaaagatgctatgaatttctttttcctttaaagaagtttatgcagatttgtggttatctcataaacaaaattaaccataaaagagtaatcctcattagaaaaatatttaagtcacgtttttaaagtctgctcaattttgctgtaaacctgaaactaatctaaaaatgtaaagttttgttttactatccattagccttgagtcttccaattctggaaagatggagtaaatgtactttggtctattcctcatgctaagtacaactgaaagtcctaagaaataatgtggtggtgtgttcttgtttttgtgtgtgtgcctcatatattttatacttggagctgaagcagctgacaacctagaaatatcgaaagacactgacaaatagcttcaacaaaagctttctctgtttagccaaagggcgtagaaaccataccaagtcagaaagcttatactataaccaccctactcctgccaaacactacagaaaaactgtggtcctacaccaacccatgccagcaaaagttgagtggggagcctggattctcaccctcactagactgtgatgaagtaccccaatttgtggtcccctgaaagggtctcagaacctctggtattcaagatcacagctttgagactttaagctttactactaaatgagttaaatttctcacttcctaaagatgctatgaatttattttgtttttccttttaagaaatgtatgtagatttgtggtttatcacgtaaaattaaccataaaagagtagtcctcattagaaaaatatttaagtcactttttaaaaaagtctgaatagttgaagtttatttttcaccaagtgataatttatttttgtcaattttgtgggaaagtaatgacttattatctgtttataaacaaaatttctacacactaatattttacatttgaatacatgtgtaaatttctttactcctatatttgtccctcacaggaatccacatcttcacctcatcttttaataagtattagtatgttttgttgactactgaggcattttatagttaatctacttaaatattagttggatttataccaaaaagttatctaaaataatattgtcaatgatgaattgtattaaacaaatgtgtttgactactctgtaattcagcatttataatttgccttagttatgtagtacgttgtgtgacttcacagtatcaggttttgtgaacttctgtaagcatcctttctgagaaagccaatgggaaaagtataattttttactacttgtaattttggataattgttgtatataagaatgtttactattaaaggcacaagatgaaatgtagactcaacagtattgaatgatgttaagaacaaattagattggagatactggtgtagtgtttttctctggcttctgtcatgtgaactttcattcttatattggatagatggtggatatttaaaagtatggtctaatctaggggttggcaaactatgatccacaggtcaaatctggcctgctacttgccttttttttttttcttttttcttttttcttttcttttttttttgagatgaggtctacctctttcactcaggctggagtgcagtggtgcaatcatggcttactgctgcttctgcctcccaggttccagtgatcatctcacttcagcttcccaagtagctgggactacaggcatgtgccaccacagctggctactttttacaattattatttattgtagagagaggatctctccatgttgcccaggctggtctcaaactcctgggcataagagatcctcctgcctcagcctcccaaagtgctgggaatgagccactgtgcccagcctgctgcctggttttataaataatattttcat

SEQ ID NO: 14766 - DNA, 1050 bp, Homo sapiens
agagcagtaatttactgagtctgagagattgccagatttgcttggatttgccagatcctgttttagaagtatgccaaagtgtgaatattttatatttttaaatataaaataagtatttctagttacatagttttcacatgacatgctggactgtagattatatggttgcatgtttttcttccactaaacttgcatttagcagcaagtacggagctcaaaagtccctatcatcaatattttatattgtaaaactaattttagtagaatattaagcttttaaattattaaacatgtgaagaactcttaatagtctattatacataagtattaaaacataagagttcagaccagtctgggtatttagaaaaatgagtaatttaaaaaatggatccaaagatattaaaaagaagataatacagtattataatgtgtcaggagatattcaggttaaaataatcatatcttagataatttgccaatgagattaatataatgcctctttctgatgaccacgtttttgttagggcctttatttgaacagtgttcctacagctttcaataactaaaagattagcagccttttctaaacaaccattcttttaaacataaaatagcactattaaacaggattagaactctgtattagattgaaagcaccctgaaatgaagagccccatctatcacattaagcctgtactgtagtccccttttatccacaggggataaattccaaaactgccagtgaatggctgaaaccacagatactactgaacccaagtactgcgataccacaatagctgatctgataacccagatggctggtaagtgaataacaagtgggtagcctatacaatgtgaattcactggacaaagggatgattcatgtcccagtgggatggagtgggaaggtgtaaaatttcatcatactcctcagactggcacataatttaaaacctaagtattatttatgtctggaagtctttatttaatatttcagatcacagttgaccttggaaagcaaaactgaagataaggaaagactactctatt

SEQ ID NO: 14767 - DNA, 1036 bp, Homo sapiens
actttgctgaattcttttatcagttctaggagctttctggaggagtctttagggtttttgaggtaaacgatcatatcatcagcaaacagtgacattttgacttcctcttcaactatttggattccgttttttactttctcttgtctgattaatgtggctaggacttcgtggtgagagtgggtatccttgtcttgttccagttcttagagggaatgctttcaacttttccccattcagtgttatgtcggctgtgggtttgtcatagatggcttttattacattgaggtgtgtcccttgtatgcccattttgctgagagttttaatcataaaagttgctggattttgtcaaatgctttttttgcatctattgagatgataatgtgatttttgtttttaattctttttatgtgaggtatcacatttattgacttgtgtatgttaaaccatccctgcatccctggtatgaaacccacttgatcatggtggattatgtttttgataatgttgttggatttggttagctagtatttcgttagggattttagcatcgatgttcttcagggatattggtctgtagttttcttttatggttatgtcctttcctggttttggtattagggtgatgttggcttcatagaatgaattagggttggttcccggtttctctatcttgtggaatagtatcaataggataggtataaattcttctttgaatgtctggtagaattcagctgtgaatctgtctggtcctggacttttttctgttgttaatttttaaattactgtttcagtcttgctgcttgttattggtctgttcagggtatgtattttttcctgatttaaggtaggagggttgtatctttccagggaattatccatctcttctaggtgttctagtttatgcacattaaggtgtccgtagtagccttgaatgatcttttatatttctgtggtgtcagttgtagtatctcccgtttcatttcttattaagcttatttggattttttgtctccttttcttggttaatcttgctaat

SEQ ID NO: 14768 - DNA, 1063 bp, Homo sapiens
gaaataatctattaagtctcatgcacagaagagacatagttcaggaggtattttggatgaaaattgccaaagatattgtagctgaatcccaaacctgagaaatattcttggttttttagtatttttccttcatcaccaccgccattgccaccatccctcttcagtctagtccattaccaaatcccattagctccttctccaaaataacatcaaatccaactatattatctattctaccatcaccctggtttaagccaacatcatctctaacttgaacttgcagtatttctaaatatctgtttccattcctgtcatcctttaatccattctctatatagcagccagagaaaccttttattaaccgtaaatcagaccatgacatttttcttcttaaaaccttggtggctctctataacattcagaatgaagtccagtttattcaggataggctactagaccctggttcctgaccttctctccaatctcatctcatcaccattttattatttatttatttttctcctcactctcttcctacaagctatgctggctgccttttcattgcaagaataaaccaagctccatactattttggtgcctttcagtttttgctgtcctgtacctagaatgtttttctccagttttttacttatttggctcatcgatgttaaaatcagatcacctcttcagataggccttctccaataaccttgtctaaagtgacctcaagttattgtattaacttattttctccctcatttaattttatctccttaagttctgtgaaagctatgaattcattccatttatctttgttgtagctatctttgttggcacttaggtgctcagtaaaaatactttttatgtggatatttccccagtcttcttagtaaagtctgaactataatgaaggatcataatcatagcaaacatttatgtagtctccatataaattaataattgacagttgatgatttctgaaaaccataatccgtattcactcagtaagtgagtattttatattatagctgaaaatagcttacttttaaaggtataaagtaaa

SEQ ID NO: 14769 - DNA, 1040 bp, Homo sapiens
aagatgttattagagacaaatacaaaaaaattctggctctctggattggactctgtgtagattgattccatctgtaaaaggtgcctcatctttgacagtagatattttagtcactgttacttgttagagattcaatatagcaatgcaatttttttttatttacttataaggatttatgataccaagttgtatttgacatttggattaaatcctgaggggtaaggaagattcgtccctgtggtagaagtttctaaagtcttaagtcaaatgaattctacttacactttagttagaaggccatttaagacaaacgtgccttaaaagatcaagtttttcagtgttaaaattctacatctcaatataggttatgaatactacattaagttcatttggttatgaattcattattttcaccttttgctgctattgttatacttcaactctcttatttttacaactttttattttgaaaactttcaaactttaaaaaaatgttgggacaacagtataatgaacagctgcactctgcacacctagattctcatgattgagaatacatgctgtatctatttatatctctgtcttgccttctctctatatataacttaaaaactgtttcagacatagtgacactttacccctgaatacttcagcatgtttccctaaaattaaggacattgttcaccgtactcttatcatatgctggaaatgttaacattgagacaataatatcataaaatataacatacaaacctatttttagatttctccaattatctcaaaatattatttatagattttttgattcagtattctgtgagggattataaatgataatttgatagtgatatgtcttcaccattttgttatatattgtcagaaatttgatgtagaataattcatatgttagcaactgtggaaagtgttgccaattatgaaaaaaatgtaaatttagataatttagaaatagtccactaagacttttattatatagttgattatattaattaaagtaacttgaattccttgacagtttactt

SEQ ID NO: 14770 - DNA, 1082 bp, Homo sapiens
ccctttttcaccctagatgtaaccactattctgacttctttctttttttttttttttgatacggagtctctgtcgcccgggcttgagtgcagtggcacgatctcagcacactgcaacctctacctccccggttcaagcaattctcctgcctcagcttcctgagtagctgggactacaggcatgcgccaccacacccagctaatttttgtatttttagtagagacagggttttgctatgtgggccaggctggtctcgaacctcctgacctgaagtgatccacctgcctcggcctcccaaagtgctgggattacagacgtgagccaccgcgcccagcctactattatgatttttatcattatcaattccttgcttttgttccgttttaccaactatatacacatccctaaacattacaattcatgtttgctctctttgaacttcatatgaattaaatcatattgtatgcagtttttttgtgtcttgcttttttatcaaccgtttttgtaggattcattcatgttattgactgtaactaaggtctttgtttaattgtaaaatacaccactgtaccacagatcactgagacatcctactgttgaatatttagcttgtttccatttgggacgattatgaaaagtgatgctataaacattattataagagcatcctggtactcatgtataagtttctctgaagtgtatactgaagagtggaattcctgggtattaagaaacatgtattttcaactttcctgactgaaatctcacttttctaaagtagttatgccagtttacactaccatcttgaatgcatttattttaaatagatatatttaaatattctttgtctgcaatgtatattactatagattttatttatatgtgaggtgactaaattgatacaatatttttaaaatgtgtctttgtttttccagcccatgggaaaaatcctgagggataattcttaatgaaaaagtccatttttgccccactggtttgaattttgcctcatgtatctcatactaaattttccaatttaggacatatgcatacttaagtctgtcttttcctgaacttctgtt

SEQ ID NO: 14771 - DNA, 1896 bp, Homo sapiens
ctagtaagtgagagcaatgtttttctttctgtgcctcgcttatttcacttaacataatgacatccagttccactgatgttgttgcaaatgactgaatctcattcttttttatggctgaattatactccactgtatataagaaccacattatctattaatctattgatggacacaggttgcttccaaatcttagctattgtgaacacagctgcaacaaacatgggagtgcaaatatctattcaatatattgtttccttttttttttcagtatatacccaccagtatgctaatgctacaactaatgctgcagtaggatttctggaacatatgccagcttaattttttgtttttaaagaaacctccaaactattcttcatagagtttgtaataatttacattcccaccagtagtgtacaagggttcccttttcttcacattctcaccagcatttcttattgcctgtccttttgataaaagccattttacttggggtgagatcatattatagttttgattttcatttctctgatggttaattatgttgagcaccttttcatatgcctatttgccatttatatcaaatattttgcctatttttaaattgaatagatttttttcctgtacagttgttgagctccttatatattctggtcattaatcccttgtccgatgggtagcttgcaaatattttctccattctgtgggttgtctcttcactctattgattgacctttgctgtgcaaaagacatttaatgtgatatactcctatttgtccatttttgctttggttacctatgcttgtggagtgttactcaagaaatctttgcccagatcaatgtcctggagagtttcccctatgttttcttgtagtttcatagtttgaggtcttacatttaattatttaatgcatttttatttgatttttgtatatggtgagacataggtatctagttcctttttttttttttttttttttgcataatggatattcagttttcccagcaccattcattgaagaaagagtttttttccagtgtgtgttcttggcatctttgttgaaaataagttcactgtaggtatgtggatttgtttctgggttctctattctgttccattaacctaggtgtctgtttttatgtcagtatcatgatgtttgggttattatagctttgtaatataatttggagtcaggtaatatgatttcttccagttttgttctttttccttaggatagctgtggctattctgggttttctgtggttccatataaattttaggatagttttttccatttctgtatagagtaacattagtattttgatagggattgtattaaatctgtagattgctttgggtactatgaacattttaacaatagttactcttctaatccatgaacatggaatatgtttatattttttatctctttattttattagtgtatcatagttttcattaatctttcattaagatcttttgctctttggttaaattaattcctaagtatttacttttgtgtgtggctattgtaaatggggttatttttatttatttttcagattgttcactgttggcagataaaaatgctactgatttttgtatgttgattttgtatcctgtaacttcactgaatttatcagttctaatagttttcttgtgtagtctttaggtttttccacatataatgtcatatcatctgcaaacaaggaaaattttacttcttccctttcagtttggattttctttatatatttctcttgtctgactggtctatctagaacagccattactatgttgagtaacactgatgacaatgggcatactggtcttctaccagatcttagaggaagggctttcagtttttccccattcattatgatactagctgtgggtct

SEQ ID NO: 14772 - DNA, 1029 bp, Homo sapiens
agtccctagactgcacatagcacaaggaccctggtcccggcccataaaaccactttttcctcttagtcctccagacctgtgatgggaggggctgctgcaaaggtctctgacagtccttggagacattttccccattttcttggggattaacattcggctccttgttactcatgcagatttctgcagccagcttgaatttctcctcagaaattcttttctatttcttttctattgcattttcttttctattgcattgtcaggctgcaaattttccaaacttttacactctgcttcccttataaaactgaatgcctttaacagcacccaagtcacccattgaatgctttgttgcttagaaatttcttccaccagctatcctaaatcatctctctcaagttcaaagttattgaactctctagggcagagtcaaaatgctgccagtctctttgcaaaaacataacaagagtcacctttgctccagttcccaagaagttcctcatctccatctgagactgcctcatcctggactttattgtccatattgctatcagcattttgggcaaagccattccacaagtctttaggaagttccaaactttcccacatttttctgtcttctttttagccctccaaattgttccaacccctacctgttacccagttccaaagttcctttcacatttttgggtatctacagcagtgccccactctactggtaccaatttactgaattagtctgttttcacactattgataaagacatacccgagactcggcaatttacaaaaacattaaaaaaagagagacgtttattggacttacagtttcacatggctgggaggcctcacaatcatggtggaaggcaaggaagagcaagtcacatcttacgtagatggcagcaggcaaagagagagtttgtgcagggaagattccctttttacatcagatctcgtgagacttattcactatcacaagaacagcacaggaaaatcctgcccccatgattcaattacctcccaccaggtccct

SEQ ID NO: 14773 - DNA, 1123 bp, Homo sapiens
ctttctgtctttataaatttgcctgttctagatacctcatataagtggaatcataccagttttgtctttcagtgtctagcttatttcacttagcaaaatgttttcagggttcatttatattatatcatgtattagaatttcatccctttttaactctgaccattattccactgtatgtatataccacaacttttttatcagttcacctgttggtggacactgggttgttttcagcttttagcttttacaaataatgctcctacaaacattggcatgcaagtatctgtttttcttttggttatataactagaaatggattcaatagcatttaatactttagtccaagaagaaattaaattaatagcaaagagatcagggaaaccacataattaatatgaaagattaataagtccaagatatgatattaggagcagaagaaattataaacttttagaaaggctacagaaggccaaatgataaaatttagaagactattctatgaataaaagggagaatgaagttaaaatgacacagatcttggatgattgtaagaaaacaaaaatgattctgaagaaagttaaattttaaaaaaataaccaacttaaggacagtatgatggcacatctttgaaatggaataatgtgggcttttatagaggagagaggtaggcatttgaaaggcaaggtttaaatgaagatgactaagatgagggaaccaggtcatgtttagaggaaccagcaatgggaacaggaattcatttcaatccagagatccttcatcctgtatactcagccttctaccactcatagacatttttctaaaaagattgctaggctcgaaccccagagattctgattcagtaggtttggaattcggtttaggtaatgtgcacatacatgcctctgtgtgtgtgtgtgtgtgtgtgtgtgtgtgtgtgtgtgtgtctgtgtgcgtgcgcacacgtgaacgtgtgtctgtgtgtgtgttttaatccactgatgaaacacaatatgagttaaattgaactctgtaccgtagtggcctagaccttataagaatttaaaaagttaaagagaattgacccttgtcttcaagcagtttaaaactgcagtagttaaaaaat

SEQ ID NO: 14774 - DNA, 1040 bp, Homo sapiens
tagtgttctttttttaaaccattacttatattacctacaccaatgaggtcaggggatcccgtttttcctatggaattaagtagtagttttcaaacataaaagaactctttcttgtatacaagcaataacatcaggaaagaattaaacttcattctcttgctaattcttttgtaataaaattttaattcggtaaacataataatatgcttatttgccaagtcccatattaagcattagggatcctaaggttagaaagaaaaataagaaatggtcctctccttaaggatcccacagtttaaatggagaaattatttcttgcaactgttaagataattcttcaaattgaatgtagctttcttgatccagtatagaaatatcactttttgttatatcaaaaggttttcctgaattaatttttttctcccttttgtatcctcataattacctagcactggactgctgagtgaatggaaaattaattagcaggagctgattctaattactttggaatgagttgttcatctttatcctgaaggctttgaaaattaatacatataagcagcatgggagcaccttctggcttttctgtctgtgcattgctgatttaaccaagaatatatttataaactttggaacagacatagtagtttacattagttacagaaaaggggatatttccctgaatgttcattttttgtgcttctcaaagcctttttaaaaattattatttttataatagccatcattagattggttcttcctttctacagcctttctattttgtatgcacttctggctttgtacatgcttctgctatggaacatgtcatagtatattgtaattaattatttgcttgtctgtattacctagttagtagaaacttcttaaagacaggagctttatcttattcttttttacatcctcagcccctaaaacaaattctgacacatagtaagtactcaaaaaatgtatattgttgcagttactatggataaatcagtgttttaccatagttctatagcatgtttttttcaggtaaa

SEQ ID NO: 14775 - DNA, 1049 bp, Homo sapiens
acccagcccccctttcctaaactctggcaaccactaatctattttctagttcaatattttgccatttcaagaatgaatataattagaaccatacagtatgtagccttttgggattggtttcttccattaagcataatttcctggagattcgactaaattgttacatggatcaataattccttacattttattgttgagtagtattccatactatatatgcactacagtttgttcaaccattttctgttgaaggacatctgggttgtttacagtttgtaattatgatgaacattacaccaaacgatgcggtatctaggttccatggcagttgcaggttttctgtttaaatgaactgtcaaattattatccagagcaactgtatcattttacaatcacaccaacaatatatgagtgtgtctccacaccttgccagtatttggagttgtcactatttttattttagccattttgatagttttgtaaatagttttaatttgcatttccctaatgactagtaattttgagcatctgttcaggtgttttgcctattgtctgactgtgttttttagtttttttatccctgatttttgagagtttttatgtgttctagaaacctgtccttcgtcagatatgtggattgcaattgttttctcccagtcaatacattgtcttttttcctcttcacagtgtcattcacagagcaaaactacttaatttccatgaggtccaatttatcatctttttcttttagcagttgtgtttttttgatgtaaagtctaagcacccttcacctaggcaaaggtccaaagactttctcctgtgtttttttctaaaacttttataattttacattttacctttaaatccatttgagttgatttttttctaaggtgtgagtttaggttgaggtgttttttcgtttggttggttggttggtttttgtgtatgaacgaccacttgctccagtgctacttgtttaaaaaaaaaaaaaaaaaaaaaaaaagctacctttcctctgttgaatggcttttgcacctttgttgaaaatt

SEQ ID NO: 14776 - DNA, 1035 bp, Homo sapiens
ctatcttcatctgattttggtatcaagttaatactggcttcataaaatgagttgtgatattccctccacttttactctctggaagagtttatgtaaaatgtatattaatttttctttaaacatttcagagaattcactagtggaaccatctgtcctagagctttatttttctagagtttttttactataaattgaattttcttaaaagttacagggctatttatctattttatatatggttaatgtagtattttatgctttttgagaaatttgtccatctcatctaagttgtctaatttatgtatatagatttgctcctagtattctcttattgttattttctcgtcttgagagtctgtattaatacgcctgtttcattcctgatattggtaatttccatctttttttcagtcttgcttaagatatttccattttatttatcttttcaaagaacaagctttttgtttcattgactatctctgtttttctgttttaaatttcactgttatctgctctttattatttcattccttctccttgtttggggttcattttgctctttatctagttcttgagctggaagcttgttattgatttgagacttttctaatgtaaactttaggagcactgatttaggtgcattccatgaatttgatatgttatatttgcatttttattcatcttaatgtatctttttattttttgagatttttttcttttttttttaatctatctaacactaggtcttatttcttctatcaaacttcatatgtgcccatcaatcaacttctcatctttccctcctccccactacccttcctggcccctggtaacaaccaatctactacctatcctcatgagattcacttttttagcccccacattatgagggagaacttgcgacattcttccttctgtgcttgccttgtttcatttaacataatgacttttagttccatccatgttcctgcaaatgataggatttcattttttaatcagtgaataatgttccattgtatatagatactgcatttt

SEQ ID NO: 14777 - DNA, 1044 bp, Homo sapiens
tttatggattatccagttattttggctacgagcattgtgaggttttttttttaataatatatagattagaatcatcgagaaatccttttgaagtgtccattcagtgatccagtgagtgcttactaaaggctagtaagtatttaagttttgtgtgattttttttttatgaaaccaattggtgaaacaggcatttttaaatcattatatgttccttttcctttactctgaattaaaagagtaagaagtgccataaatttcaatcttaggagagaagcttatggcatttaaaatctaagctgattctgtcattctacatttggaaaatgttagcatttcatttttccatttgtttttaccttttttcctttttagtcattttgcttgtatagtttcatgttttcctgtcactatattcatagttgttatgtgttgtgcattagaagcatccattctacaccagtcctgctgttgtcatggcacacggtgaacagcccatccctggtctcatcaattattcccatcattcaacagatgaacgggtaagacaagaggcttttgcattaatggttttccaaatatgtattctacttcctctccttggagataggctgtaacatatggaagatgtgttgttttattctgatggattttcagccttgctttcttgtgaaagtgtgagtgccattgagtatatccatcaaggaatttaatagagtttctcctgtgactaaagtactctgctatcattaagattctgtcatttgtgacaatgaacttttatcaaatgacttgcaagaaagtcattgctcagaagttatttttgtcttaccaatttcatcagatatctttaaataaattgcctggcttaaaattacctcttaagagaatcactttgagtcttaaaatctagacagattggtcaagcaaatagttgatttgtattaaccttcctgttttgtcttatgattttgcatctcatttttttttcattcattgagctctcattacaaccattgcagagttgaattttgatataaattctgt

SEQ ID NO: 14778 - DNA, 1045 bp, Homo sapiens
aagacattcttattaggattgcaaataactatactgtcaagaaaagttaggaaattactaagagtttctgaatttggaggaagtcagaatcaaatattattttgaaatgtttcatattagtttaagaaatcagggtctactaaattgtgtgggttacatatagcttaaaaagaagaaaaagagcttcctcatgtatccagaaaatagaacatttaaaacaaccagtgtcaatactactccaaacaaataggaaaagaaatttccttctgtattcctttttcattctgtgttgattcagtcctgtgataattaattattattcaaataagccttggcttagcagtctgctttcatgaaactttctgcttctggcctgagagagttttagaaattctaactcagtccactgtttaggtccaaaagttgtccaagcagaagtctactcatgagtctattctttcaagtattagtactttgaagtatttggtacaattctttccatgaagcttttgaaactatctctgttgaacacacaaactctggcctatagcttaataagcataatcttcaggtaaacatcaaaatttgttcatagatgacagactattgttaattgtaaccaataatatcaaaatgcaagaggttaaaattctttccactgggggataactatttcaaaagagttttgatcagtatccccttaaactaaaaactcttgcaaatatggtcaaatgatttttgaccagggaaccaagaccattcagtggggaagacagtcttttcaaaaaatggtcctgggaaaactggatattcacatgcaaaagaattaatttgaacttttatctaacaccatatacaaaaattaattcaaaatggatcagagacctaaagctaagacccacaatacaactcttggagtcaaaactttatgacattggatttggcagtgattttcttggacatgacaccaaaggcactggcaacaacagcaaaaagtacacaaattagactgcatgggaattttaaatctttgcacatccaaaga

SEQ ID NO: 14779 - DNA, 1025 bp, Homo sapiens
cttggctcactgcaacctccacctcccaagttcaagtgattctcccgcctcagcctcccaagtacctgagattacaggtgcctgccaccacacccagctaatttttgtatttttagtagagacagtgtttcagcaggttggccaggctggtctcaaactccatacctcaggtgatccacacacctcagcttcccaaagtgctgggattacaggcgtgagccaccacgcctggccccatttagttaacttttgtgttgcttaatattgatgaacattttatttctttatgagtcctgtacgtttttcctttattccaatgtcactatctccaaagttattagaaacctgcatttgagagcacctgttagagtcctataggtgattataaaccatcttttgaaaaggatcaaaacaaaacaaaaattgtctgaataacaaaatgtccagggtagttacagttagaatcaccattgacagagaagtttggttatctttgtggtttataataacttgacataacaaccttaattatgattgatagcatatactttagacattagaatttttgaaatttcctacaattttgggacatatattagtattattccccaaaatatatcctaaagtagattaaacaccgtttggcaatcccatgtaactaaatatgccaaataatcctgtttacttcttttctagatgccccaggggacctctgtagcactcaaaaagccaggtatcaggaaaaacaattttgaaactgaagtttgattttgggaagcctattaaatatattagaggtttaaaacaactattgttatgaaatagaattccagattaccatgaattatttattttgccaaaatgatgactcagatactttaaaaaagcaaaaacttattatgaccctttacaaattttgcaaaagagcagattagtgccttaagagtatcttgtgctttcatttcaatgctcagttcactgaaaaaccatataatacctttttgaatttagtcaatatgtttaca

SEQ ID NO: 14780 - DNA, 1043 bp, Homo sapiens
atttttttcaagatttttacagtccttctaccacttgtttgaactttgagctttattttatctaattcaaaacaaccctttaacactaggcaagaatttacatttttatgccttttttataatcttttactaaaaacacatcttattagtcttacatgcctcacatgtaaatttatttccagtagtttgagttatatgttataatggtaactccttgaaattttttactttaatgtaaaacctgataagttgttttcattatgtgctaggtgctgccaaggcttaactccttccagcttaattaaagatgcggttagtactacatgtccctagccttaccatttatggagcaggcaagtcaaatagttctttaaacccaaaaagcagtttataaacttaaaacatttagcaaacctagcacctgacctgcatagtttagtccacctgtttatattttaatgacatctgctttttaccaatattctttaagggttgtttttatttctcaaagattaaagtcacatgaactgaaaggcaccacaacttttatcatccctttaaaaatttttttgatccaagcactatcttcctttaagccagttaattagagctctttttataggcatcacacacacaacacatatataactaaacagacaggcaaaagaaaacccagtcaccataagatcttttgcttaccaatctcctaattggattattggatatagccctttaagagacagggctaggaaaacatgcagcttctaaaacctaataaacaggcatagatggggcaaaaacagattttcagagggatctatccacttttaattcttggggttccatgaagaaaatagaggtctttccccttcatgtgtgcattgagggtggcaagacaaacggagaaaaataattcagtcaactgagaaaaaaaccctttttccagaaaaacaagatccaagaaaagaaaaacataaaggccatttaaatatacctataatttgaatatccacttttaattaagccgagcactctttttaaga

SEQ ID NO: 14781 - DNA, 1034 bp, Homo sapiens
aggaagtgagcacttgctgttggaaaattggtgacgatagattcgcttaacacagggtagccacagacaaaccttgaacttgtaaaaaatgcaattatccatgaagcacggtaaaacgaggtatgcctgtataccacagcatttttacatccaggctaagccagtctcttcttaatcctgctggatagaaaattttatcatatttcagtgaaagttcaaagataaacttttttttggtctcatgtgcaaataataaaaaaaattaagaacatataatgtgctgcctaaaggttatttattttaacccacataataactcttttattaaagatgggttttataatttctttttagacagataagaaatttggaaaaaataatttcagtttaattattctctagttagtgaacaggaaataatttatataaaggtctaattttatatagattagatttaaaggtctaattttgtatagattatactgtcttggaattaaaactatatagaactttaagatcaaaattataaatgtgtaataaaatataaataaataaatgcaaatgttaatatatcattagacatcagaacctttaaaaaagatgatttcctggctgggtgcagtggcttacacctgtaatctcagcactttgggaggccaaggcaggagtatcacctgaggtcgggagtttgagaccagcctgaccaacatggagaaaccttgtctctattaaaaacacaaaattagctgggtgtgtggtgcatgcctgtaatcccagctactcgggaggctgaggcaggagaatcacttgaacccgggaggcagaggttgcggtgagccgagattgcgccattacattccagcctgggcaacaagagtgaaactccgtctcaaaagaaaaagatttcctaaggataaaaatatggcagaggggtttagaggatctgtaacttgccaccatgattctaacttttgacttctcacttcttactctttgcaactttccttgaccttttttatccttttattagttta

SEQ ID NO: 14782 - DNA, 1054 bp, Homo sapiens
gagtcctgctgtaactggttagtgtgtcaaaataacgttgacgtaggaatggttataatggagtttgtgaaatttcttcattttaaagcttgagaaaagaagcctgctcatttttctgaggatggtttcagattattctacaaggaagcatatgtttggaaaggttgatctcctcaaattgtctacctttacatttttattttcttcttttttattgtcttctctagctattctctctctctcttcacatagatttccccctctacacacacacatacacacaaagtcttcaaatatggaactctaatgtggatagaatatagattataaatttctcttttattggaggctcatttctgggttttcagagtacaaagataaatctcattattgctgtcttaaatgttatataaaatatgttattagagtattttcatttaacacattgcatttttctatttattacttcattacgtcttaacaaagatatttcccctgaagaccatgatgaacttttgatttttgctaaatgccctgtttggcctcacctaaaatcatataccttctatgggaaattttatacaactggaaaagatacactgacatgatcaagtaatatatcataccttaaaaatctaaatggtatttgaatcgaatcagctaactttgagtggggaagaacagatgaaacattagtccctagataagtaaatatttaatagtccttaggtgagcaaacagtttgtaaactctacttactttaagcaaatttgagtgtctcttgattcttttatgtagaacattgtttgagccttccttgtttggcattttggcatttacttatattaataatattcatttatttactatttcatttataataattatgtaacatctgagtatcttggtagatgatgtcttataaatatgaccagactacaataatgatgaagataacagtaagtcaattttaggattatgtctttggactaattttgagtaattttgctacttttcactttattattattctcttaatgtagttagtccaatt

SEQ ID NO: 14783 - DNA, 1034 bp, Homo sapiens
ataaaaaaaattgatgcaaaaatcctcaacaaaatactaggaaaccaaattggattatacacttcagccatgtgggatttatccctggaatgcaaggatcattcaatgcatgaaaatcaataaatgtaatgtatcacattaacagaacatggaatgaaaatcacatgatcatctcaaaaggtgcagaaaatgcattttagaaaattcagcaacctttcgtgatataacaatcagcaaactagaaacagaaggaaattacctcaatataataaaggtcatttatgaaaagctcataacataacatactaaatggtgaaaaactggaagctttttttttttaagatcaagaacaaagcaaagatgctcatttttgccacttctttttagtataatactggaagttctaatcaaagcagctaggcaatgaaaagaaagaaaatgcatcccaaatggaaagaaagaagtaaaattatctctgtttccagatgacatgatcttatgtagaaaactctgaaaattccacttatatacatacatgcacacacacacacacacacacacacacacacacacacacagagaaacactaactgttaaagctaatacaagaagccagtaaaattgcaggggtacaaagtcaacaataaaaaatcaattgcatttttatacactaacagtgaatgattaacaatctgaaaaagaaattaagaaaatcccatttacaatagcatcagaaagaataaaatacttaggaataaacttaatggagaaaatgaaagacttgtgcagtgaaaaccacaaatcattgctgaataaagttaaagacacagtaaatggaaagatacctggattcatggatggaaagacacaatattgttaaaatatccatactacccaaaggaatctacaaattcaaggcaatccctatcaaaataccactgacattttttatagaaatagaaagtaccaccctaaaattcatatagaatttcagaggtcctgggacaaccaaaataatcttgaaaaagaagaac

SEQ ID NO: 14784 - DNA, 1050 bp, Homo sapiens
aggttgcctgttcactctttttagtttctaaattttttagtttcttttgctgtgcagaagctctttagtttaattagatcccatttgtcaattttggcttttgttgccatttcttttggtgttttagacatgaagtctttgcccatgtctatgtcctgaatggtattgcccaggttttcttctaggatttttatggtcctaggtcttatgtttaagtctttgatccatcttgagttgatttttgtataaggtgtaaggaaggtgtccagtttcagttttttgcatagggctaaccagttttctcaacagtatttattaaatagagaatattttccccattacttgtgtgtgtcaggtttgtcaaacatcacatggttgtagatgtgtggtgttatttctcaggccttcattctgtcccattggtctgtatatctgttttggtaccagtatcatgctgttttggttactctagccttgtaatatagtttgaagtcaggtagcgtgatgtctccagctttgttcttcttgcccaggattgtcattggctatgtgggctcttttttggttccatatgaagtttaaagtagttttttccaattctgtgaagaaagtcaatggtagcttgatggggatagcattgaatctataaattactttgggcagtatggccattttcatgatattggttcttcctatccatgagcaaggaatgttttttccatatgtttgtgtcctcttttatttgcttgagcagttgtttgtagttctccttgaagaggtctttcacatcccttgtaagtcgtattcctaggtattttattctctttgtagcagttgtgaatgggagttcactcatgatttggctctctgtttgtctgttattagggtatagaatgcttgtgatttttgcacatttattttgtatcctgagactttgctgaagttgcttatcagcttaaggagattttgggctgagacagtggggttttctaaatatacaatcatgtcatctgcaaacagagacaatttgacttcttctcttcctatttg

SEQ ID NO: 14785 - DNA, 1019 bp, Homo sapiens
gccagcaggtcaaagttgcagtgagccgtgatcacgcaactgcactccagcctgagcaacaaagccagaccctgtctcaaaaccaagatgaaacattgtatattaagaactgactggtttaagaggatgcattttaactgagaaaaataatttcattggtataaatagctccatttcaagatgaccacaccacaaaaaaaggttactgatagataacaaagatccatattgttactctgctcagtagaaaggaatccatttgtactttctgtgaccctttggaggctttctacatcatagatagtgtcattagtatttaaccatgtctttgatgatgacaatcctgagtgaacccctattcattttgcgctgagttcttacatagtcttttcagtgattataactgtaccatggaggataggaaatctcactaacatttttattacttcctctgcaaaaattctgaactaaaatatagtcaacctcatctctggactaaactggaaaatgtaagagacaagttaagttgtacttatggaactgtaggctcattagagaaacctgtagcatcaatttgtgcccactttagaatagctttaatcctacaaatctacttaagaaaagtaaacccattgcaggggaatgctgtcagtttagatgttataataattcagtctgtcactcttagctccttagctcagttcagacagctatagtggggaagatgtctagactccctcccctacctctgccccaactctcaaataaaaatcctatatcctaaagaaccttgtagtttatttttaccaaacaagctagtctacctgcaaattaacagtaacagtgatatcaccaggtaattttaatattgtaaattaaagtgagtattctcttgaatgctatgatcttctcagtgggacatgtattttcacatgttttgtaatacatatgagtttaataaagctaatgccctcgcagattctctttgtgaccattagtaatcatttgtaaggtagcta

SEQ ID NO: 14786 - DNA, 1087 bp, Homo sapiens
taccaagcaaatagcagagaaaaccaggggttgcaatcctagtgttaaagtcttacaaaacagacattaaaccaaaaaaaaaaaaagatcaaaaaagacaagggcattacataacggtaaagggctcaattcaacaagaagtgctaactatcctaaatatacaggaggacctagattcataaaacaagttcttagagacctacaaagagacttagactcccacacaataatagtgggaggctttaatactgcactgtcaatattagatcactgagacaaaaaattaacaaagatattcaggacccaaactcaactctggatcaagtggacctgacagatatctacagaactctccacccaaaaacaacagaatatatattcttctttgtgccatatggcacttactcctaaaaagattgcataattggaagtaaaacactcctaacaaatgccaaacaactgaaatcagaagaaacagtctctcagaccacagtgcaataaaattagaactcaaggttaagaaactcactcaaaaccacacaactacatggaaattaagcaacctgcccctgaatgactcctggataaataacgaaatcaaggcagaaatcaagaagttctttgaaaccaatgagaataaagagacatcatgccagaacctctgggacgcagccaaagcagcgttaagagggcaagttatagcactaaatgcccacatcagaaagttaaaagatctcaaattgacgtcctaatatcaaaattaaaagaactagagaaccaagagcaaaaaagaaaaaaaaaaggccaaagctagcagaagacaagaaataaccaagatcagagcagaactgaaggagatagagacacgaaaaaccttaaaaaaaatcaatgaatctaggagctggtttgttttttttttttttggaaaaaaaaattaataaaatagactactagctagactaataaggaaagagagaagaatcaaatagacacaataaaaaatgataaaggggatatcaccactgaccccacagaaatatgaacaaccatcagagaatactataaacacctctatgcaaataaacta

SEQ ID NO: 14787 - DNA, 1030 bp, Homo sapiens
caaaaagaaaagtacatggttcaaaattataggacagtgactgagaaattaccattaaagaagaatttaaattattcagactacagagtgaacattttctttctttctttgcacaaaatcctgaccaacaaattcacccattggacgtaagtgctacccatttatcagtgatatcctactcatttgaccagggtgtggcaaggttttcatcattaagtactgaaaaaagtaggcatttgctctcaattgaagcattttctgtgacctcaaggacattttagatatttttaaaaattattcttcctaaaaacgtacccctttcatgttaattaagttaaatgctttttatatttacacagttattttaaaagtttaatgttttatacatagaaatgaatatatgtaacacagatggaagttgtagtgataaaataaacatgaaacaccaacccaacttaataactaattcattaccaattctgttgcatctttttgtaccactaaatcatggcttaatcatttctggtaatcataacatttgtatttattccaaactctataaccttacataaagcttattttattttatgacataagaactgtaattgccagataatgagcatctttagatggaaaaaagtgcacaacacaatagcactttgagaaagctatgtattttataagcataggaattttattattccattaacacaacttctggagtaactagattaatgaatgtactggttttcaacaaaggagatcttaaccctaaatgattcaatctttttcactctacgaatatataaagcctgtaatacataagcaagacctgcagtacaccaaagttttgtctagttggtctttcaaataaagaggtgaggaataaattatactggaatagacttgagggcatccaccatgttaaatgtttattttagtatctcataaatagccgtgaaactttccttatgaatgttatacatgcatacctcactttattgactttgcagatattcctttttttttt

SEQ ID NO: 14788 - DNA, 1037 bp, Homo sapiens
tcctttcttgcaaattgctttgtgtgttcaatgctaggtctgatagcgatagcttttagtagacagcggtaggtgcctgcagaacttgtgtttttctcatctttaaaatacaactacttatgctcttaaatcaaggctgtctgcttatttatactagcgtaggcaacacttggatttcccttcttagtatgcttcataactgctttacagagagcttttgcttgttctttctcatgtatctcgtgtttatgtgcacagtgccaaaagaagactgactgggtggaggctctgccttgcctcaagaaccatcccctgcagagcatccagggaggtttctcgccccaatagcctcacggcacagtactcttgggcagtaactggacaccttttatttgaagaaacaaactgaagaaaaaatgcttccttaagtgctgacagcctttttaaccaatacatttaaaattgtacagaacaaaaaaataaaatcaaagactgatcttgtacagatattagtgttaccagcattcatgtggaaatcaagagcaaagacaaaataatgttaaacaattctgtaccataacattttctgtaatgatactgaaacttaatgaataaaaaaattccttgatcattatttaaaaatgtaatgtgttggcctcgttatttaaagagagaagattgtcatgccattctgatagggttctgcctgaataaaagaaatggttaagatggcctaccaagaatatttaaaatatggtatattgtaactctgtatcttactacaatatgtggggaaaaatgtgatcatagcattatgatctgtagtgtgtgaaaatacagatgagaaggaaggagaacctgcagttggtctcgtctttccagtcatagctggagaatagcaagcaaatttagaggaagggtactaatgacttagaaaaaaaataattcttattttagacgccataaaatccaatttcaaacatctacagttctttgaaatggagaaaaaaataagcaatgaaacaaaaaattacaga

SEQ ID NO: 14789 - DNA, 1099 bp, Homo sapiens
acaggtttgtctgacatagttcccagcttgacttttccttggcttagtggttttggggtcctgatacttactttgctttcacaggatgtattagtgatttaaataaaaagtgagacacaacttgtggagagagggaatgtactatgagagacagctaaatattcatcttcataataaatgctcaacagataactaaaaaaaaaagaaatggcatgtatgtatacatagaacatacacacgtattttatatatgtatatatgtatgtatatataacatacagcctatttttatacatgtcactagaaatatgaaggtaagtttaagaagaaactgagagttaaaagtgttctctatgcagaactcaggtagaggaggtgagacactgaattgttcttcatagtaggtttaatggaactgtttgctttttttaaaaaatacacacataattttgtgttacacaactatacgtacaacacatatgcaacacaaaagttgtatattaggggccccttatatggagtgtgtaaaaacattgctgtcaccaaggtagtgaatatttgcatcatttaactacttcattcgattgtcattgaataatttgggaaaaatctctctcctcttgagttattaaatgtttggcaataggtaggtgtggtttttctcttcctgtcttatctagtatttaaatattcaaatttaatgcagcacgtattgagtttctaatatgagcatacatagatagcagtgtgcagggttctcagagccactaccagtagatgggaagtctatagaatatttgcagtctagttgagaagataaggtactcatccataaaaatttgataataggccaggcaccgtggctcactcctgtaattctagcactttgggatcccaaggcaggtggatcgcatgagctcaggagttcgagactagtctgggcaatgtggcgaaaccccgtctctaccacaaatacaaaaacttagccggctgtagtggtgggtgcctgtagtcccagctacttgggggattgaggcaggaggattgcaactgttgtccaggctggagggtcgtggtgtgatcacagcttactgcagcc

SEQ ID NO: 14790 - DNA, 1048 bp, Homo sapiens
taattggagcatcaacatgatttttgagaaggaaagatgcataactttataaggagtcaggaaaagtaacatcatagaatttattgtaccaaacgtgatcttagggcagaaacaggatgctccaaattttttattgatgaaactatccctaacttagactaaactaaaactttagcttacattatagattaagattattaaggggacatgtttctgagagttaagatgatacaaaatagaacaaagtacagtcatgcatcacttaacgacagggataagttctgagaaatgtgccattaggtgatttcattgttgtgcaaacatcactgagtgtatttacacaaacctagatgatatagcctgctgtacagctaggctatgtggtatagcctattcctccaaccaccatcatatatatggttggttgttgactgaaatgttgttatgcagtgcatgactgtatgtagatataattattttctacaaatggctcttacagttcccaggatggcagtagaataaagaaaggagagcagaactaagggaagtttaataagctatcggagaaggcaaaggaatacatacaggatgataaaaatagggatatagagtaaagggataataattcatccatttatttgttaataaatgctgttatgtctgcaccatgtaaagcactttgcctggtgctgagataaacttcgcttacatactttacttgaaagcatatccattaacacttatgtatatttttttcttctgtgtcccctactttataatattttcatgatattgtctctgttataattctttctactgtatatgctcagtttataaacttcttgatgtcagaggccaagtcttatttgttttaaatccagataatatatgttaaattaatgaataaaagatgattttaaaagttctcagaaaacaaacaaaaattaaaaaaaaaaaaaatagttctgccagaactgctgtttctgaattagacctttcaatgctttgctgtaatgtttttctggccttatcttttatctacaacctt

SEQ ID NO: 14791 - DNA, 1148 bp, Homo sapiens
acatttaagctaataggattttcgtactgtctctatagctgtagctttaaaattcaacgtatataattggcatggaaacttaatttgcagtcttttcaagcctttaggatagtgtgatgtgtaacaaacaacctcaaatgtgaatgccttgattttatttttatggtgactttagctacagcatttcctatacccagagctaaacactggaataatactgacatcatttaatttaacataagcaattatgtttaaggagtaatttgtgtcatgtacatatttgattgattttttttcttctacataattttatttgaacaaatgtagacagtttatatgtcgcctttttctgttcaaatttgcatggcctattaagttggctggagagtgttttatgtggaaatattttcaagataatgttccttaggaagaaaataacattcttgggttgagggaaggaatgccatacactactgtctcttcagatctgaaatactccagtttagagccaggaaatttcacaggtcacaccgatttttagcattaaaaactaaggaatatacttagcacttacttaatcttttcagttttccagtttacgtctcaggaatgaagtgtagtctatggttgacaatggagttttgtgatcctgcttattgtaactgacaactgttttcaactccaagagctaaactattggcagttcatgttaagttagagtgagggtgtaggtagtgtcagtgagtggctcttgtgcctgctgtagacattaggcctgcactagggccatgtgctgtcaagattcaggaacatggctttaacaagcagatcttgtatcaaggcagaggtgatgccatgccatacttttaggaagtctgagatgataaatatttcaaggtcagtgaagtctatcaatcattctccccttcctcatcagcaatggtagatagaaatgtcctaaacttttctaaatcctagtgatgaggatgtgctgatattcaacatagtccttaaagtgaaaactgagttgttgctgacctccacaaaagaatatggaaaaaagccttgctgtacacctagttgtacagccactctggccaattccatttcctgtccctctgtggttctgactggagaccccagtgtgg

SEQ ID NO: 14792 - DNA, 1028 bp, Homo sapiens
tcactatgtcacccagtccacagggttcaagcaattctcctgcctcagccttcggagtggctgggattacaggtgtgcgccaccatgcccggctaatttttgtatttttagtagagacggggtttcaccatgttggccaggctggtctcgaactcctgacctcaggtgatctgcccactttggcctcccaaagtgctgggattacaggcatgagccatcgcccagcccagaagctaattttttaatattgtatatggtcttatttatacttgaagttttgtgaacgtcgctaaacaggataggactaaaatttccaattctcctacactctgtcagaagcctagaactcactaaactgggctgcctttcccaaatgggaaaggtgctgacagagttggagaaaaaagaatagactcatttttccccattattggtatgtaggcattggtacagccccttctggggcagtctttgcaggataacatgctatacctgctaagattcaagctgttttcctcacactggactttaggccaaacccagtaccacgcaatgtgcaagcaagggcaggaggtaggtccaatctgacccctccctgtctcattttaatgactggacagcgctcggtgaaggctgtgttcactgtagtgggccatcatttgtttccttcttcttgtaaaagaccaagcaaatgcactctgctttttgctgctgtaagaccaccaaaaatgagtcagaaacacagaagactatttcaggcatgtgggcctggatatgctccttgagacttctggcaaacttctgctgggaattagtttgagggtgagggtacatatgtgacatttgccctagcctaagagtagcaggtaaaaaaaagtttctttcatcttttgccttactgataataccataatccccctcaattcagaccttctgattgagtgcagaggagactagacagtctcctctagacaggttgtagacacaccctcccctaacaaaaacaaaacgaaagagttcatactctg

SEQ ID NO: 14793 - DNA, 1089 bp, Homo sapiens
ccttgtgatccgcctgccttggcctcccaaagtgccgggattacaggtgtgagccactgcgcctggcctaaattggtctttttataaatgtatcccagtagtaaatgaataaggaatgatagaatatcaccaaattacaaactctgacaatctaatggatctaggcatttaacatcacaaaaagatgacgagtcactggggtactttctgatggaagaacaatcaaatttgaatgtgatcaaggcttcagatccagccaccaatttacaacctagctagagaagagaggaacacatcaaactgctctagaaaatgcaattagcagaatccaaactgtgggaaataacagaacaaacaacttggtttctgtaacaaataaattgtaagattaaaaaatagttggaaggggaacctttggattaaaacagatttaaaagccttattgatcaattgctgtgtgattaacttatttggatcttgacttaaataaatggttaaaaaaaagaacagaagaataaacattgagactactggaaatttgaacatgaaaatatatttgagattaaagctggtaaagactggttcactcaaattgtccaagtactctttaaaatgccaatgactagccttcgactaacaagccaagtaggtattaaatagccagttatgtcataaatagctaatgttcaaatagctcttacaaaggtcctggggaatttgggtaaagaattcaaagattaagattatttttataacagcagttcagttcactgtaatggatttctgctttctttgcaccacatacaaaacagagtttaggatgtcttcttaaggaggaaactgttgcatgttattttattaccagtattacagttcagagcagtgtaaaaaccttatcaatgaattgggtgatatcagcatacatacagaagactagcaggtgacttgtctgcattttccaaatgaatttgtggagagtcttatgttttttgtctttgcatagagccttaattatttactttttgaatcccccatatttacttatttctccttcatatctttttctgccaatgtgcatgttggtattta

SEQ ID NO: 14794 - DNA, 1050 bp, Homo sapiens
attcagtgtttagaaaatcatgttttgtttactaagaaagtattggaacattaatttatttgggccataatttaaaggaattattgcatagcattaatttgcatgaattgtttcaattgagaaagtgtatttttctggaatgagacatgaagacttactgatatctattataatacaatataccatatttgttcaaatatacttatttcattcaagaaaatgaaagcattcttatttagtaaacatatcttatagctgctactctaaatatcacttacaaaaaacatatttaatcccagaaagataaatctcaagagacattgttgtttgctcaagattagatgagatccaacagcccttgctggttgcatgctctgactgctaacctctgttagtgcttacaaaagagagcttaattctaaatctgtatattaagccattttgcttatacctgctctattgataaggcttaggagtttctcaagtaaaattaattagagattcagcaatgtggctttaagtagaattgactgttttcgtttgtgctatttttttcacccacagactggttgaaatagcagaatcccgttttcccagatattttaacactgaagaaaagttacttttgacaagtagtaaagttcatctttatcgggaactcacctgtgatgaagttctacaaaggtatgctgctttagattttgattttttagtaatgcgttgaaggtttatgttttatcttttatgtttcagcttctaagtgaaaaaagtctttataggttagaattatgtggagtaactttttcagtgttcttctttgttatagccttttggttgaagtctttcttgaaaaacaaaaaaaattaaatgaataaaatgttctgtatttaattaattaagtggtgtattatttatctattgtttcattaacaaattgtctcacagtttagtagcttaaaacagcaaatacatattatttcacatagtttctgagggttaagtgtctgggagtagcttagctgggtgtttctggctcaatgtcgctcaaga

SEQ ID NO: 14795 - DNA, 1080 bp, Homo sapiens
tgggcaagtgaaagagtacccaagatggaagctgtagtcttttataacccacactcagaaataaggtaccatgatcttgtcatatgcttgtggtcatacagatcaagtctggcacactgtgggagggacctatacaaggatgcaaaataccaagaggagggagtaagtgtgggccattttgcagactggctaccacaagtagttttaccccagaattggagcgttaacattatcttaggagaatcaaggaattctgaaactacacagaaacagtttgctctgtttccagaaaagtatgatatgtctacaagttaggtttactgaattcttgcaaatcattactgtaacttaggaaagaatagtttattgtttttaagttgcttagcctttgcaatacctttatttatttattttatcttaaatttattgactattttataaattcttcttttataggattgaatctttggaagaagaaattatctcaaaaggaattaaacttgtgattcttgactctgttgcttctgtggtcagaaaggagtttgatgcacaacttcaaggcaatctcaaagaaagaaacaagttcttggcaagagaggcatcctccttgaagtatttggctgaggagttttcaatcccagtaagtttttctttttttctcttttttcttttcctttcttttgtttcttttatattacattcactgacttatggtatcaaataataaaattagaggaaaatgtaaaacagatgactttttaaaggtagtacagtctaattgctatagcaaacatcgccatcatcttaaattagctcatctgctgagattattttattattttaataatttgagtctggagtagatttaaacgatgtttttaaaagttcctatagtccctccttttcttccttctcattgtttactctttgtgtgtgctttgtatcacatttctcacactgcagtaaatataaagtagtaaaacttcatgaaattgcctagatctatttctatataattaaaaaaaatactgcagttgttgttagttttgttttaagtattttaggtttagatactgtgtt

SEQ ID NO: 14796 - DNA, 1029 bp, Homo sapiens
tcactgaaatgaaaacataaaattaaaaaattttcacagagaattttatagacctttgagtatgttcagactgcagttttgagaaacagttgtagaagtctggtagaatcttttctcctgaagtttatggaggaggtgtaagtgatactctgccattgggatggaagatgcggaacctttgtctttttaaagtgttcacactagtattgaaaaaacagtaggctctgaagctgtttagagatactggataaaagtaaccgaaaaaaatttaaatactgctttataaaataaattgtggttatggctatttatgttgactttatcattgacttctaattaccacgtacagaatagttattatacgtattgtaaattatgtatcagattaaaataataggatgtttttgccagaaaggaccttaaagaaaatttagtttggccccttcattttacagatgacaatgaatccgaaaagtgacctgatttgctccaggacactcaacataggaaaggacaaacagtgggtagaatgagagatcttttagctgccagtttggggatttttttttttccacagcagaattttctttttttctgagacatacagaattacggtggactgtaaacttctttttatttatttattattattattatactttaagttttagggtacatgtgcacaatgtgcaggttagttacatatgtatacatgtgccatgctggtgcgctgcacccactaactcgtcatctagcattaggtatatctcccagtgctatccctcccccctccccccaccccacaacagtccccagagtgtaaacttcttaatgacaggattatattttctgtttctctgatttccaggacctagcactgtggataactaatatttaggaggtaacagctaatgaaagtacaattaaggtttatgaaaatagtcttaccatatgtatgtcatatttacattcattggaatatttttctttatcttttaaaacataatttgaatttttttatgcttgctg

SEQ ID NO: 14797 - DNA, 1068 bp, Homo sapiens
tttatttatttatttattttacaccatgagctgttccattatgccaagtgggtttaatttatgcaggattataccttgtcttagatactaataaatattcaaaatagaaaaataagaaactaggccacttcatttaaaataattaaggttttattaattataaattgggaatattgtgtttataactggtgagataagaggaaaaagaatgtatgtacccaaattcgacatttatttttatcttaaacataaatattcagaactgtcacttttgtgaaagcctgatgaagtcactctgattgtaaagtaggaatcctagacccttgatgtagacatagatatgccattaaaactgcagtcctgttttgctgtgtgtaacattgttgtatcacttttctagaaatgtaatttttggtttactcttattactttcatatttttactgaaaacaagcaccacaggacttctgaggtaagaaaagtcctttacaggatttttcttttccataaatgcttactgttggctcactcacatttgaaatcagattgttcttaaacctatcctatgttcattcaggtccctgaaactcacagtctagactaaacctttatcagttagtgaaaataattctagaaaaagtgtatctttcttttatgtagctctttatgacttctgaaactttgtttttattgtttctagcaaaaacctagaaacaacttaaaagttagtaagtaggtgattggctaaattaatgttgacatatccatacaatattatattgtgccactgttacaatgaatggtttagcccagaaatggattcataggttatgcaggcaagggttaattcagctagcatgggttactcatatccagccattcccaaaaaaggcctcttttcaggactgcccttgcctggctcctgggagatgagtgctgggccctgggaatactctgcctagtaagggtgttatatgcctgaggacttgagccacaggtactggtttgatcagattgtttatgcaaacagtgtgatttatggtgaagcctatttttctctggggatctg

SEQ ID NO: 14798 - DNA, 1047 bp, Homo sapiens
attgtagagaaattagatcatctcttgaatagaatctgataactgctcactgtttaattaaattcaaataaacagtttgaaatagaatattggctgtatgagagtttggtcaaaggatattttcttgagtttttcaaagacaaaatttgtttttttggttgatatttttacatatcctttgcgtttcttgaatgtagttcacttagttaatacagtacagttaatacagttaccttccaagtaaagctggagggaaaatactttctgataagaaaatatatttcaaataataaaacagtatgatactagcataaaacagatatatagaccaatggaacagaatagagagcccagaaataaacctgcgcatgtgtggtcaattgatctttgacacaggtatcaagaatacacaagggggaaaggacagcctcttcaataaacggtgtcaggaaaactcgatattcacatgcacaagaatgagattgggcccttattttataccatacacaaaaaataaattcaaatggactaaagacttaaacataagacctaaaaactaaaaactcttagaagagaacatagaggaaaagctttgtgacagcagccttggcaatgatttattggatatgacaacaaatgcacaggtaacaaaagcaaaaatagacaaatggaactatgccaaacttaaaagcttctgcatagcaaaggaaataagaaaaggaacaaacaactcacgaaataggagaaaatatttggaaaccacaaatctgatgataaagggttaatatccaaaatatataaataactccaaaactcaatagtaaaacaagaacaagcaagcaaacaagagacaatacaattaaaaaatgggcaaaagaactgaatagaaatttctcaaaagaagacatacatatggttcacaggtataagattcacaaagttactaatcataagggaaatggaaatcaaaaccacaataagataacactcacatcgcttaatacggttattatttaaaaacccacaaaagatagtaggagtgggcag

SEQ ID NO: 14799 - DNA, 1065 bp, Homo sapiens
ctgagggttttgtgtatttctgtggggttgctggtaatgtcccctttgtgtgttgtgattgtgtttatttgaatattctctcttctttcccttccttccttccttctttctttctttttttcttttttgacgaaatttcagtcttgttgcccaggctggagtgcaatggcaccatctcagctcaccacaacctctgcctcctgggttcaagcgattctcctgcctcagcctcctgagtagctgggattacaggcatgtgctaccatacccggctaattttgtatttttagtaaagacagggtttctccatgttggtcaggctggtcttgaagtcccgacctgaggtgatctgcccatcttggcctcccaaagttctgggattacaggtgtgagccactgtgcctggccctggatcttctctcttttacttattagtctacctagtggtctatcaatcttattcatttttttcaaagggccagcttttggttttgttgatcttttgtatggtttttcgtgactcaatttcattcaattcagctctgatttcagttatttcttgtcttctgctagcttcggagttggtatgctcttgtttttttggtttctctaggtgtgatgttaggttgttaatttgagatttttctatgctttagttctctactgctgcttaatattttgttataaaatatagtaccttaaaacaacaattataatttattatatctcatggtttgtgtgggtgagtaattcagataaggacttgtttctgctccatgatgtctgaggcctcagctagaagactcaaagactgaggctggagtcatatgaaagcttgttcatgccattttttagttaatgcttgtacctgctgggggtccagctggaacattcacatgtggttttaatattatcactgggtttttttatgaccctgcctccggagttatttagcatcacttctgctgtactctattagacaagactgttaaaaatctcctcctagacttacagggagagaatatgtccccttctgtcagttggaggagcatgtatcatgttgta

SEQ ID NO: 14800 - DNA, 1067 bp, Homo sapiens
ttttgcacccataaaccatccccacttctctgccccactctccactactcttcccaacctctggtaaccatcattttactctttatctccatgagttcaatttttttttttttgagatggggcctcgctctttcacccaggctgaagtgcagtggcatgatctcggctcactgcaacctccgcctcccattttcaagcgattctcttgcctcagcctccagagtagctgggatattaggtgcataccaccacgcttggctaatttttgtatttttagtaaagacgaggtttcaccatattagccaggctggtcttgaactcctgacctcaagtgatccacccaccttgccctcccaaagtgttaggattataggtctgagcccctgtgcccggccaagtgttttaatttttagctcccataaataagtgagaacatgtgaagtttgtctttctgtgtccgacttattttacacaacacagtgaccttcagttccatccatgttgttgaaaatgacaagttctcattgtttccttatggatgaatagtattccattgagtatatgtaccacatttctttatccattcatctgctgatggatacttaggttgtttcttttctcttgttgcttttaagatctttttgtacttttttgccatgcataaatttttatgtagtaaaatatatttatattttcttttattatgtctaaattttagtcatagttggagagactttcattgcactgaggttagagaggaagacactcatgttttctgcaattatgcatatacagttgatcctcatttttttgtagacttggtgtttgtatgtttacctccttgtcagagtttatttgtaacacccaaattaatgatcttgttggtttcatggtcatttgcagacatgtgcagagcagtaaaatatggagtcaccaatgtgcatgttcccatctgaagctgaataaggtgatatctaccttcttgtttcagctgtcatattgtaaacaagtgttctttttgtcggggatgccacctcttccaaaacacatggtctgagagtgtggag

SEQ ID NO: 14801 - DNA, 1228 bp, Homo sapiens
cttacactgtaataaggggtacatgcaagtaggcaggcaattatagtattctgtgaaggttcgtaaagtttagtactgtaggaaaccagaatatgcctccccaaaatgtgaaggattctcgagctgaagacagttaagatgcagtagagctctctgcctaaaagcaggacacagatttacagagaaaaatgtcttgctgtcctccctcctccctttctcccctaaagacaggatgtaaattctttactggaaaaaaaccctttatcatctcagagacggcgccagaggaatctgcaagctgactttactccattagtgccttccatatatttacctttccacggtttcccacctctggaagtctgggactgctttcctttgccttgtcacttctctaaaatttattgttctttgttggatatactatataaaccagactcatgaaccactgccttgagttacttttcactgagggcttttcctgtgtgatatgcaccgtacacgttaataaacctatctgtttttctcttgttaatctgccttctgttatagaagtctgtgctaactacatacttaagaaggttgaggaaaaaatactttttctccccttcagttctctgctgctagatcacccatagttggaatggaggctcagaaacctagtatttagctcctttgagcatctgtaattgaactggcaaagcaagagcttggggctgactgttggattagctgaagaatagtttccgtcatattctagaaaagaaagctttttttttctttttctttttctccagggaatgagtggggttatccatttattgtagtttaaaggatttaaaatccatctatatattgataagcattcatcagtttttattttagtatgtatggtgctatcatgtttataagaatattttgtttttaaaatgactagagcggtacaaaggaaaaaactttagttgttaattttagatgaaaagcaactgaatttcttaggtaataattattttaccctcccaagatacgttttctgtactccattgacttatgccaataaagtaatgttcttccaatttaataatggattttttttcttgttgaatttttttcaactctaacgttattttgttgttggagattgattaaaaaatacaaattttactgtttaaagaatgttgcctaattagttataaatctatttcatctttgcatttttttcttttat

SEQ ID NO: 14802 - DNA, 1075 bp, Homo sapiens
gtggcaaagtagttagttatattagcaggctggaggaggcggtgtctgatttgcatacagcccagggattggttttaccagatgtgtcattcatgtggcccgtgaaaaacctggccctcccaccttcgtcctttaatatgaaaatgcgggtcaccatgatgtcctgaacacgtgtgagttatctggaggcggccatgacacttggtacttgtggtgacaaggagaagagggcagcaatcgccatgttggccatgttgggtggacctagtttctaatcgccagaatttgcatatcaaagcttgccgtctttaagccgccttttctgttagaaaagaaatggtttgggggttgcttcttacaggaaaatttccaccgagaacctttaccctttctacctgcctaaaaattatttcttaataactcctatattaatgtgtttccaggaatttctccattttctctaggtttttcactttgctagcatataattcataatagtctctgatgatcttttgtacttctggtgtcagctgcaatgtctcctttttcatttctgagtttgtttatttgggacgtctcttcttttttcggttagtcaaggtagcggtttatcaattttgtttatcttttccaatgatcaacgttttgtattgtatttttagtctctatttcatttagttctgctctgatctttattatttcttttcttctgctaatttttggttttctttgttcttgctttttagttttttgaggtgcatggttagattgttcatttgaaatctttctgtttttctgatttaggtgtttattgctataaactcccctcttaacatacttttgctatgtcccacaggttttggtatgttgtgtttccattttctttgtttcaagaaattaaaaaaattttttatcttgattctttcattgacccagtggtcactcaggagcatgttgtttaatttccatgtatttgtatagttttcagagttcctcttggcattgatttctagttttattccattgtgatctaagatacttgatatgattttagctttggaaagattagttttat

SEQ ID NO: 14803 - DNA, 1020 bp, Homo sapiens
ctgcctgggttatttcttttttttttttcttttttttgagacggagtctcgctctgttgcccaggttggagtgcagtggtgcgatctcagctcactgcaagctccgccgcctgcattcatgccattctcctgcctcagcctcccaagtagctgggactacaggagcctgccaccacgcctggctaatttttttgtatttttattagagacagggtttcaccgtgttagccaggatggtctcaatcgcctgacctcgtgatccgcctgccttggcctcccaaagtgctgggattacaggcgtgagccaccgcgtcctgcctggctgggttatttcaaaaggcccatcttcaggttctgagactctttcttttgcttggtttagtctattgttgatgcttttgagtgtactttgtattttttcaaggacttcttcagttccaaaattttggtttgtttcttttttattctatcactgtggtaaactgctcctttatttcctgaattgtttttctgatttctttgtattgttttttgaaattctcttgtatctcattgggcttctttagtatcataattttgaattctttttctgggatttctttttttttttttttttttgagacagagttttgctcttgttgcccaggctggagggcaatggcacaacctcagctcactgcaacctctgcctcccgggttcaagcaattctcctgcctcagcctcctgagtagctgggattacaggtgcccaccaccacgcctggctaattttttgtatttttagtagagatgggtttcaccatgttggccaggctggtctcgacctcttgacctcaggtgatccatctgccttggcctcccaaagtgctgggattataggcgtgaatcacagtgcccggcccagcatttcttgaatttctttttattgggatgtgttgctggagaattattatgttcctttggaggtgtcatagttctttgctttttcatgttttctatatccttgtgttgacatctgca

SEQ ID NO: 14804 - DNA, 1032 bp, Homo sapiens
cacttgcttccttctccttctttgcctcaggtgtttcctgtgactagatcctgttggacactagtgttctcttctagatgttctattataggtgtgattattttggttatatattagtaattttggttctttctggagagggtgagtgtccaatctctctagttagccaccttgaatacatctctgctgaggagttcaggaagagcagaagctacctctatgctcctgctgagtcaggcaatgcctatacctttaattctaccagaattgaagtaacaaatttgtctactttagggcaataaataaagtcaatatacacctgactacaaagcttcgtagactatcaacatcagttacttctgacagcttggttgtagatgtgaaaggaaatgggttcattgtatctgatgctgccgttagaccaagctggcaccacagaagacctggaatttgttaatactgcttaactttcatgtttcctggtacaatcaggatgaagggaactgtaaccactaggtggcatcttttaattagaaaactgtgaatactccattgctcactaggatccttgtggcctacttagcaaagcaattgcctgtgagagcagctggtggcagtctttaagatgcagatttcaaataggagagaaaggaagagataaagataaaaagagaggaaagaagtgggagggcaagagaagagaaaaggagaaagtaaacaggcgtactgtgaaggaagtagtaaaatgccatcagtaattagctcaggaaagtggtatttatggcatttgttgcttaccattgtttcatttctttatttatttgacacgtatttaatgggaattaggaattctggctgaggatacgagatgctgtttctaccctcagagagttgatagctaaagggagtttaaaatatctcaacttaaaatcttgacccccttcctgtagagtatgttaaataatacatgaaataataccttttatttttagttttatttgtttcgtattctctatttcattcccctatcag

SEQ ID NO: 14805 - DNA, 1033 bp, Homo sapiens
tttctcttgttcagagtacagaccagtttgggtagaaaactgtttgcttttttactttctgggtaaggactgtttgcttttctctctttaaatgtagtaaagagaggaaaagctaataaagtagttggacctgctggttataattcatagagaattttcaagtgtgtttaataaagtctctcatataattataacagaaataagtaattggaggggaaaggttaaaatcctgtagaggtttaagaatcagttaaatatgaggcagtgtgcttggatgagacaactaactaggagctgcttctctttgctgatttctctgaactttccttttgagattttttcctctttactttcgtaatgcattttgcaactttcattaaaaaaatccatcaatgtttaaacttctaacaaataaacatatcctagtcctattatggaaatcacaatgtagcagagaatagcttgacttcagctagagagaggttaatgataggaaccctaaggattgataccaagatcatgcttgtttagtgttttaatgactccagaaggaaatggtgaaatctgctgatgacaccaaattgtttttgctgatccaaacaaggatttctgggaagcttcttcagagtatttggaatagtagaagaattgagaaatatggtggcagacacactgaacttaaagtgaaggtttacgtgaagtagcaggagtaacgtcaatacgttgaagttacaaagcctgccaaatcttccaaaaggaagattacggagtctatagtttcatgaaaggaagacttaagacaaagaacatttatacatatagcaaatgaaaactattatgggaatagttgcaattataaagttcagtgacttaaaaatatgatgtctgaatttctttttaaatgtcagcagtagtatatctaaataggtgttgtttctctcgaaatggtcatagaagattatatacccattttatgcatgctcctttcttggtacgttcttttgtcagttttctgtggtggcaggtctttatt

SEQ ID NO: 14806 - DNA, 1063 bp, Homo sapiens
attaaatatattaaatgaaatataaagtagtaaaacttattttcttttattgctttcaaaagtgattctaaaggacattaccaatgagaaattgcaaaaatgtttgtgtactaatagtgttagattaagttcttggttgatagatttcacaaacatcacttatttagatatgtaagttacagggcttgtactaatacacattttattatattggagacaaaccatgtttataagtgacctttttaaaatgttttctttatgctccctaaatatacacttagggaggaagaaggaggttttgaattaactggagatttccctaatgtgttgaatttttctgactaaagcctacatttttgtaaagaaaaagaccctgtgggataaaaaatacgataggcactatcacaggagctgtgggctggccatctatatccatccatctatctattattccacccatccctccatccatccatccatttatttaattaagttatttttaacggttggctctggagttgacattcatttattttaaaagaacagtgaatcatagctcttttcctcaagatgcttgcttttatttgcatggtggcatattgattaagtactcagaacactatttgacatatggtaagccctcaataaaagtttgttattattatgactgtacttctcccctctaatgtatagaggtaaacattttggttcctattgtgacacgtgggttataatgagttagggcctacttaagaagaaagtggaaagaaagcgggtaaaattgttgctcagatactagcatgtgggtggagatatagatatagatataggtatagatatagatagtgtaggtatttacatctaagtatattgtataaagtgacggattctgaatttgctacatttctcatttcttcagcactctgggataaaaccagcaaaaatgatgtgatctgaacagacacagtagatggcgctgtaggacttagtttttaaagaaaacagtacagccagggggagtgggggcatggagtgggaagaaaactaaagcacattttaatgg

SEQ ID NO: 14807 - DNA, 1026 bp, Homo sapiens
ttggccctttgttgtttcataaaaacgtggttgtaaagttaatttgaaccatatcaatatgactataatgtcatattttaaaattcagctatattttaataggccttaaaaatacaggtttacattaaagagtaacatagtgtttttgatactaccgtagtgtgtttatgtacttgatcttatttaatcttagtactaattgtatgaattttattattcacttttctaggtaaataaactatatcagagatacttagtaacttgccaagctcacatacctagtggttgaactagtagttgctgcaagagtttcgccagcatattaaagttgtattttttgagcacttactgtgtgccaggcaagctaaccactggaaatactatagtgtccaaagctgacctggaccctgcccttatggaccttacagttattagataccccacagacattttttgaaatctgctggattgagagtgggtcatgaagatgaatttgaatcattgtgattgttggataagccagagagccctttcaccaaaaagaaagtaagaatcatacctaccttgaatatattactgtattaaaatatttgttttagttgtactccctgtagccaagggaaaggcaagacctcctttggctacaatgagtaactaaactgtcttctagataagaatcaggaagagtaaggaaaatctggctatactataatgtcaaaattttccactgattaaatggtattaaaatatctaaagcaagaaggtgttagttagcagtggaagtctgagagattaatgtggtttgtgtacagcctaagaccatgttaacttctaattggcttctctagtgccatttggtgagatcttttagagtacagccagcttagtgataccccaaattgccaagtacccctttcatcttgggacattaattgtcaaaaatctttgaattgatttttcttcagaaagcttcactttattattttcacacaataccaagttctcatgatatttatgggtatgtga

SEQ ID NO: 14808 - DNA, 1030 bp, Homo sapiens
ctgacctcgtgatccacccgcctcggcctcccaaagtgttgggattacaggtgtgagccactgcacttggccaaaagagttcttttagagaaaacaaaagtctttgatataagcaatatgatcatacaaatggatattgtgcttttttaaaacaaacaaaacacacaggtttaaggagagaaggtatggatatactacttctgtcttccctatcttctgccatattctaagctttgcatatgttctcctgaggaacaggatagttataacttaaacttgcatttatatatttctgattaagttgttaactatggttctagatagaagaataaagaagtaaaattagatttcttaatttgatatatttaagtcccttattttgatctaatatatttgataaaatagtaatcttttaatagtagccctgttatacataataataatacctatcagatagggttgtggtgaggattagaccatatagtaaatgtaacatgtctagtgctgtgccctgaacttaacacgtgcttattaaatattaactattgctattaccattatcatcatcattaataaacatctatattttatatccccatgacttaatgtacagtataaagcataaatagtaaaattacccaaagacaaagaggaatgggaaggtccagttgattagcttcttgtttagagaagcagattattccgggggttaggaaatagtttcctgtaaggcatgtttagctttcattcatggattgatggcaatataaatcgctcttttgatgtgagaaaaatataatgatggcattacatcaattataaatttcatgagggtagggactgtgttcggtttaccttgtgtccttagctcccattttaatgtctgacccatggaaggcatttcattaaatatttgttgtcatctgtctatgttttcttctttgtctttctttagcttccaaaaagagttgtttttatattcataatttcttatttcatcagtaatgtgactcccctagaagtattggtt

SEQ ID NO: 14809 - DNA, 1839 bp, Homo sapiens
catgaaaacaacattaatctccttgtacatctccagcagagctcttgggtggccaggggcgttgtcaatgaattcttttcaaaatattttgaaaagaatcttttcttctgagcagtaggtcttaacagcgggcttaaaatattcagtaaaccatgctataaacagatgtcctgtcatccagaccttattgttccatttctagaccacaggccgagtagatttagcataacttttgggggccctaggattttcagagaatggccagtgagtactggcttcaacttagaaagttgccaactgcattagcctctaccgagagagtcagcctatcctttgaagttttgaaaccaggcactgacttctgctctccagctatgaaagtctgaggtggcattttccccccacctagtgtgaggctgttttatctgtatggaaaatctgtcgttcaggatagccaccttcatcagtgatcttagggagatcttctggataacttgctgcagcatctacatccacacttggtgctttgcttgcacctttatggaatggcttctttccttatacctcatgaagcaacctttgctagcttccaacttttcttttatagctttctttcctctctcagccttcacagaattgaagagagttagggccttgctctggattaggctttggccttaaggtaatgttgtggctggtttggtcttctatccagacatttggtcttcttatcagcaataagactgttttgctttgttagcatttgtgtgttcactggggtagcagcacatttaatttccttcaagaatttttttgtttgtattcacagcttggctatttggtgcaagaggcctagtttttgccctgattcagcttttgatacgtcttcctcattaatcttaattatttctagcttttgatttaaagtgagagatgtgtgactgttcctctttcttgaacatttaggggccattttatggttatttcattttttttccatttttttgtctaacgtgattcagagaaatgtagagttattaaatggactaattttcatatttttatgtctcagggaatagggagcccaaaggcaggcagcaagacaggagaatggctgtcctggtggaacagtcagaacacatagacttatctattaggtttgacatcgtacaggagtgtggttggtggtaccttaatagtaatatcaaagattgctgatcacagatcatcataacaggtatgacaataatgaaaaagtttgaaatattgtgagaataagcaaaatgtgacacggacatgaaatgagcacatgctattggaaaaatggcagttatagacttgctcagtgcatggttgccacaaaccctgaatgtgtaaaagaccacaatatatgtgaagtacaggtgaggtatgcctgtacgtagttggtgcctgtagttttgtatccattgaaatatactgtcactcattgggtctgcaattgggtgtaataataatatcattttattgttaatgggctttgagtcttcctctttcttctgtgatagtttgccattgtcaagttaaatttttatgagctttttcagagcagaaattaaacattaaatggtttattaaccaaaataaggcaactgcctttagactttaatgtagtacccattttttcctacagcttatcgtcttcccagtttaaaaggcttaagcagaagagtaacagtatagttaaaagtttttaagttacaaagttggaacttgcctttttttgattatatgatcccaagagtcacaagagagtaggcagaaagattactgctttatcaataggtgaaagttcaggtt

SEQ ID NO: 14810 - DNA, 1038 bp, Homo sapiens
ggctgcattcagaaatatgaagaattttattgtcagctaattcatgctgatgtacatatcttagatccagaaatataaatgatgatagtactattactacttagggctggatcacaaaaagccaatatgcacttaggatttgaaggtactttcaaatgttataaggaaacagtttcatcagggagtagttgtaggaatgtagtttggaattttgtcaagcatatcttttctgtcaatcaaaggcatggttttgtatgacacagtgtctaactcttgcttctgatttcttctgtttatatgaaagatatttctctaggtttggaagtataccaaattacatgcctaatgtgtaaaagatgtttgacttaattcaagaagaccttaattttcagaattggtgatgataaaaatgaaatactacatatatcaattgctgatagttcagaaaaataaaacatattagattctatgtagctaaaattaattgtatttaatgaacttgacaaacactatagaacaaagcagaatttaccagcttagaggactgtgtagacaagacagatccaatccttttgttaacatgaatgtgtcattaagaaggaacatgtgaactggacgttggagtacatgtagaatttggacagatgaagatgggattggggtaggagtttggcttttagcaatgaaaatagtgtgggcaaagatggaacagaggtggagatgtaggagatatttgggaacattctttccctagttcctttcctgaaagtaaggactttaggtagctttttgacactgtggtggatactcagttcaggtaacatctttttttgttttactttaacttggttgtctgttttttagttttcacttgttatacttaaactgggaagaaaatttaaaaaaacagagacaccagattctttaaattttaagagtcagtattccctttcagtttaactgaatgttaaatgttttaaaatgttaagtatctggccgggtgtggtggctcacgcctgtaatcccagtagtttggga

SEQ ID NO: 14811 - DNA, 1052 bp, Homo sapiens
tttcaaaaccaaagggacaaagatccccatgcaccttccatctatttggggagcttcttatttttatatctgtggatcctacagtcaaaggaaggcaagagaaagtgaaaagaaaataaatttgaaaaagaaggaccaaagaaatgaagatggccagaggaagttttagagaaataaaacaggtaacatttgatggagaatgatagtaccatttataacactcggatcgctgtctccagtcagaagtgaacaccaaccattccaaaagctagtgcccccaaatagtttacttggtatgtgaaatataatatgtgagaatattttttgatatgggatttaaaaattgaatttctgccctggttcatttcagcagaaatcatagtagaatttgctttactgtaattttcgtaaatgtatacctttgtagtgtatgcaatatggaagaaatttacattctattattttgtttttatagaatacaaaatagtcacagtcaggttaaaacttacatgagaagtcagagagagagtaggatcaggaaacaaaagaattgtacgttcattcagtcctcaccaattacagagaatattatatgtattatacaaaatacattgcacataataaatctctcacattttgtaaatatttagctgttgttgatttatttctgggctaatggcagccgtcacgtctctggtctgtgttgggaatgtctgtttatatgtctgtgtcacatcatctgctctagcatggaggcttcatggaagacaggaaccatgtctgtttattttgtgtgatagtaacatggagctctatatatgaagctttatttttatttgatgatgatgatggtgatgattttctgtatgaatttctttcctggcttcagattgattgaatcttctgatcactattaatccagtggaactcagaagtggagtttacttttgagtgcttagcctggctaggcagcaggcttttgcaaacacggctatatgagatcttatgccaccacaaagaggcactctcttgaaaaaagatgaaaaatacag

SEQ ID NO: 14812 - DNA, 1031 bp, Homo sapiens
agggctatacttgctaaagcttgaaacagaagaacaaaattggtcactaagaaagtaggagaggttttcattcatatccactgtgtatctgtgtctcagacaaagatatgctggctatcagaatgctgacattgcttactttcctatttttcaaagactgaacaccatacacatagcttgaggaaggatattattcttgtatacattttgacataaagatgtttagtccttggctggatatttcagttctctgaaaatgtgtagctatcctgtgagaagcaaacatcttggaaacagtatagtatagttgaaggaaacggtcctaccgtttccttgcttagacaaatcatttcatctcttcttttctcagtatttttttttctggaaatctactctttttctagaaatatgtatacaacatttaaatttgcatgtgtctgtcaacatcagtgtgtaaacatattatgttcactatgaaaacatttaggaaattcagataggcaaaaaggaaaagagatcgctgactacagcagaaaactataacattctgataaagttagataaaagccttttgggcttttatagtacatgtatatgcacacatacacatagactcacacacatacatgtacctacaaataacatcttaaaatgagttcatattgttaaaaagtgagtttatatagctaaggaagcacatctgaggacaagaacacctctattgcaaaactaacagatgatatagaactagtatggaatacaatagaggtgactaaaaatttaatggtttggagtgaaagcgtggaataatcacggtaaacacaggagtaagacacaaagatgaaagcaatttggttaacaatgatctgatatgaagttgaaaggattactggtgtctttgaggaagtggacccaacaaatcaaactaaaaaagtatttggagaagtgatatagcaaaacttcactgaaatgaggaactgaacctgcagatcaaaagatacattgaatcctgaaaattggtagagaaggtt

SEQ ID NO: 14813 - DNA, 1028 bp, Homo sapiens
cttgttggacccagttcaaaggacttcactagcattaacactctctctcctttctttctccttaacccacttctacccaattactgacattgatgggagttaaatgtaaccaggactctttgtttatatatacatctggttttccctgttccgtatgcctaaatcctccctccattgcttctgtttagcatttaatgtaaatttccaaattaattcaagaagaaaatttgaaatatataagatgagggcattaggtgatctctgagggcttttacagctctaggattctattaggttattaataatttatttccagaggatacattctgataaactaagaagttttctgtgcttgatttagcttttacttaattaggaatataaataactaaatatttaaatagataaaacttatgctatttgtcactttttcttgaagcatatttataatgatcatttaatgttcaaagtaaacctccaaaaggacttggtaactgccaaatattaccaccaaactgtagactaatcaattagaccactagtatttgaatttttttcttttactatataaaactaagaaacgtggactgaatcaaagtgaatgggagctttggataaaatattggtaagatgtttgcacttactgtctgcttttgaatgttcagatatttaagaggtaccatcatataccacgaacaaaaggttgggagtcaggaatcagggaattagtcctagctcatcactgtctcattttgtgattgcaggtcatgctttgctcttaaattttcccatctttagcatgtagtagattatttctgacccttaacttacccagggatgttttgtgaaataataaagataaccactgccagttattttttgctgctcagtaaagattctacacaaattaatggtagcagtagggtggttatttcattatttaagaaagttcttcaaagtgagagaactacccagcataggtcatttggaattgctgtttatttgttcttttaggccagcaaaagtgt

SEQ ID NO: 14814 - DNA, 1807 bp, Homo sapiens
ttatcattatgtaagtaagctcaaatctcattggtctctttatataaaaaggaaaaaaaggaaaaagagcagaaaagataaagccccatattttgctgcttctgttttgctgctattgacataagaaggcctatgtagtcctatgtaggcctttttatgtcaatatcagtctgagtaaaagcaaataatgaatttatgctgaggtacaaatataccatttggacagttttatattaacatctgacaatgtacaaaagttatacaaatttgttagcattttctcactgcaaaatattatcaaattaggaaatagcagacactagggatggtttttactatatataatgatgtttaagaggtacttaaacttgatttaaaagctctgcagtgatttacctaagatgagcctgaagagctaatagtctagtttttgttttttaatttttatttgtagcaacaagcacattaaccatttgattttttttatattttgggagaaagttgtgaccatgtggcagtttggatttgaaataataatggcaaataagtggcctgtgctgaaaattgttaggcatatctctttatggaaaactactttggtgatataaaaccaccgaggtctatagttatataatttaggcaagcagaaaaatcagacagggctggttttttttttttctttctttcttttttttcttgacagtgtctccctctgttgccaggctggattgcagtggcgcgatcttggctcactgcaacctctgcctcccaggttcaagtgattctcctgcctcagcctcccgagtagctgggacaacaggggcgtgccaccacacccagctaatatttgtattgttagtagagacagggtttcaccatcttggccaggctggtctcgatctcttgacctcgtgatctgcctgcctctgcctcccaaagtgctgggattacaggtgtgagccaccatgcctggccagggctgggtttttattaaagatttagtttcgttcttagaagttatgtcaatttctgatgagtaatctagtaataacttaatctgtctttctgaattaattctgcaaaacactgccacatactgattgttgtaaacattgttggtttcaagacactttcttattttaaccctcctaacctttcaaagattcctcattacttatggtttaagtcattccttcttgttttttatattcaagacctttcacagttgatcactgagctgtcctttaatcctctgtgtcactgcttttcagtatgaattgctaaagtttctatgatttttctgtttctttgccttttgtcaatctttgttcagtctggactctctgcctttctctcatctctacctactcttctaagccctagaatgcttcaggtaccacataaaccacatcagcataaaaccttccatgacattctattcatacatgttgtaaatgcctcttttgtgccgagctgtcagtggtcaccaaggtaaggacaggagcaaaggatgctccgtggtactccactctgatggacgaggaaaaatgataaatttacaaatattttatctcatcctatatacattttactttttatttatgtcttataatgtaagcaataaattggtacccaaatagaaagtgtaaaataattaaaatacatatgttgagggagtgcatgcccaaaatgttttactgatggggtatagaacaaaaagttaagaaaccaccgatctaattgtcaggtctgtttccgcatttgtaaagttaggtcaaggattggactagataatttccaaggtctt

SEQ ID NO: 14815 - DNA, 1043 bp, Homo sapiens
ttcggatacctggtaagtgctggtcgctctgctaggtactaggaagttgatatatactatagtttctctgaccatttacctaaaaatctgttaataggctccatttcttctaatcatccaagaaacatttttttaatttttaatttttgttggtacatagtagttctgtatatttatagagtacatgagatattttgatacagatacacaatgtgtaataatcacatcagggtaatcatgcttgagggtatggataccccatcttttagttattttaaaatgtacaaaaaattattgtaaactatactcaccctgttgtgctatttagccctatattttattaattctatctaattatatttttgtagccactaactatcccaccctccctccatcccgctacactccccagcctctggtcaccatcattctactctctatttccatgagttcaattattttaatttttagctcccacaaacaactgataacatgcgaagtttgtatttctgcgtctggcttacttcacttaacataatgaccaccagttccatttatgttgtcacaaatgacaggatctcattcttttttatggctgaatattactccgttttgtgtatataccacattttctttgtccattcatgtgttgatggacacttagggtgcttccaaatctcggctgttgtgactaggtctccaataaatatgggagtgcagatatctctttgatttactgatgtcctttttgtggatgtatacctagcagtgggattgccagatcatattgtaactctatttttagtggttttaggaccctccaaactgttctccatagtggtggtaataatttacattctgtcaacagtgtatgagggttctctagtaaacaattattactttgttttttgtgatgtaacctctaaagacaagtataaaagaaacactggaaaatactgatttttaacgctgtatgctagctattctaacaactatatgttaataacttaatatataactgttagtatatataataacagctg

SEQ ID NO: 14816 - DNA, 1035 bp, Homo sapiens
tgaccttgaggatgttatgctaagtgaaataagccagtcacaaaaagactaataatgtatgattccatttatatgtggtacctagactgcttagcagattaagggatcttcaggatttggagtataagacacactcggccgggcatggttgctcacacctgtaatcccagcactttgggaggctgaggtgggcagatcataaggtcaagagatcgagaccatcttggccaacatggtgaagccccatctctattaaaaatataaaaattagctgggcgtggttggcacgcacctgtagtcccagctactcgggaggctgagacaggagaattgcttgaacctgggaggcagaggttgcagtgagccgagatcacgccactactccagtctggcaacagagcgagactccatctcaaaaacaacaacaacaacaacaacaacaacaacaaaaagaacacactcacaataggatataactaagtcatctactccacatgtccaaaactgggaacttaggatctttttctcacacatttatccttgctccttccatcccaagttagaaatatggatgtcaacccatactgcttttttcccccctctgaatactattggagaccaagccctgctgattttatattctttttttttttttttcttttgagacggagtctctctctgtcacccaggctggatggagtgcagtggcgcaatctcagctcactgcaagctccgcctcctgggttcatgccattctcctgcctcagccttccgagtagctgggactacaggcgcccgccaccacgcctggctaattttttgtatttttagtagagacgaggtttcaccgtgttaaccaggatggactcgatctcctgacctcgtgatccgcccgccttggcctcccaatgtgctgggattacaggcatgagccaccgcgcccggcctatattcttcatttttaaaaaatctgccttctctacattactggtacaatttattcattcaaggagtacttaattatatagtattcca

SEQ ID NO: 14817 - DNA, 1060 bp, Homo sapiens
aggtcttagtcacagtcacgtcctaaattatgacagtttactttggtctttcggcctctagctgcctccaaccccttctctatacctcatctttttcctattgtctgtgatcaaaatgttctttaaaatgaacacagatggttttctttctatttatgctgtttgtcatttgttgagatgcttttacctgttttttgatattttgtcaaatatggtaaatttttggccattaatttttcacgtactgtcctgccctctcagcctacccatggtactgtatttacatgtaagttcaaccagttaatactgttccacagatcagcgaatctttgctaattttatttgtcttttttctttctgtgcctcagtgtggatattattgtgtgcttcaagttcattatctttctcgtgccaaatctgctattaatcccattattaatagtaatatggaaattgtgaatgtgatgctgatgaatgcagaactctattgtctttctgtaaagaatgttgagctttcttctaggaagtagtttgagtgaattgtggatcagtacaacccttttgacacttgttagagtttgtccagagttgtttttactctagggcagtggctctcaaagtgtggtacctggaccaacagtatcaatgtcaccttggagtgatgcttagcaatctgtgttttaatacatctctaagttattgtgatgtactcttaacttttaaccttttacccctttagaaaatataagtgcagcttactgccagtgcttttttaacgttacataaacatgggtctttgaggctgaagcaaatctgactgattttcaatgtggaaataaaatataaaaactgttcttagagttatttttaaactgaactaacatcagaatcacctgaatcatcagaatcgtctatttcggaaaaattagattcagccaataactgtttgagaactgtgttaacatcatgtgtaggaatgctatgttttctaggatttgacatttttggtgattgagaattactacattttgtaaatggatatatcactaccaaaaacaga

SEQ ID NO: 14818 - DNA, 1324 bp, Homo sapiens
tagatcatctcattacctaggtattaagcccagcatctgttagctattcttcctgatgctctccctcttcccatcccccaccatccaaggccccactatgtattgttcccctccatgtgtccctgtgttctcatcatccagctcctacttacaagcgagaacatgtggcgtttggttttctgttcctacattagtttgccgaggataatggcctccagttccatccgtgtccctgcaaaggacatggtctcaatttttttatggctgcatagtattccatggtgtatacgtaccacattttcttaatccagtctatcactgatggacatttaggttgattccatgtctttgctattgtgtatagtggtgcagtgatcatatgtatgtatgtatctttataacagaatgatttatattcctttgggtatataagcagtaatgggattgctgggtcaaatggtatttctgcctctaggtctttgaggaatcgccatactgtgttctacaatggctgaactaatttacactcccaccaacagtgtaaaagtgttcctttttctctgcaaccttgccagcatctgttgttttttgactttttaataatagtcattctgactgatgtgagccattgtggttttgatttgcatttctccaatgatcaatgatgtggagctttttgttatatatttgttagctgcatgtatatcttcttttgagaagtgtctgttcatgtcctttgcctactttttaatgtttttttttccttgtaaatttgtttaagttccttgtagatgctggatgttagacctttgtcagacagatatattgcaaaaattttctgccattctgttagaaactataatcagcttgatgatagtttcttttgctgtgcagaagctcttcaattagatctcatttgtcaagttttgcttttgttgcaattgcttttggcatcttcatcatgaaatctttgcctgtgcctatctgctgaatggtattgccaagattttcttcttgggtttttatagtcagggttttacatttaagtctttaattaatctcgagttgatttttgtatatggtgtaaggaaggagtccagtttcaattttctgcatgtggctagccagttctcccagcaccacctattaaatagggactccttttcccattgcttgtttttgtcagatttcttgaagatcagatggttataggtgtgtggtcttattcctgggttctctattctgttccattggtctatatgtctgttcttgtaccagtaccatgctgttttagttactgttgccttataatatagtttgaagt

SEQ ID NO: 14819 - DNA, 1047 bp, Homo sapiens
agttatgcatgtatttagcttagtgatgttgccaaacagttaagttgttgaactaatttatattcttaccagcagtgttggagtactggttgctgcacattcttgttgggcttcgtatttaactactatattttagctactctagtgggtatattgaataacatgtagtatgctgttaacttgcctttctttgatgattaagcacattaaacacttttttcatatacttattggttatttgtataattttggtgaagtgatgtattgcttctcgacatgctataaagaaatacctaatactgggtaatttataaagaaaagaagtttaactggcttatggttccataggctgtacaggaagcataacggcttctggggaggcctcaagaaactttgaatcatggcaaaagacaaaggggaagcaggtgcatcttacatggcaggtggaagagagagaggagggatgtgctctacacttttagcaggaggaagagagagaggaaggaggtgataacacttttaaacaaccaggtgtcgtgagaactctatgaggagaacagcaccaaagtgatggtgctaaaccatttatgaaggatccacctccatgattcaaacaccttccaccaggccccacctccaacattggggattatacttgaacgtaagatttgggtgggacacagatccaaaccataccaagtgcctactcaagtttttgtccatttgagttgtctgcctttttcttaatgacatgcagaagttctttatatattataaataccaattctttgttgattttatgtactacaactagcttctctatgggtatatttttattagttactcagtttttaaatagttatccaaactttctatttccttttgagatctttttaataacatttttccagaaagttgttgatttatcttaatttttaaacctactgataaaaagttgtttaatctatttttggtatcctttcaattattctagaaaattattagttgctatcgctttaaatattgcatatacaagtatatatgagg

SEQ ID NO: 14820 - DNA, 1120 bp, Homo sapiens
gcagcaggcccatttgagtagttctctttcactctgatctccttagaaacctatcacttttacctttaaatgatacatttttaaaaaactattgttgttgttgaatgggatttccctaaataagaagagccatctccctagtttcaggattgtggcttctttaattgtaatggagttttaatattatatctacggtggaaatcagagtcaattcaatcttattttgcatcccctgtatgctatcatactgattaggggtgtaacaaagaatggactgtgatttttgccattttgtggttttcactggagattttatagtacagagggagagaatggcatagtaaataaaagaatgagcttagaagtgagactttgtgggtttaaatacctgctctctaatttatcagtttgtatttaacttctcaatatccttatctgtaaagtagaaataacagcactatcattcatcactttctatttccttatctttttgccttttcttcatggaagttttcacttccaagacattatgtttttcttcatttatttacagtaatgtaaaatcctggaatacatgtacctttttggttcactcatgtatttttagtgtctagtgtagggtttgctacataatagctcctaatattcgttccttctactgggaacttcttccaacatgaatatccatatagcttatccccatgctttatttagttccctgctcaagcatcacctcactagagagaacttgctagacgacctcttctataaaatagcaccctttagttttctctattttttcctgctttatttttcttcataatactttactgactgctaagtagtaacatcaatttatttttatattttcgagtgccttgcaaaaattagggtcttcataaatgtttgtttaactgaaattaattatcttagactattctatcttattctcatatgtaataaattaccagcttgtgactgtttatttctaggctccttcaacctattcatttgtttctatgcttatttccacttcttttttcactacactaattcagttaactgccacctgttttgtgaacaattgagtagtttctcaattttgttttgttttcctcca

SEQ ID NO: 14821 - DNA, 1049 bp, Homo sapiens
ggttgtaatatctgttaccactctatttacttggtgtgggcgagtttcaacaaggattagattttttaaattaattctctatatttttatgggggagaaattgaagcattccattatattgtaggaattcccggaacttcttagtattccttttctaccttgttaaaccattaatttgtttctatcttattcattttacttgaagacttaaacatttctgtatcactgacagccactcaaacagtactcataaaaaatgtgtcataaacatgtactgagtcaagtagcaaaaccttttaaattattcagctttttatgtgtctggattttgagtcatagacttgtgtgtgccatggggtataatgaatgggtaatggactttggagtaaataagcctaagttcaaagtctgattcttccatttaccagctgtgaaaacttgggtaattattctttgggcctcagacgcatctctgaaatgaatataataatccctagcttgtggagttgctgagaggattagagataaaatatgtaatgttccttgcatatagtaagcattcaatacatggttagttattaggcattcagtaataattgagtggatgactgcttcagggaaaatttggtggctgatttactgaaacacccagtaaacatatatgaaaaaaaaaaacacaccaaaactgacttttagttagaacagtttagagaaactgagagtcagtttataaaggagccttgcaaggaaactgaaaaggtgaaatagacgggaacaaaacctacagagtaccgctgcagtggagaaaagaagtttcagaatgctagaatggtggcagtggcaaattctatagtgaattcaaacaagaaggtcaataattggtcatctctggatttggtcacctttgttatttcccaatttctgtatattctttttatgatcatggttgacaaaagtatagcgctgaacataagacatgctaggaaggaaaatgatttaggaggtacagttgattcttgaaaatcatgggtttaactgcatgggtccaa

SEQ ID NO: 14822 - DNA, 1035 bp, Homo sapiens
agttgggtagctatggcaatttcttaaaataagacaacaatgaagtttgttgattgactcttgaatcagtttatttgcttggtaataagagtagtacccaataggtagtttttcaacctatactcctctccattcctcccacccctagtagtccacagtgtctattgttcccatgtttatgttcatgtgtagtcaatgtttagctcccatttataagtgagaacatgtattgtttggttttctgttcctgcattaatttgcttgggattatggcctccagctttctccatgttgctgcaaaggacatgattttattcttttacatggctgtgtagtatttcatggtatatatgtaccacattttctttatccgatccattattgatgggcacccagattgatactatgtctttgctattgtgaatatcctggtgatgaacatatgagtgcctgtgtctttttggtagaatgatttattttctttcaggtatatccccagtattgggatggatgggtcaaatggtagctctgttttaagttctttgagaaatagccatctgttgttttttgacttttagtaatagccattctgactggtgtgagatggtatctcattgcggttttgatttacatttttctgacttttagtgttgatgggcattttttcatgtttgttggctgcttgtctctcttttttttttcttccaactcttatttcaggttcaaggggtacatgtgcacgttcattacatgggtaaattgcatgttgtggggtttggtgtctagataattttgtcacctaggtaatcagcataatacctaataggcacattttcagtcctcacccttctcccaccctccaccctcaagtgggctctattgtctattttcttcgttatgtcctggtgtactcaatatttcacttgtacttatatgtgagaacttgtggtatttgggtttttgtttctgcattaatttgcttaggataatggtctctagctccatccatgttgctacaaaggacatgatctcatt

SEQ ID NO: 14823 - DNA, 1049 bp, Homo sapiens
ctgtctgtacatgacctgacccttctctctagctgcctttacaatttttgtcttttacattgactttggtgaatctgatgtctgtgtgcctcggggatggtaatcttgtatggtatctagctgagcttctctgtatttcttgaatttacatgtcaacgtgagattagggaaattttcgtggactgtatcctcaaaaatattttccaagttgcttactctctttttttctcactcaggaatgccagtgagtcatagatttgatctctttacatgcgctcatatttcttgaatattttgttcattttttaaaattcttttttcttggtgtctgactgagttgattcaaagaactggtcttcgagttctgggattctttcctcagtgtggtctgttccactgttaatacttccaattattccaattatgaaattcttgtagtgaatttttcagctctagaatttcagtttggttctttctgaaaatggctattttgtctttcagctcttggatcattttactggattccttggttgaggtttcaactttctgctgaatctagatgagcttccttgccatctagattctgaattttatatctgtcatttcagactggttaagaaccattgttggggagctagaggactcatttgtagttaagtggacactctggctttttgaactgccagaattcttgcactgattttttttctcatctgggaagtttggtgtttctttatctgtgatgcaggttgagtatagtcagttggcgtcatttctgggtattttcagagggtcaggactctgtacagggtctttgtggctgaattcttgcccctggtttcatggagttaggggggcatattaccaaaatatttttggtggtgtacttcaggctgtgatctggtagatggcacttaagagtaatgatcagtagctaggcttttattcatctgtgtgtcttctttgtatttcctcatgttgcagtcatgccctctgtcaccagtacgttggggagagagatgacctttccaccaggtttgcttctgggc

SEQ ID NO: 14824 - DNA, 1059 bp, Homo sapiens
ctcctgcctcagcggtcagctgggttagagcttcttggagggagatggggagccctgggagatgggtgtctatggctgtgctctgctggcctctcccacgcacagaggtccttggctccatgctggctgaagccctgattctgtctactccctgggcatatccctttgccagctcaaatatccatggtggatgtgggttcccctgtagctaggattccagaggtccacagtgatagtgtgcagtcccacagtctcttcattaaccctctcccgtggagctgttcagggctgggaagtagccctaggctttgggtagctcacacagggttcccagcttcctgtctcatcagtctcagtatctctgtcacatctccatctactttcagtgtttcttctctgaagatccgttcaaattgtgttggtttacttgaaattttggtctctcttgtggggagcagtgcttcttggcttcatctagtcagccatcttgtcctttttcaaactttttttaaaatttgggtcagtcctctgaaaccctgccactgctttatcagctaagtttatggaatattctaaatcttttgttgtcatttcaacagtgttcacagcttcttcgccaggagtagtttccatctcaagaaaaaaagtgttatccataagatagatccataactctttttggtaatccataagaaataaatgcttttctctcttttgttcaagttttatggtgagattgcaacaattcaatcgtatcttcaggctctacttctcattctagttcttttgctgtttttcccgcatctgcagttacttccttcactggagtcttaaactcctcaaagtaatgcatgacagctggaatcttcttcactcctgtgcatgttgctattttgaccttttccagcgaatcaggaatgttctgaatagcatctagaatggtgaatccttcccagaaagttttcaatttgctgtacccagatccatcagacgaatccgtatctgtggcacttacagcctcttgaattgtgtttcttaagtaataagacttgaaagttg

SEQ ID NO: 14825 - DNA, 1025 bp, Homo sapiens
ctcaagtgatcctcatgccttggcctcccaaagtacaagtattgcaaatgtgagccattgtgcccagcctatttgtcttcttaagcctacaataagaatgttgaaaagatagtttatttatataaccccatttgatacaaaattcacatcaaatagagttaattaaataatggatgtcccttgttcatcatttcaggcagatacaaataccacttttagcaaaaaaggtaaatctcttgttttaagttacccagacgaagattatatagaaagttagggtaatgacattcccaaggcaaaagttcttcagggaaaaatagtaagccatttcagtttctcaatttctggagggcttatctgaagggattgggatgtctaatattgcaaattaggcaaattgtgcacatttatcaccatgcaccttggatttcaagcagaaataagaggaggatttgactgaagggaattaactttggtcttccaaacttaaatatataccagatgtgtactgtggaaggatcttcctggttacagtataacctctggttcttttggactcttgctaacttaatttacccagttcttttcccgtatagaaattagactgtggattgtttctgtggattatactcatggatttctgtggattatactcatggattttattgttttatcttatttacagattctgacttttttcttttctttctctttttaaaaataacttaagatgtttgtttggaagattggcaggatgttcgttttacagtgttcaaaaatgagttgtttgtgttttatgtatatgcccaaatactctgtgaaaacataaactgataaaaggaaaattaattcctatctttataaagtgaagaattgtttttttttaacaaattaacatatcctgagttacattcttgagtgagatatgagaatttaaacatataacatgaatacccccagttttgagtgctaatatgcaaggaaaggctttcctcattactgttttacaacttttatgctccata

SEQ ID NO: 14826 - DNA, 1028 bp, Homo sapiens
ctcaaatgaatatctgtttcctacctttctccctcaagatgcagtggtgcttttattatttgattttgtaaagcctgaagggcagaaatatttcttaagttttccattgttaactacaaacttggctatataaaatatacaaatcataatatctgtatggttatttttattgtcatttctttaacacacaaaatttatcacatttatgcaagaattttttaacttagaaaactcaaaattgatatgtaaattgggtggtagcaacaatgtgtgggatgtggtacgtggccaatgatgtgttggaggcagcccccaccagctcccaagatctagtgattaaattttcagaaattttgtgagccagttatcagtaaaaattaaactatataaacttacaattaaataaattatttaaaaacaaagataatactcaaaactcagtaattatgttttactacattttattatctatgctcttgaggttatttgtgtctcttgtatctgtattggaaatactatataatggtgtatactattgtatatctcttcacaacttcatgttcattaacatcatgttgatagcttcaaattagccatggtagaagtattaacaccatgaaaatcagcaaacacaaccaatcaggggctgatttattgttttgctgattgtctagacttaagaaagtgatggaaaaaatgttaataacacatattaaaaagtgtgttatatctggccgggtgcggtggctcatgctgtaatcccagcactttgggaggctgaggcaggcagatcacaaggtcaggagatcgagaaccatcctggccaacatggtgaaaccccatctgtactaaaaataaaaaatttgctgggtgtggtggcgcatgcctgtaatcccagctactcaggaggctgaggcaggagaatcgcttgaacctgagaggcgaaggttgctgtgagccattatggcgccactgcactccagcctggtgacagagcgagacttcattccaaaaaaaaaaaaaaaaaa

SEQ ID NO: 14827 - DNA, 1075 bp, Homo sapiens
ccatgcttttgtttccttgagaaaaggagcgtccctcttagagcatagaataaacattctttgtgaagtgtgacttatttatgcttcaggggttgtcagtgtatacacaatagagaaggtgatggaggctccgaggcatgccaagtcagcactttgtgcatgttgaggccaaagagcatgttaagcaggcttaaaaaattttaacaagtcagaacattttacaatttccatatttatcaaacatgtcaggggatgggatcacaaagccttccagggattaactgcctctctgacttgaactgttttattaagatggaagaagccaagttctcaacaccctgtgatttgctctaataaccacaagaatcagaatgtaggtgatccttgctgaatgaaagcaatcctaaggctaaatgctctttgaatggggaaaaaaaaaaactctctcaacagatgaactatgtgtgaaactttctaacagagcttaggagtttgaagtttatttacctagagcttcagttttattaattctctggttggtggttcttgacctttgacacccaaggacttagactgtgaagcctaaatagaaggcattcagaaacctgaagacattctcaaagaggggtggccattggcttttttggggttggcaaaacatcctagagttattatttgtttttacatgtttggggtttggcagatcctaagatgcattttgccaagcactttcctttgaattttagtacaggaatatcttgggtggaatttaattcgtgattcatttgcattatactgatcagaatgccattttggaaaagatatctgatgactgagaaatattaggagatttacaatttttaagtaccaactttttcttagatgggaagaaaaatggaattcaagccccaattattttcagtgagatttggaacttggaatcttgaactaagtagtagtttccaaatgtgtctgtattactttctctacaaaagcgaaccagactacttccctggcttgatctgcaaatctttagaaaagttacagagctgatatgcaaccttgggctggtatt

SEQ ID NO: 14828 - DNA, 1083 bp, Homo sapiens
aaacttgatcttcatctgcagaaaaagggaatcaaatctactgctcatttcattggaaagaatatttatttatcttgatgtttaatcgagctgtgggctctgccttttaaatactgattagttctccaatagaacagttcttttgggaactgggaagcttttattttagacatttagggtatagttttgaattaaaggctatttttccataagcggttctgaaaggttaagttttgtacgaaagaatgggctctagaaatttactttggaacttagatcacttcattgggaatgcctaagtgaatctttgacataagttgtccaggtgtctttgctttattctttggaatgaaaaaatgtatgggtcaaacagaacccatctgtttggaatatctttagtatccagactctgacctccatgtttttggttgtgagaatgtcagcatagtacctggcttctagaaaatgctctataaatataaattgcctgggtgaataactgaattaatgagtgacttaatgatagagactgagaatgagaagatagaatggttgttctggaagtgattgcttctctccagctaagcctttaactctgggctgtaccatcagtagtccttgcatactgaagtcagacttttctggtcaagaagaaccttttaggttcttgataaaataccttttattcttaattttcctgtaagtacctgaatgtattatcttgaataactccaattcaggtccttagattcctcacgttacttgaaattctttgtttcctctaagagttcactgtatctcacaaatatcctgatataattctgttggtaaatattgatctcactttgctctgagatcaggctgatgtatatgtgtggtaggtaataatccctatttaggctgatacattgttcacatatgcacatattataatacacgcaaacatacagaaatacacactttttccctctgaatttttggaattgaagacatgatactcctttatccttaaatgtttccatgcatgtttcctgaaaacaaggacagtctcttatacaaacatgatgtaattatcaaaaccag

SEQ ID NO: 14829 - DNA, 1055 bp, Homo sapiens
tctctcttgatgaatgcattcatacaattttagaattgttgagtatcaatataaaaagctattttttctgaaaattagtctccttataatttgtatttttcttaagttcatattttttagtaaaagtgtaaatttcataatttttattaaaacatttgcctccctaaagaaatttaactattttggttttttttttaatctgagaataggagtagggaaatttggagtctctaaggcatgccatgtagaagtttttgaacatttatatagaatggattgactttttctgcttgttcttctgtctgttgcctagtagatgtctctaactggatattcaaatgacacttcagaccatctgaaacttcacgtattatttccctcccaagtaaactagtcacccaaaccatatacacaacagtcagactcatttgctcacagctttaaagcaggttcttttccatttccactgctattacctattccaagtgccttgcacaactttgcctaaggagacactaagaattcttcattgaagagatgaagaaatgaatgaatacagggatgagttttcttcatttcattgcttctgtctagaccactggaaaaacgtatcttcctttattctgacctcttctaattcatgttctacaaagttatcaaaatgttattcttaaaatgcaaatcattcttaaaatgatatacaaacacacatcattccaggattcatttagtttagtgccaaggcctttcatgctaagttccctgcatctttctggtcttacctcccaccatgtctctttactgactttgttgcatcatcacgtggctgcatactccatttcctcccatgtgctgttcattctgcagaacatctcactgaagctttacctggagaactctactcactttgcctgtcggattcagatgtctttcctacttgttctcatagacatttatgtacagtctcgtgactcttttcatattaaactgttatcatgactgacttacttatctaggggctttctcttaatcaacacaggttctttattcctgga

SEQ ID NO: 14830 - DNA, 1029 bp, Homo sapiens
aacttaatgctgcggttgttctgcttagatggaattgtgtggggctgtgccaatgcctgtattgagaaagcccagtcgagcagaagagtttttggtttctgcatttagaactgccgaacaactgaggaaaaccgattaaatctggaaggtggcagctcacttgacaggcttctccaggcacctttgaggagaatcaaagataaataaacacattttatgagaggagtatggggtgagagggagtgtttggacaagagttaaaatttcaaagggagggggaagttctttttgacttttctcctgattagactcttgcctcatgtctttgttaatgtacaaattagagtttgtccctgtctacatgggtaagcttgatgggaaaggaagaagatagaagtatattttcaaagacctcaactatagaaggtagaaggaaactgatcaaatatgaatttctttattagaaaaaagtggctttaaaaactattttataagtcatattggatactcatgtgcctgtggaacatgcaaaaactctggcctgttgcacagaggtttgattttgaaactgtctaattttatttatttaaatttttttagagacagggtctcactgtgttgcccaggctcttgaactcctgatctcaagcaatcctcctgtctcagcctcccaaagtgctgagattacaagcatgagccactgcacgtggcccaaagtctgtaatttttttcagtaaagattgatggactttcattacggcctggtctagtgtgcagtgagttgccttgaggtcaggtagtacttgacaccccttatttactgggtatggaccctgttctctcatccttccattgtgctttactctttttttctccgtgaacaatttttacttgagcttgacttacctcaaaggggctatgaatattgaattggctaaaaataattcataacattctagatatatggagccttagagatcattgccctcttccccattttgcaaagagtaaataaagtgaagcccaaaa

SEQ ID NO: 14831 - DNA, 1025 bp, Homo sapiens
agtcccttggaaggtaacaatgttattacatgtgttttattaagcaagacaggtaaaatttaggcaaattaagtggcagaaaggaagagacattaaaacatttattctgtgacttgcgcctatatcatagagcgtgctcctgcattagggaaataaagaaataaaatgcttctcttttgttatagacttgatcatggtgcctatttgggtaattgtttatatatattcatatagttttatatattttttattttttgattatgagacacaaaggccttccaacacaaatttcaatgtatgaaatatctcaacttaatagctgaaggataagatcctgggttataaattctccattaaatgttgcagttatcatgatcaacagattggtgaatatgtctggtggctgctcagtattggtctagatagaatatactatgggaccaaaaaagatatgaccgtggagagctcactttggtggccacacactgcctgcaggctgcttgttctctgccactctgttttttgggaggactttcctttccctctcatagaatagcaaatttctgctaaaaagtaataaatttgctcaaaatatcaaaaaggtacgattagaatatcttccatagtaaaagagattaaaaataacctagactcttgcattagaaagcagagggagacatgacaaattattgcattcaattaacttttcttttacttactgagtgcccagaaattgctttaacaccctgaggtgtgaccataaggtaatgaggagtgatttttaaaaataaatataccataaggtacactgtttaaatgagtgctattcttcaatgtagccactctttacactaatccaacgatgctgtcattgcaagaaatatttttagaacttgtcctttcgaattgccgttagaagccatttatggactatagaagaaaacagtctcacattgacttaaagtcgcactacattttttaaatcaacccctcccctgcaaagaaatttattacccaaatagatt

SEQ ID NO: 14832 - DNA, 1045 bp, Homo sapiens
agcctaaaaggctgcaatgtcacttagaattttaaaagtaaactgtatactatacagctgaaaatatttaattttatagaagttaatataaaatgacttaagattttagttgtctataaaatcaaaatctgcctcagtgtcatgtgcttgtgatgtgggctttggagctgcattaacaaaagtacatgtcaagatcaaagatggacatattcgctgggtgcggtggctcacgcccgtaatccctgcactttgggaggccaaggcaggctgatcacctgaggtcaggagttcgagaccagcctgaccaacatggtgaaaccctgcctccactaaaaatacaaaaattagccaggcgtggtgtcatgcgtctataatcccagccacttgggaggctgaggcaggaaaatcgcttgaacccagtgggcggaggttgcagtgagccgagatcatgccacttcactccagcctaggtgacaaagcgaaactctatctcaaaaaaataaaaaaataaaaagatcgacatattcttcctatcgctctctgttctggtcagaccaccttttgtttgactgccatgtgttcacaaagatttttgataaatgttcatttaggagggaaccaatcagattatagattggaaatcaagtcacctgaagtacagttcaacaagctgagattacttagcctaaaaaagagaaaactttggggatatgtttaagatagacttgtttaattatataaactaaccagttaatagcatttcttattggaaggatattaaagagtttacagagtcaaagagaagaaggaagaatcaggctcagaaaggacagggaaagaacagcttaagagggctcagtaaacctggcagtcacattcttctgggcttcactgccaaagttatcacactccagcaactttcagtgtttttgttaagattcaaaactaggggatctggcttgggtcatatgttcactttttggctaaagaatggcagggaatcttgactcataatcccattaggctgcattcagtggggtagagg

SEQ ID NO: 14833 - DNA, 1048 bp, Homo sapiens
acaacaatgatgatgtcatttttccttcgaaagttttatgggatagatcaaatttcctatgaaatgagtatgttagataagaaaacataaagcataataaaagtaggactcctttcttttaacctgcctaactcatgtttatcctttatctcaggtgtcatcttcttcatttggccttcctagaccttcccaggctggtctgcagcccctcccatgtgctttcaaagtaccttttatcacaagacttatgactcagggtcattccattcatatgttggtttccccagttaattttgagtgcttttatgtcagaagcatcctttaatttccttattcccagaattaaatgatgcttggtaaagctattaaagactatctgttacactgaaatgaatataaagaaggaaaaactagttaatttaacttttactagttaatgaagtgttttttttttaaatgtcatatgacatgatttctatagtactggaagaaaaaattttttagagtaaaggaaaccacagtttgaggaaagaagatagattgctttgttatgaccttacatgcagattgatttacatctacctacccctccactctcaaactccttttcagagttagactcttttaagccctttaagggttacgtatttctgagtatgtgatttctgtcaatatcagaaattatttccattggcaaaaaaagttatgaaatgatttctataatataggtttacttttgttgcaagtaacttttcattctttatgtttttctttctttcaaatgaaaatattatcttctatatttaaatttgttccttgagttagaaatataatattttaaatccatgcttaatttaatttagaagacatctccaaggcctaaaattgacttgctgttttgtaaatcaacatgacaggataaacagaggccatagtttatttgggaagcagcatgatcgtcatgatttaataatagtgataattatatgtaataagtaaaagtaggaatctaagttttatgaagatggtttttaatgccatgtgtttt

SEQ ID NO: 14834 - DNA, 1046 bp, Homo sapiens
attttggataattacttaccaaacttatatgcaaattattgatgagagtcagaacacatcacagtttttatcaagtctccactaaaaaaggggttgggggcttgcagtgagctgagatggcaccactgcactccagcctgggcgacagagcaagactctgtctcaaggaaaaaaaaaaggcgcggagggcgagggggtggggggggagttattatgctgtctgagatggagtcctaaaggaacactgtgatttctgtggacaggtgactggctggatggggatgagagagctgggtacttgtcccaactttgccactttctaagttttggtgtgtttttagcatgtcaccttacttctcttagctgctattagtgtccccatctgtaaaatcagtctgatcaggctgggttagatgatctccaaggtcttttacaaatcatctaattctatagcttgtgtagtcttctgtcaggatttcttgttcttgaagtccctagttgacagataatggtgtggaaggaaatgatacatggcagagtcctgaatgaccaaaatggactttgtccacacttatgtgctaatctccaaagaagaagaaaatacaaatgggccagcggccaaacatgaaaatggtgacagtgagcaaaacattgaagcagacagctgaaagcttcatttcctggcccggctgccatgagaaatgctgtgcttgccaaacccttcaggctgtcaaggccagaactttggctagctcttattttgagctccccccataccacacacacaaaccacacaggaaaattgtctctctccctttatatttgtgccttttggctacacttctatttatgccaagtccttgcctaatctccttccttccagctgtcactatactctgcctgttgctttctgggggctttgaaaagcagctgcaaccttcagaggaagcgcagggtggttggcattggtggaagggtattgtaagtgtgtgtggactctatcagaaccaaccgtcacttttacctggtttatggacagtccaaac

SEQ ID NO: 14835 - DNA, 1062 bp, Homo sapiens
tctatgatccactttgagttaatctttctgaaaggtgtaaggtcagtgtttagactgatgtgaatgactatttggtccagcatcgtttgttgaaaagactatccttctgcattgaattgactttgcttctttgtcaaggttcatttaactatatttatgtgagtctgtttctgggctctattttgttctatttatctagttatctatattttcaccaatatcacattgtcttgattactgtagctttgtgaatgtatgcatgtattcatttaagagatgaggtcccactatgtggctcaggatggagtgcagtggctattcatgggcttgatcccacttctgatcagcatgggagttttggagtgctccagttccaatctaggccagtttattcctctttaggcaacctggttggttccctgctttcagcatattgatgctgaactaaatgtggacatccaattggcatagcacacaacagcccagaactcctgtactcaagcagtctttctgctttagcctcccaatagctgggactacaagtgcatgccaccatgcctgtcagattactgtagctttatagtaagtcttgaagttgaagactttttttttttttgagacagagtttcactcttgttatccatgctggagtgcaatggtgcaatctcagctcactgcaacctccacctcccaggttcaagcaattctcctgcctcagcctcccaagtagttgggattacaggtatgcgccaccacgcccagctaattttgtatttttaacaagagacagggtttcaccatgttggtcaggctagtctcaaactcctgactcaggtgatccacccaccttggcctcacaaagtgttgggattactggcatcagccaccgtgcccagcctgaagacttttatttctccaactttgtttttctttgtcagtattatgttggctattagtttgtttcctttctagataaactttagaatttgtccatatccataaagtaacttgtttggattttgattgagattgcaccaaatttatggattaagttgggaagaa

SEQ ID NO: 14836 - DNA, 1043 bp, Homo sapiens
gatagtataggggagagagtgtaaaccaaaagttgagatctgtattctgttttcagcttcattttaatggcctactggaagaccaggtacattatttctgctcttttttttttttttttttagtttctccagctatacatgaagaaaaaagtcctagtccactagccaacctgacaggcatgttgtgaaaactaatgaaagtataaagttctcatagtccgaagcataaaaggtgctgtaaccaataggtacaaaatactaattattatttttacagttcagcatagtaaatctttggagtaaatttttttcattatatttactagtctttcctttaagaattatttgccaaatttaactctttttctcttttaattagacccagagtatagtaaaaaaattgatggtttggctttcagaaagagttattttgttatctgtaccaaattttcaattaaatatttttagctgtgaatcaagtttcatcttcaaaagtgtcttcaattttaaataatttgagaatacttacctggttagtaggctaaactaacgtagtagggaagagagtgtaagaaaagtgctgttgaattcatcattcccattagcaccagtctgcggattcccaaacatgtatttctaggctcagatatttttcctgatccccagacttattaatccaggaactagtcaacttctttacctggatgccctgtaatgatttgtagcacaacatacataaaacttaatattctgttcctgaatttgctctctctgtgaatggaatatctatccaccccatctctcaagctgaaaaaccctcaccccatttcctcaacatctgtagatttaactgtcttaatactttatgccccttatctccatcccacaattactaccttaattcggcttttgctcttctgtcaccgggcagctgcaattgtcttcctgccaccagtctggtctcattacagtctactctcgataccatttccagattaacctttacaaaatgcaaatcatagaatattactgtctcattttaa

SEQ ID NO: 14837 - DNA, 1041 bp, Homo sapiens
attgatttaaataatgtctaatgaattttaagttcttcatgtggttagtgttttacattttatgagtaataatgaaatggaagattcaagcaaactccattttcctgagaaatatgcatctctttatttcccaatgttaattatctaaatgctgttagttaatgctatattactacaagcttttttttaaaaaaagagacaatatcctttcttaaaagaatgttataaatataaaaaagtacttgtgttaaataaatgttattgttcatttttagagaaatcgagtgttttcttggcagagatgggagaagaaatgtaattgcttaaataattaagtattcatgcttggaaacccaacttctgttgcagggttaacatatgaactggtgattaactgacaaaaattaagcatatgtgtttggatcatggtttctgtggaggccatagatttgctttatggaaacttgagcttctgtataacagagtttgaaaccattacatgatcaggtcatttagtaggacaacccaataaaaggtaacttgaggccccatgataagaaagtgtctaagaactaagtgatatggttacttaccaattaaaatgagaaaagtcatactcttttagttttcatctgttatggtcatggggaaaatatttctttgaattcggtcctgaacccatctgagacttggggaacattagcagcttctcagtgcatactttctagggaaggagataatggaagaccctttcttcctgtcttctgtggtctctcttgggagcccaggtcttactcagaataggttctcatacttagaggaaactcagattgctttggtcttagcctgtaaatcaaagggtgaagactttttctgttttccttaagagagttctgccctcagtagagggcagagaaagaatatgtgtcattaatcacttgagaattgtttacaactataatctagagagcacttacttgcccatggcaggcagtaaagttaccttggttgtgtaagaataacctgagtggtttactcaga

SEQ ID NO: 14838 - DNA, 1022 bp, Homo sapiens
aatgtttttcattttgagaagaggcaattgctattttgtaatggaacgcaaggactactggagataaaacttgcatgcaagaccagtacagcttgatgaagggagcagagtctagtttaacctctaaattaggagatgtttgttttaattttactgctattccaggcaagaaatattaagtgtctgctgtgttcaggactgctaaacattatggacaatacagtaatagtagaagacatggtgtctgcccttgagggagtgaaaattgaatagacaactcttaactatcaggatcaacaaaaaaatggtgttagttagggagtaataaaagtgccacacggctaactacaaaccagaaggccagggacggattactgtgaactcagctgctgtgtagctttgagtttcttgaatattgtccatgacccatttattttgttttaaatagagaattatatctgccctctaccaaatacacaggaataatctgagtaatgtttataactgtgatctgagaactttttgagtcttttgcaaatctgtaaacacagagtgagaatgagatatgacagtgtggtaaaagaggacttttgagatttattaatatttagaagtacaagggggaagaatacttttatagtatgattataatgttaaagatattcttcctttagttttataaaatgtggcttttgatcagtaagtggcaacttagaagaaaagtctatcctaagttgatttgctattccttgaccttaagaactatagaacactttattttctcctaagaccacttttttgtttttattttactccattcattaattcattcagcacataataacgaagtatgtacttggtggcaagcactgtggtaggacctggggatatgaagttgaagaagacctgggccatatctctaaaaaccttgtgaggggaaaccaagggggaaaaagtttctactattttaaataattagaatagattttattttatagttaaatttgaagaaaactacaatt

SEQ ID NO: 14839 - DNA, 1051 bp, Homo sapiens
tttggagatcaggaagattttgtcatccttcacattgcaagacttgaagacttgcaactcaaaatggtatatttttttcttttcttccaatagagaacaattccactctagcactcaagtatctaatacttttgggacatgttgaaactgtttccatttcatctgatttcactcagcaattatttatagaactctctgtgaggtaggcaccatgctaagtatcctgaggctgacaaagacatcctttctaagttgaggcagtgacagagggcacagcagccattgctaattgtccttgctgcagccttgttgggtgacacctctggcttccagggcctcatattttcacagcttcactgataactctctgagaggaattgtccctcccactaagattcccttctagaagatgagtttttccatgagcattttaaaattttctttgttgccttgttcatttttttttccaacatttaaaagagcagaagtgagggcgaagagaaaggagaatatttagatctgaaaaatgcaccagtccacttttaatctacttttgggaagatgattgtaagatattctgtacccacttagggatctcctgcccttcggatacacatgccttaactaccatcttgctagaatagaaggtcctgtgtttaggcatcaaagaaaggaattgcactgagaaattttagtgataattcttttattgtaatcgtgattttcttcctcctgctaatctttttaagtggtattaaaggaagcttcttgccaggcagtaatattcctccatgagcacacgatctttttccttatttggcactggaatttcatcaggctgtattagtctgagcgaaacatactctaggaataccttttttttttttttttgagacagagtcttactctgtcacccaggctggagtgcagtggcgccatctcagctcactgcaacctccgccacccgggttcaagtgattttcctgcctcagcctcctgaggagctaggacaacaggcgtacgccaccatgcccagctaatttttgtattt

SEQ ID NO: 14840 - DNA, 1429 bp, Homo sapiens
agtcacgggcagtgtgatatggagaaaagggctccaggctgagaggcaagggaacttgattgctgtctctgatgtactgcaattagttgagtgttcttatacttgtcacttaactcctctgtgcttcggttttctaatctataaaatgagggagccaacctaaatggctcaaaaaggagtttaaaagtaagaaagcataatattcagtaaacataagctaaaaccctctcccgggccagccacggagcaagacttcttcacgtattatcttctagagcatctcatctgatatagtttgattgtgtccccacccaaatctcaccttgaattgtagctcccataattcccacgtgttgtgagagggacccggtgggaggtaattgaatcatggtggtgggtctttcctgtgctgttttcatgatagtaaataagtctcacaagatctgatggttttataaaggggagttcccctacataagctctcttgcctggtgccgtgtaagacgtaactttgctcctccttgccttctgccatgattgtgcagcttccccagccatgtggaactgcaggtccattaaaccctcgggtatgtctttattagcgcatgagaacatactaatacatcctccaacccattttacaggtgagcaaactgagggccagagagactaagtgacttgccagttttacatagctagtttcagttctgggtagaacccaaatctcctgactcctaggccaggactcatttattttactgagctaggtctttgataatcatgctttgatacagtctttgagaatccattctagtttttctttacttcgtttctttttttcttccagaaatgtttattatgccctactaaatgataggcactatgttaggtacagaatggaactctgatggactcttccaggattttaaattcaaaactcaagtgtttcagttagtgaaggaggcttctggatctttccaggcatgtagatgtctttaaagatgcaatcaggcctcctcgtcacaagtgtgtggccagagatggagaaacaaaagattgacataagtatcctccaaggtttggagtcacttctggctttgcctaagaaggcagtagggcactcttgcctttcttcaaatagtctcttccctttctctccctccaggccccagatatggatgcttagcatgacttaggcgaaacttttccaactcccacaactgcacccctgttctctccttggggtccaaggccagttattcagtttgaagactgcctgggtttaaatcctactttcccacataccaactgttgaccttagattagttacttaatgcattctgtgaaatggcagtaatactgatatccacctcagagggttgttataagaattaaataaaacaattccagtagagctgtgattcttact

SEQ ID NO: 14841 - DNA, 1049 bp, Homo sapiens
ggaatattattgactttccatcaggaaggaaagaactcagttgtttttgatattactaagaaagagagagttttgcatttatttgtttgcatggacggtctacctaccgtgtggccttgttcatgacatggcggacctccctctctggggtcagtgtgaatagccaggctgcagctgtagctagagacaatggccagcactgttgggccttgccccttaagccccgaaggttaatttcctagtatttagtggcattgaacccgccaaagaaaatgctgtttcatctgggggaagataatttctgcatgtgtatttttttcatgaagaataaagaagagatatttttggaagaacataacttaacctgttggccttggctaggaaagctaaaaaagcaaggggtcagtactcttacaagtatcatgtcttaaacgtcagccaaccagtaattatttagatgccatcagaggggaagtcccatcccattgttattttttctctagactgtgagatgctttaaaaaaacctctctgtagggaaatgatctttaaaaaacaaacaaacaaaaagcctgagaatttagtgctgcatttgttgagaagtaagggccctggaaacggaggagtttttgttgttgttgttttggtgactgctttgccactctgcatgttacaaagggcaaattcttggccactgtttagggttcccaaaaaattccaagatgtccagttaaattagaattttagataaacaacaatttttgtatgagtacatctaaaatattgtactgggacctactcatacttcaaaattattcattgtttacctgaaatttaaatttaactgagccttgtatttctttttgccaaatctgcagtgctttgttacttcaataaaaaaactgtccaaggagcctgggagcttttatgattattgaaaatcactgtcaattttaaacctaaacaaaacaatagataaagctttgaaaatagaatcaagtccagtcataccaagtgaaaggagtcctttctcatttttttatcttcttg

SEQ ID NO: 14842 - DNA, 1046 bp, Homo sapiens
aaccctatgagacagatactgttatctccattttacagatgaggaaataaagacccagagaggtttagtaactttctgcaggtcacagagccattgaaaggcagaagtgggataagcattcaaatcaatctgactccaaaaccccttcagtaaccattgtactactgcatgtgatgcccttagattctccacttttcctctccctccccaagcccccagtttggcttgatattggaatcatccctttctctccttgttctttactggctggaattaatagagtactttcggtctgaaactggccttaaagaatctttgtccgtgtgtatcacactgcaatgcaatagacgcagaaatctgggcactagaagatgttaactttggatgcctcctgttttatatgcatatgattaaaccaatggggaaagaaagccctgaaactttattacaacatttttgtagtattaaatttgacatattaaaatgtgttatcattttaatatctttaaagagcctgaggagactctcaagccttagactgtaaatagctaacagctttgagatgagcttacataggagtcaaatgattgttccaagatggctgttctaattctgcagagctaccgtagtattcagcctactgcctgccaaaggcaaggggccttgcccctctcttcctcctccctgctttcctctttgttaagaagtaacaaaaatatactgcccaacacccactttcttttagaaccaacacatattccttctggctcactccctctataaaatgatttgtcagcattttgatctcattaaataaaaagttttacttggtcaaactgggaaagtttatgaagttagcccttccatcccatcatctgctgtggccacagttgttgactgtgaaatagctctgtgggtgtggtctaccaagtatcccaatagcatttcttacactgtgggctatggacccaaaggtctggaagagttgttttcatagggtcacactagaacactggctctttctggttaaaagcttccctagcctt

SEQ ID NO: 14843 - DNA, 1138 bp, Homo sapiens
gggttagtggcacagctgctgtttcctgcaagggacatctcaaatccagaagggaaaaaagacaaagttaaatatatagcaggaggataatgactgaacctattaacccatttatgcctagtgttccattagtggaacactaagcttgtgggagttatttatatcctcatgcttaagctcatcaccaaggtctgatttttcacataaaaattttgcaacctctggcataaatgggttaacaagaaggaagggatttgcctgttacaagatctgtctgtaatcacatatagccattggcagaaattacagtttacatttagaagacatgtttaaaactctttaccaaagggcaactgatccaataataatgatagcaacaacaataacatctatttatggcacctaataattttaaagttcctttgtgtacgtagttttatattcacaacaacctagtaaggcctgtaagttgactggagagggctagggtatgtaaaactaggtaaagaacttggattttatcctaagcataatgcaaagttttcagccagggatggacatgacttgactgacagtttaggaagattacttggcctgctctgtaggagtatagactgtaagggggccacatgaaagccaggagacaagtcagcaaacataacactaatccaggagagagattatggtggctcagactggggggtgtggtataggggatggcaagtggtcagattcaagataaatatgaagacattccttacaaaatctgcaaacagattgaatgtgaagtgtattttaaaaaatgaagaattggccgggcgcagtggctcatgcctgtaatcccagcactttgggaggctgaggcgagcagatcacgaggtcaggagttcgacccaatatggtgaaaccccatctctactaaaaatacaaaaaaaaattagccggacgtggtggcacacacctgtagtcccagctgctcaggaagtggaggctggagaatcacttgaacctgggaggtggaggctgcagtgagccaagactgtgctgctgcactccagcctgggcaacagagcaagactctgtctcaaaaaaaaaaaaaaaaaaagaaaaaaagaaaagaaaattaaaaaaaaagaat

SEQ ID NO: 14844 - DNA, 1030 bp, Homo sapiens
tagtatcatccttatattgggaaatctataattaagacttttctaaagtcatgagcaggtatacagaaagtgattgacttggtgaatgagagggatcaactatcctccagagcttgtacagtagagtggaaacaaatgtggtgttggactgagaacggtttaaggtattggaggcaatgattctgttcaagtgccaagattaaaccaatagactctagaggggctcaaaagtgaggctacatgtcatggtttgacgtctaaattatagctatgcaactttctttcctacccatttctactgtatcctctgtgctttctataatagccgctccagggaatgctgataataacattatcggctgccatttttatgccaggcacatgataagagctatacaaacatcatctttataatatgctgtgaggtgggtttttacaataacactgtgaagtgggtattactaccctgaatttacagatggaagaaatgggctatggagattatgaagtgctctgaagttaaaacaactagtaaatggtagaaaagagactctgaagtgacttgtagctactagtttgtcttgcctcataaacaatgtgatagacatctggtatttctgcttgcccttgatctcttaccccttctctcatacctacactatgattttcctgtaaggaaacatgcctcttcaatttttttcagcctatgttgtctagttagagctgagggctgattgtacccactgggttcatgtctgaccaatggaaggatcacatttcctttctacagagattggtttgcaatagttggttaacccaagctaagttgaatagagtaagcccagaattttgctgaacaataagagttgctaaattggtaggatataagcctggagctccttgtggctgtctttgccaccatatgaaggaactcacctcagaatgacaataaatcaacgtagagaaaaacaagagattgagagaatgttccaggtggaaggaggaattgaataattgaattaatataaga

SEQ ID NO: 14845 - DNA, 1034 bp, Homo sapiens
agagctatattgatgcacattttttgcaaacaattgaaattaaggtggtatcaatctgaactagttttaagttaaaatgttaatggcaatcctcagggcagcctctaagaaaataactcaaaaatgcatagtggaagaaacaacaagagagttaaaattgtacactagaaaaatacctaacacaaagaatgcagtaatgacagaagatagtaatggcaaaacagaggaacaaaaaggaaatacacacagaaaacaaatagcaaaatggcaggcatatatcctactttatcaataattacattaaacgtgagttgattaatgctccaaccaaaaggcagagattgacagaataattttttttaaaaacaacatgatccaactatatatgctgtctacaggagacacactttgagtcagacacaaataggttgaaagtaaaaagatggaaaaatacatgtcatgcaaacagtaaagaaagctggaatggctatgctactatcagacagattagactgtaagacaaaaatcattactggaaacaaaaaaagagacattttataattataaaaggattgctccatcaggaagacataactataaatgtatgtgcacctaacacctatgccccaagatacatgaagcaaaaactaatagaattgaagggagaaatagaaattcaatgataatagctggaggcttcaataccccactttcaataatggataggacaactggacagaagttcagcaaagaaatagaagactcaaacaatactctatgccaactagacctcaaaggcatctatagaacactctaaacaacagcagatacatgttcttctcaagtataaattagactacaagttgagcctcaataaatttaaaagattgaaatcatacaaacttctccaatcacaatggaatgattttttttttttttttttttttttttttttttttttttttttttttttttttgctttttttgagacagagtctcactctgtcacccaggctggagtgcagtagcacgat

SEQ ID NO: 14846 - DNA, 1033 bp, Homo sapiens
gatccctcagtgccttttatcccttggcaagccccaagatgcctactggcctgctagcccggagattttataatacctgaagaactcctgagtgctcaagcagagggagggaataaaaggtgagggcagaattcgatttaccagctccacaggccatttccctcaccggttctcaaggattaggatgctgagaacagtcagcaactgggggacttctacccttccctcccctttgttcactgggatgggaaggacaataaagcggcaggctggagagactgaggggctggttagagatttctcaggctgctttttgaaactcttgaaggagccggtccatgctattgttgtagtaaaatagaaagcggaactattctccttttgcaaaaaaaaaaaaaaggaagaaaaaaagtaaatgaaagaacccccctcctcccagcatcttcaggaggcctcaactcaggccattaacatggtaataccatcctgtttgcatctcctttgtctgtccagcgtttgtctgggatcctggcctctggatgctggaaatacttaggccccaaaggagagggagctcacagccaccagtttcctgagggtttggactctgagatcccaggcagagagagagttgagcctctctgtgcaatgaagtgggaaatgttggggtaggaggggatctcatgaatccatttttcctttggtccccagagttcaccatgcaagtctcagtgcccactaagtgaaaaagctcagcagtttggctagcctcttagagtgatgctcaagtgtgctggggcctagtggagaggtaagagcaggagttggttctgggaatcagctttaatggtgtgtgcccacagaagcatctggcagcagaaaggaaagggagtttacagtgagctccaggttgacccacctctcctctggtcatgtcctttgttcccttagcaagccccgaatgttgtgccacccagaacacagctgggactcaaggccaagaataaagattctgtcattgaaagcagctggg

SEQ ID NO: 14847 - DNA, 1033 bp, Homo sapiens
caggaacaatgctagtagtttgatcttctactctgagcagtgatgctcagaatatagtagaggttccatcactgccttatcatgtcaccatttttaaggagcagaagacatgcacaggaaagttgccccaggaaatgttcacaagaaagaaggacacaggtagcattcttccccgtgagctgataatctgccaagctggtaccacccatgagattctagtgtggcattttgtatcattaattacttttactgaaagtaattacttttactgaaagtaattaatgatgcaattcagagatattttaggggtgtgtgtgtgtgtgtgtgtgtatgtgtgtgtgtatcaaagttcaactttgtctccctaatcctgctagccttctggccattctattaaggtattgcagtcctggtgaagattcagaaatgtgtggtccccgtcagcctacagggtgaacattttggattaacccagagagccttgaactctgtgcataatgtcttttaggttgtgtgttgtgaacaaagcaaaatgactgctcagagacagggttgtaaaagtttgtccagcaaaaccaggattgccaaatgagaattctggaaagggaggataaggattaggtaatgggagaaaagtgagtgaaggcaaggagaagtgcaaaatatctgattctagcctaaaaactggtcttggaaccatttggaagggtcattttttccatgttttattttcaatatcatcaccatcacttttatcctgtggctgtgaaaggactttcttcattccactccagaattcaaagaggcttcttttgcacaaatggagggaaggcactcatcacacttctcagccaaacatcctaagtgtgagagaaaacacactgcctacttctgaatttcggtgagggcagggttcagatggaacacatattttccaaaactccaaatagatctgggaggagaggaaaccattaaatcactagacataagtcaggacacatttggttttgttccctatcaaacagtcccccca

SEQ ID NO: 14848 - DNA, 1035 bp, Homo sapiens
tttcaaggggtgagtgtagtctggcctgtctgattctcatccccactctctgatagtgctatgtttttcaccttgaaaatgaagacatactaccctgagcccttcactgggttgtcaagtggtcgtgtggcacacgtaagggagcattgccatgttaaagctccccagctcccttcattatggccatcccatggacagaggaccatgctgtgactcagaggcccagctcttcctagctgtgctgttccctgagtgaacttcagtgagttgctttatctcagtgactctgtttcatctgtgaaatgggactgtcgggttgtcagggcaagtacttggaaccttcactgagtggtatggttgtgggcattccttcttattgtcattgcttaaataagcatgaagatactttcctgaagaatgatgtttggaaggaaggaacctagactttggtatggggtgggaatggagtaaatcctaaatccatcccttgttaacaggcttgtaagtggaattcttgcctagcgagatctaggatagttctctagctcaggagtcagcaaatgtttactgtaaaggggcagatagtgactatttttggccttgcaggccacagggtctctaccacaactgcaaggcagccatggacaatacataaacaaatggacatggccttgttccaggaggactttatttacatcgggctgcaggccggatttgaccagtcggccatggtttgcttacccctgctttagcttatggggggtgccccgcaagcacttgggaaattaatttgttgaagataggtgagtagaggcctctgatagtccagatcctcggttttagctctgtttacacaggaccaggttctgtgttcttgccactgagtcacagctgcaagaccctcacctccccctagccccactcccccagctttgagtgatcccaggctccttcaagcccactgctgagtggggagcagtttctgtgccttccaggatctgtctcccctactgccactccccatccagggctttt

SEQ ID NO: 14849 - DNA, 1035 bp, Homo sapiens
ttgtttacctctatgtggataattcctcgattataaatcagagaacttggcactgagttctggattatctgtgatctttaactttcccagggcaaaagaaattaaaccagcaaatctctttgtttctcatggttcagcatccaaatcatggaagtgcgggtctgtgtagagtgagacagcctaagcccacctctgccctggcccccacactctaggtgagcagtcatgcatgcatgcattcatttattcactcaacaaatattcagtgagcacccatgtggcagcctctcttctagaaactggagatacagggttaaaaaaaggacactgttccttcttaccctgtttgcatcttagtatggatgacagtaagcaaacaaaccaacaaacatacatactagtgataaatgccttgagaaaggaagcaggttaagagatggcagtgaggggtgcactattttacacacagtggggtcaggaagacctctctgaagaggtgacatttgagcagagattggatgaagagagagtaagcaatgttcaatccagaaagaacatttcaagcagaaggaatagcaagtgcaaaggcctggaataggaacaagtgtgatgtgtttggggaacagtaaggaagccagagactggagtagagtgaaaaaaggggacaactgtgatacattaggtcagagcagtgggcaggggccagccatggaagtggtgactttgggttttgttctgagcttcacaggatgtccttggaggttttggaggagagtgatgcagcaaagatgaacattcagaggctatagagaggctcatggaacaacaatgggccagcttgggttaaacactggcattcagacacatggcaatggtagctgcacctcatgggtggtgcttccagtgggaactgttgagagctacatgtttcgacagggtgaggctgggcctgggagctcactacctctaccaattagtgttaagcccagaaaaaggaaatgctgcagtttaaattgtagggttggaacctgtgag

SEQ ID NO: 14850 - DNA, 1047 bp, Homo sapiens
agtgattattgttgttttaagccactaggttttaggatactttgctatacagcaatagataattaaataatttaccatattaaaaactaaaaccaaaaataatatttgttcatttaatatttattcattgttaatgaataaattaacatttagtaatttattaaaatgcatatattcattaatccatttaaacgttaaaaataacattttattataaaaataacttttttaaaaaatccaagtgagaagagtgacagtgttttacatttttgcaaatctcttgactgtccggcttaatagaagacagctggattctcatatcggcttctgcattcaatcagctgtgataatgttgttttggataaagtatgcgaaggaaacccagcctcacgtagttattttgttggaaaagggaggaatattttaatagtcttttcagataattgtgaatattcttctttgacattataccaaaactcaaccaatagtagattactaaggttagttgcaatgtggaatctgaaactatatcaatgaactttttgtgctcagttatgttaaaattcagttatctggcttgtactctgaatagatcttttgctcatgcatgattttgaaataatatgcatgggtcatttggaaaatattgcttcactaagtcatgcagatttttcaaatttgatatatttcttgatgaaaactaaaagttcttatttgttaatatcactgatctcatcaaaaacctctgtaagtgttgggaaggtgttaagttcactatggcagatacaggtttctaaaaattctaatttttgctttatacttctattttggcagaaaatactgttaattattgtctttcttgaagtgatgagctcagtttgttcatttttgagaaaatgcctgtcaaataaccaaatctgaataactatggttatttggtccttttgagtaaacattgtgttccatgaaagtgactagtgcagatcacaactcaggacactcacacaagtgcttttcctccagatgaccatcatacttcaggatgca

SEQ ID NO: 14851 - DNA, 1046 bp, Homo sapiens
gttgtgaaccaggcctgatgttaaagacaggtttcaccttctttgtttgtcttgccctctgagaacacttggcaataacattcctttcctgacaggctcattttgtagctgacggacattgttttctttcccctgtttacctaatgtggcccagagtaacagaacaggctgtgccagcgagagaggagagtgagcctccccagtggctcctgggtccccatacccaggtccctctgccctgagctccttgtcttgcatctgtttgccccacctgtgggaacagggactacccagagggctgtcctgcctggaatcaagcactggcaggacctgggtcaggggagcctgcgattaggagagggcccagaattatgactctctccccggggtcatttgactgcaaggttagaaggcctgagatcaaacaaggctatgagaaaccagccttgtcactttgcataggatagaccagtgggagccaagattggaggcatctgaaggtcactgtaggaccttaaaaataccaggggagggtactgtgagaaacagattcccatcaactgtttactaaacactctatgctatttaaagggacaaaggcatggccaggtcctatcatcagggagtctaaatctggggtctgcagctgagccaggaggggggtccagtgcccttggcagcctgctgtaaccttctgaccctctgtgtccagcccccatccccatttttacctccagccaagcttccccctatgggggttaacagggtaaatactgtccaggcccttccctcaaagaagctgcaaatctagtaagagaataatatgtgcgtatatgaaactataatttaagacactgtgatcaataacctaaagggaaaggctctgaggacatccaggggtcttgggctcaaaggctggagcgccacacacacacacacacacacacatgcacacacacacacatgcacacacacacacatcaaatcacatattagctcgtgtcttcatgagctttccagtttgcaaaccgctcacacatacagca

SEQ ID NO: 14852 - DNA, 1030 bp, Homo sapiens
aaatggagcccggggaaactgtctcaccacctaggactgtgtggagctgggcacacactcaggaggcaggtgacttccaggtagtcaaagagaagctcacactccctgtcctctgatagtcctactccctgaaggatctggtcaagccattccttccagatggccgtgatactgtgtcccctcagtattaggagggggggaattgatgctttccatgaatgaaagctcctaaaccccctcccccgcagctagggctgatggggaatggctaaaccccagatgtcttcattgcaccataaatgtgagcagggaggtacaaaggggtaggcaatgatgtgtgtgtgtgtgtgtgtgtgtgtgtgtgtgtatgtgtgtgtatcaaagagaggagtctgtcacaggaaaaatactgagtggccccaaatgttgtaagcgtatgcaccccagttttacaataataacaatcataatactaataattttgctatcatttgttgagatctttttctgggccaggtacggtactttgcacatattatctcataattctcaaaatctctgtgaggtacaagtatcactatgcaacttttcaaatgagaaagcgagcatggaaaaaaagttggttcaattgccaaagatcatagatctgagaagtggcagggccaggattagaatgctagagctcaaagttcttctgccacgtatcatagaagcgaccactacatcgataatggtaactgccaaccctcactgttcactggccacatgccagacacatagattcacttaattcattcttacaaaactctggatgtattcttattgcctcattgtatagatgaggaaactgaggcacagagcattttggcattgattcccttcggcaaatgtgatttgaacagctcctatgtgtgtgcagggcaccgtgctcttggctctgcgtgggatatgggactgagtgatacgtcattcttatggtctgagatcaggaaggtccatggccatggccatcagaatgggctcagggtgg

SEQ ID NO: 14853 - DNA, 1030 bp, Homo sapiens
gtaaatctttcctagaagaggagacagctgagctcatcagccagtgtcggatcagctcagaaagaatcctttccaactcccagaagacccctcagcggcttgggaaaggaatggctcactggggcactttgtttgtgtatgtgggcctgtcaggctgggcaggggtgtctgatgacacattaggacagctgaaaagagaggtgggacaaaaatgtttgcccaagggcagtcttgtgattcccccaccccccgtgctccccacccccacacgcctttgagagcttgttccaggacttttcatatgcatttgagaccacaatttcctctcccagaaaccccattaagctatgagtgagtgaggcggtgggggagagagagaggaaaaggaaaagagagacagagcaagagagagagtttgtgtgtgcacacacgaatacttcttccccacccgcattcttttgcacatgtctaccgttatgtacattcctatgccataccccttgaactctccatcaggtcttcctcaaccatcctcttcaggaagcctcagggcctcagagaaaggcaaaagggcctagactttgacttccttttttttctctctctcttagagacaacattttgctctgtcacccaagctgaactgaactgggctccagaaatcctcccacctcagcctcctgagcagctaggactacagatgtgccaccatacccagctaattttttaattttttgtagaggtggggtctcattatgttgcccaagctgatctcaaactcctggcttcaagagatccacccacctcagcctcccaaagcgctaggattacaagtatgagactttgccattccaatgagaattttgtccttagcaatctcatccaatggccactggagatgtgtgtagggccacaagaatgagaaagggggcaatggagtgacaggtgacctgctcaggtgcccctccccagaccaaatgtcccaggcacacagcccatgccctccaccatggagtacattttctccctg

SEQ ID NO: 14854 - DNA, 1038 bp, Homo sapiens
caggatagagagtagggaaggaaggaccagccaaggaacattttccctataaaatgagactcccaccctactcctgcccttgttaagacttcatacactatggaatactatgcagccataaaaagaacaagatcgtgtctcttgtaggaacatggttggagctggaggccattatccttaagaaactaatgcaagaacagaaaaccaaataccacatgttcttacttgtaagtgggagttaaatggtaagaacttatgaacacaaagaaggaaacatcaaacactagggtctactcatgggtggagggagaagaggagggagaggagcagaaaagataactattgggtactgggcttaatacctgggtgatgaaatactctgttcagcaaacccctgtaacacaagtttacctatgtaacaaaccttcacatgtaccctccaaacctaaaatacaagttaaaaaaaaaaaaaaggacacagatgtaaattgaccctgatggagagaactctactctatccttgccaggtcacaagaaggtgagatatttacttttcaaatgattgatgctgaaatggaaaggactgtatctcgggggcacaaacccaacagagtaaatgaagatcctactgcttcagctcctgggatttgttaaagtggggaccagcttagaaaaatagacggccgtcctagagacccatggcagtctcggtctgattttaaatctaaattctcaagtacaagtagcttcccaagaagagaaagctacttctacataaagaggtggtatcagtaggaactccttaagccttacctttttattattgatgatgatgaagtgaagcttcctgttgatatcattgtcagaccaagcacagcacaccaactcaaacctcattcattcattcattcattcatgtgtccttttaacagacgtctactagacaccttgtgtgtccatgaaccaaataccatgcttaagaccaaggattcagaaatgtgttagctgtcattccccctccaggaactctcagccagg

SEQ ID NO: 14855 - DNA, 1044 bp, Homo sapiens
gtcactacccctcctcacccttgaaagtcttattctgtcattcccacaagcccaacaggtctaaactgaagtcatcattgaccccaaaccaattcccatcattactgccctatttctcttcaccattctcatgggcctggattccaggtcttcctctccactgccaccccctctgtgcaagccttattgtcccaacctgcttggtcctttgaaaagcccatccctgggcagaaatgggatgtgtatgtccctaaactgcccccaaagacctctctgcactgtatttgacctctggccctcctgttccctaactggccttggtctcctgctcccttccgtgggccgctccagctcttcccaccatgtgacctgccttcctgcttgtccaccttcctgtctggtccccagactcagtttctactctccctcccagcaagctgggacacacaaacatagacatatgttatgttcacacaaacatagacatatgttcacatacccctcccagcatcctgactggcccagctgacctccctcacccactctgaataaccagctctccctcctcctgcctttgtccagtcccatctctattactcagggctctccagagaaacagaaccaacagggttggatgcggatagatgggtgggtgggtggatggatgatggatggatggatagctagatagatagctagctagatagatagatagatagatagataatacatgataggttgatattagatgatagaaaagcaaatagagtttaagaaattggtttatgcaattgtggaggctggcaaatctgaaatctgacctcagtctcttctcttaaggcctttgactgattggacaaggcccacccacgttgcggaaggtaatttgattactcaaagtctactgatggaaatgttaatgtcatctaaagaataccttcacagcaacacctagcctaatatttgacgagatatccgggtactatgacctaggcaagtcaacacataacattacccatcatgcttttcatctggtcagcagtg

SEQ ID NO: 14856 - DNA, 1054 bp, Homo sapiens
atatgttggctttaatgaatctgtgtgtcccctaaccttgtctcagaattccttatatgccccaaggatgcctccacagtgctctgaacactgtagggccttaggaaatactgatggctttgactggttatcaaaaaaaaaaaatgtaagtgatcaaaaagatgcataaccaggaagaactataatgttcagcaaaaactgcgagagtggttccaggtgctgccttcttggggtcagtggtataatgggttttcctttccagacagtcccttgatagtcctagaatcccacaggacagttgggtggacagtgtccagcaggcaaacaagaccataaacgcaaagccagagaagctaaacaatgttcactttacaactccaggtgatgataatggtatttatagactcagtgacatgtttgaagctgtgagtcccagaggctaatattttaagctggatatcctgagacccagacgttctgtttttgttctcctccccatccttccctcctgtaacccctggaactttccatgcaatctggacaaaagcatgaaacctctattgtttctcaatccttactagtgctagggaaggatttaagaactgcttcatggaagggtgacttgtgatgagtggaaaacattctgaggccttaaaatgacatttgccattacaccaaaacttccatcagagaatttcaaaattctaggcagagacaagggcctttctgccgtcagagaactccaatggtaaaggagctggggtttggaagagtgaggccttatttatagatgaactcatcttggccagaggttctggagagtctaggtccacctatttaagaactttctttctctcaggtccatttttatattggataatcattcctgaggcaaatctataaacaaagggtgggaacctaaaacttggctagttatatagcccagaataaaatggggaaatcagtgttttccttcaaagcaatctagaaagcactagccaaagaacaaattgcaaacagctacacaagcatcagggaaatcccatcgatcata

SEQ ID NO: 14857 - DNA, 1037 bp, Homo sapiens
tgcagttgtgacagtgtgccgaggaaccacggaaaaccgggaggaaaaaaactggttgctctccagatgtgtaatgtgaggaagttattctgatctcgcttcctcgaagatgggatctttgtcttattgacacctcagtaggtgttccacaaatggttgtccacagagtgaatgaatggatggcctttgcctaggctcatactgataccccaggctgcctctccctgatgtattctgtagggggcactctcacttctgccttcgccgcagccaccactggagaagtaggcacctgtgtctccatcctgggcagcgctggtcttggctttacttatctcctggatctggtgttttgaacctgacaaaaggcaggcatgtgggtacattaaagcacaaacaatgtgcagtacgtttatttgctggatgaccattccagccattccaaagtcccacttgagtggggcattacaggaacatcctccgtctagaaatctgagccctggttcttcttcttcaactgtcttctctatctcattccaccctgcttgagttctcccgcctgactgtgcaagcagcctctcccttcagacctctacctcctcttctgagatccaactaccgcagctaggaagtccattgtaaacccagaaccaaggatgttttccttttccctgtttcctgcttttcaacaatgcacaaaacctctttgagcctcagactggactgcccaagacccacctcctacagcacctaaatcttcagctcttattctccagcaataagaaatcagttccatacacgttaagagctttggtcccgggcctcagaccagatcattggtcccatcaacctcagaccatatgttcacgtgaggacagcaggtgggaggccacctgccttcccccatctgcttgccctgcctgggatactgaaacacaggtaaaaagtggagaggcatcttcctgtcccagcccagctgctgagaggtgaactagagagggcggcctcgatccagtcggcccagattgaggcccaga

SEQ ID NO: 14858 - DNA, 1035 bp, Homo sapiens
tcgacaccttaacaatttcaggacacaatggcatagtgctcattcttggcaaggatgtgaggaaataggaattgtcataaacttttggagggagtgtagattgatagctttcttttttagagcaacttctaaaatctatcaacattttaaatatacaaatatcaccttaggttatttcatgcctagaaatgtatcctacagagatccattcacacaagggctcaaagatacgtgagcagagatattcatttgtaatcatgtttatcacatttttaaaaactggaaataaccaaaatgtccactaatgagttaaatagtatatggtgtatctattatgtggtatactacgcaacagtttaaaaaagtaacatgaaaatctgtgtacatgaactgacgtgaaaagaagcccacagtcattcattaagttagaaacacaagttttcaaacagtatgaactaaatcatgagtgtgttggttttttaagtatttatatatatgtttgtctaagcataggaacatccagaagagatcattcactgcggggaggggattttggtggtggaaaagaggtagagggtttgagaatgggaacttttactttttattcttctatatcaaatttataaattttcatatatgaagcatatgtcaatttcaaaataaaggtggggttttttgtttttttgtttgtttgtttgtttgtttgagttggagtctcactctgtagcccaggctggagtgcagtggcacaatctcagttcactgcaacctctgcctcccgggttcaagcaattctcctgcctcagcctcccaagtagctgggaccacaggcatgtgccaccacgcccagctaatttttgtatttttaatggagatggggtttcatcatgtggcccaggctggtctcaaactcctgacctcaggtgatcagcccacctcagcctcccagagtgctgggattacaggcatgagccaccgtgcctgaccattttttttttaagaatgtatggaggcccttggcaatggaccttctga

SEQ ID NO: 14859 - DNA, 1053 bp, Homo sapiens
aggcaggagaattgcttgaactcgggaggcagaagttgcagtgagctgagatcgtgccattgcactccagccggagtgacaagagcaaaactccatctcaaaaaaaaaaaatcagtatggaaattataaaaagtttacatcctttttttgtagtaagtattcaaaaatttggtgtatattttacatgtataatacatcttacgttggttttttttgtttgtttttgtttttgtgatggagtcttactctgtcccccaggctggagtgcagtgttatgatctcagctcactgcaacctccgcctcctgggttcaagtgattctcatgtctcagcctcctgagtaactgggactacaagcacatgccacaatgcctggctaatttttgaatttttattaaagatggggtttcaccatgctgactaggccggtctcaaactcctgatctcaggtgatcctcccaccttggcctcccaaactactgggattacaggcatgagccactgtgcccacctacattttacagttgtttaaatgtttcacctatcctgtggtgcttcctgcccttcccatttgtgcacaagctgttccctccacttgcagtgccctcctcctgtctggctcctgcacctggagaactcttgctcctgtttgaatgccagtctcagacaccgtctctctcagcaagtgttttctctgttttttttttttttttttttttttttttgagacagagtcttgctctgttgcccaggctggagcacagtggtgcaatctcggcttactgcaagctccgcctcccgggttcaagcgattcttctgcctcagcctcctgagtagctgggagtgcaggcgcacaccaccacacccggctaatttttgtaatcttagtagagatggggtttcaccatattggtcagctggtgttgaactcctgacctcaggtattccacctgcctcggcctcccaaagtgctgggattacaggtgtgagccaccgcactcagccatgttttctcttaataataccccaactcggccaggtgtggtgttcat

SEQ ID NO: 14860 - DNA, 1049 bp, Homo sapiens
tgtcttcccatgtgctctgtcatacacttatgagcgctgctttccggctgggcttgttccaggaagaacgtgattccacatgagtaccggaagcacttccccatcgagatgaaggaccacaactcccacgatgtgctgctgctctgcacctcctgccatgccatttccaactactatgacaaccatctgaagcagcagctggccaaggagttccaggcccccatcggctctgaggagggcttgcgcctgctggaagatcctgagcgccggcaggtgcgttctggggccagggccctgctcaacgcggagagcctgcctactcagcgaaaggaggagctgctgcaagcactcagagagttttataacacagacgtggtcacagaggagatgcttcaagaggctgccagcctggagaccaggtacaaagcacaggaattgtggaatgtaccagggacattaaccctcattacttagtgagaatgcttgccagggagggggcattggctgcttaggcacagtgcctagcctcatgcttcacctagtaggtgtctagtagtttaagataccttggaagtggaatagaacaatctacttgaggagttcctttccataggaaacttgcttttgtgaggtgcctatctttgacctttttaaagatcatacacttaatttcggtcatttttgtgattagcgtgcgagtgcagttgtggtggagctgcatcttacacattctatgcagacgtaaatcctcatgccagcacatgagatgaaataatagtccaataacaccctcgaagttctgaagttccccatgagatacagtacattcacccctcagtatccatgggggattggttccaggacctcccttggatactaaaatccaccaatgcttaagtgcctgatatacaatggcatagtatttgcatatatcctgcacacatcctcctgtatactttaaataacctgtaaattacttataatacctaatacaatgcaaatgctatgtaagtagcttttatattttattgtttatgaagtaatgagaa

SEQ ID NO: 14861 - DNA, 1077 bp, Homo sapiens
aggggtgaactggtcactgggtaatcctggaagaaatggaagaccagcattcttcatccattatcagctggatggtagtgcccctctcgtgggagctgaacattatgaagtggccttcctgtcagtagagctcagaaccctcaaataccttctgttgggattgcgagtcgtatgttcagactataaaaagggcagagataagaaagaggatgtttcgaaaacaccaaagtaactaaccctttaggagtccttcaacctccccagttacccttggcgcgcagcatttgaagctgtctgtgaggccatcctgcgcttgtttccctcagacactttgtttttcatgttttggcagaatctccaatgaaaactatgttcctcacgggctgaaggtggtgcagtgtcacagccagggtggcctgcgctccctcatgcagctggagagccgctggcgtcagcacttcctggactccatgcagcccaagcacctgccccagcagtggtcagtggaccacaaccatcagaagctgctccggaaattcggggaagatcttcccatccagctgtcttgatagctgctttcctcccagttaggacaagtgggaagctggagccaaggttgaagagtcacctcttcccattttagtacatcattaattgtcaaagcctgtgtgacacaactcagaatactaacctagactaatcccaggatgcttctgctggagcaaagatattgtttgaaggagagtttatggttttggattttaaacgggcagggtcttttttcctctcatttttgtggacaagagaggccttcgcctttatttttactctccctcttctgctgtccctgtgcagaggaaaaatgaagaattctcccagaagtgacttgtcaagacttaaaaaaaatgtttttaatgcatttcttccttgtctagtgcctcggtttatctctaacaggggctgtccagtatatcggtcctgttaggaggggagaaaaagttcttccaaaggctggagaagtgaacaaggagtcaaatttattttcccaattcaacttcataattatcatttctttgg

SEQ ID NO: 14862 - DNA, 1046 bp, Homo sapiens
cctgtggaagttctcactggatagggagatgcggggcatgtggcaggcttggggcattatcccagggatgaggggaagtgcagcctggggctcagggagaaagaacacgtgatcgcctagtgatgtcttgctggggatctggtggtttgaaggggcgaagcagttaggactgagcacagcccccacaaataccgcaccaacctagaggccggatgaaggagaaccaaaggtcagggcaaacacaccgcagggaccagggaaggcaagggagcagcaggccaaagcacttctccaagtggaaagcagaggctacccacggtgatgtgtgagtgcagtcttggtggtgccttgcgggggcatgaacatggcaagggccttctcccaaaacaacaacgggacatggctcatcgctggatgcaccccggaattgccaactccagttgttttttgtatagcagagaacacagcgtcacccaactacctcttccagacaatgcagcatccctgaaccacaccggggccggggctctggaactgggactcacagcggggtgaggatgggctagctcaagacctatggaacttgggagatcagaaggccagcgctggggcaaagctgagggcaggccaaccagagagcccaagaaagggccctggcagagaggaaaactgggcataaggtgacaggtctgagcgagagtgctcagaggagccggcccctgggatccccgaagccaagctgagtcacaggagctctgatgggaggctggcatctgcccaaggctggggagagccctcctcatcacagggtccagactgtgctcaccagtgcagtggttgccggccacaggtggccaccgagtgcttggaatgtggttagtgcaactgaggaactgaatttttcattttatttgattctcattgatttaagttttgaaacaacactcattttagttgtggggaaacatttgggaatgtttagaacttcggtatgtggaatctatattttcaactgtaaatttttgtgaaatctcaatacagatcaa

SEQ ID NO: 14863 - DNA, 1064 bp, Homo sapiens
ctgtaatcccagcactttgggaggccgaggtgggcggatcacgaggtcaggagatcgagaccatcctggccaacatggtgaagccctgtctctgccaaaaatacaaaaattagctgggtgtggtggtgtgcgcctgtaatcccagctactcaggaggctgaggcaggagaatcgcttgtacccaggaggtggaggttgcagtgagccgagatcacgccactgcactccagcctgggcaacagagtgagactctatctcaaaaaaaaaaaaagaaagaaagaagcttgaagcaaatctaacaaaatataaacagttgttaattctggtggcagtgcaagtaatagtattctttgtctttgtcctttttggaataaaaaaactctgattttaaagcatgtttaaagtaaaaggaaagagcgagcttgtgacttaaggttgctggatctcagctgattgagaaggagggtgcagtggaggactgaaggcaaaatgcctgttcccccaagcctgtcacgcacgtggcactgtggtcacttgcctggaggacaatcaaagtgattctcgattcttctgaacctgaagatcaaccctgatggactggcattgaaggcactggtcatggagaaaggacttccctgctgagagccaaggcaagagagacgagatcccaggacctgcaggccaatctgtaaaagggctgaatagtcaaaatgggtgtgtcttcatgaaggacaaatgacaaattcttttgatagaaaggtatgagatcaaagacaaaaagcctttattattatattttctcctttttttattattatgctttaagttctagggtacatgtgcacaacgtgcaggctcgtcacatatgtatacatgtgccatgttggtgtgctgcacccgttaactcgtcatttacattaggtatatctcctaatgctatccctccctgctccccgccaccccatgacaggccccggtgtgtgatgttccccatcctgtgtccaagtgttctcattgttcagttcccacctatgagtgagagcatgcagtgtttggttttctgt

SEQ ID NO: 14864 - DNA, 1029 bp, Homo sapiens
gccaccacactggtcatattctgtccctttagacataatatgtgtttaatttacaaggcaggaaatcaaaaggaaggaaataaaaatcaccccaaatcctaccattcagggttactgctattaatgttttggcaaataattgattcagatcttttttgattgatttttaaaaaaaggaaattatagattctatactgtttgtaacttgttctttttatttaacactatatcacgaatactcttctgtatcataatcttcttccaaatatttttaaatgtctgtctaggatttcattgttgtctactgttccatagactatataatcacagttcataaatgatgaatgtttagattaggttggactatataatgttgtattttaggtaaaaaattgtcaaattggcagtttcgtatggtctaaccaaatgtgttgtccgtgtttcatagttataaacaacacagtgagcattcctgaaggcaaatctttgcacatagcattgattaattccttagataaatacctcaaaataaattgttgaacaaaagatcaaatttcaaataaagacaggatctgacagggctggaattagggtgaggcaaattatctatgcacagagccagatcctgtctttaccttaattttttttttttttttgagacaaagtctcactcttgtcgccgaggctggggtgcagtggcacagtatcagctcactgcaacctccgcttcccaggttcaagcgattctccggcctcagcctcccaagtagctgggattacaggcgctcgccaccactcctggctaatttttgtatttttagtagtgatggggtttcaccatgttggccaggctggtctcgaaatcctgacctcaggtgatctgcccaccttggcctcccaaagtgctgagattacaggcgtgagccaccacgcctggccatttatcttaaattttaatattttgttcattaagaattttttgcattaattttgatttttaaaaatacttcattaaaatattacttacct

SEQ ID NO: 14865 - DNA, 1026 bp, Homo sapiens
ggagccgccggaagtcgtcgaaagtgcaacgcaaaagagccttttggatcatagaggcacagtcacttccggcagctagagcagctactgactctgtttcagccatcttcgataaaggcaaaaaggtaagggaaagtttccaagctttaggaagaattattttttttcaagacgctgtcttccgtactttcgttattaaacatacggctcaagtgatcaccggtatagacagtgacatcagacatctttcattagccctactcaaaaatggcggcaacgtaagtatcctgggccggaggtcggttgtaacccggaagtgcctttgtaaaggagggggtggttagacaatccggaagtggatggaatgaagagatgccacttggcggccatggcagctgtagtatcggcgactccgggtcaaggcccggtcgagtgcagtaccatgggcagcaccgggtatagggcagagacagctttgtgtcaactttgctgctgaacccctaggacccatcgttagagacctgcaggactcctttcctcatcccaggctcggaggagagtttgctgggactggtgggctggtttcctgctctggggggcggatcaccttcggggccgcctcttggagacaggggcgcctagggaacgaacaggttcgcttgagtcacttacccgccgccgcctaagacattgtgccaccctcaatccgacaatcgaagaaatcgatcattcgcacattttccccattgacttttcccatctctgttaacccacgagaatctaatgactggcatctgagaacccagagcctgggaccttagattgctgtaagctttctctggtgctaatatcagcaaaaagggtctgttgccgggtacgttcaagaggaaggtgcctcgtgaacacatctgctggtgggaaggcctaaagaactggaaagcccactctcttggaaccaccacacctgtttaaagaacctaagcaccatttaaagccactggaaatttgttgtctagtggttgtggg

SEQ ID NO: 14866 - DNA, 1984 bp, Homo sapiens
atagatataaatatttaaatttaaggaccctttacagtaaactttatagataattgatgaggacccatgcagtaaaggataactgaaaaaattaaagaggcctttcctgaccctaatagcaacaagcagagggaacagtatagctgtgtgagagtaaatgcttggtggtcagcttggcttactcaccagcaaagtaatttggtccttcacacagctgaaaagcatacttgattcacatttgtgacttagcaaaatccgattactacatgtcatgaaacttcacagttacctgtgaaggattgacaccacagctgttaaatccatgagctgaatcctcaagtaccaagtctaccagatgttaagaatagtataaagaggtaggcacttccaaatttcttactagatacaatataataaatactttttcagatcttggtagaggaaaagaactgtgtcctttatccagaatggtgatgctcttaggcctggggtttgatagacaaagagttttggcagatataaatgaggattgcagaagtgttgcaagataggacaggggctgaggagtggtcagctgcattggggaacagtaataaatcaggagccttaaagcagtggtctctactttttttatggtcacacatcctacagagggagggaggaatgatttacatgcactattgcactgatttaatgtgtacattataaaatacactcctaaaacaggaatatttttgagacctgagatttaaatatacatagaacagtattttctttcatattctagtgggtcatcttgaatttttctgggatgtgattccactatagaaatcactatcctaacatttgtccttttatgggtggcagttgttttctaaagttgtctgataatgaaaattccttgaggaagaggcacattttaaaagtatgatttcctgacctccaggaaggatcccgggaatatctatttttaacaagctgtctgcaattcttatgaaacaagtttcagaaacactggagtagaggaaagaagtgcttcaagtatagtttctttgtgttatttttaatatcaatttgagatataatttacataccctgtttcaggtatagttgggggttttgggtttttttttttatttgtttgttttgagacatggtctcactctgtcgcccaggctatagtccagttttgccatcacagctgaaatctcttgggtttaagcaatcctcccacctcagcctcctgagtagctgggactatagtatagatgcacactgctatgcctgactaatgtttaatttttttttgtagagatagagtctccttctgttgcctaggctggttgccaattccgggactcaagcgatcctcccaagttggcctcccaaagtgctgggattacaggtgtgagacacctcacccagcccaggtgtagtttaagactaaaattatctaccgtgtgttaggttgtgtgtagagaaaaactctctctaaccgtgtttttcctgtgctctcacaccacaacaatcataaacacagaagaaaaacttctgtaaccagatgcgtggcaatatctccccactaccaagcagtggacaccagccaggtgtcctccaatttaattctgacgctgtctacctggaggcagtatcagatcccacagatctagggctcagtccccaagactgctccctccttcacccatcaccagtcgcaagcctgggcctctggaacttctgaccaactggcttcaagttggggttcccacaaccccctctttgggttcagtcaatttgcaagagtgggtcacagaactcagagaaacacttacatttaccagtttactaagaatgatattttaaaggatacagataaacagccaaacagccagatgaagaaatacaaagactaagtaaggtatggaagggtcctgggtcctggagcttctgaccctgtggagttggggtgcgccaccctcctggc

SEQ ID NO: 14867 - DNA, 1050 bp, Homo sapiens
tcctggccaatatggtgaaaccccatctctactaaaaatacaaaaattagctaggcgtgctggcgcatgtctgtaatcccagctactgggagactgaggtaggagaatcgcttgaacctgggaggcggaggttgcagtgagccgagattgtgccatgcaccccatcctggcgacagagcgagactctgtctcaaaaaaaaaaaaaaaaagtttatggggacagtgccccaaagaattcagcagtttacaaatggctaacttgttttaagaagggacaagatgatgttgaaaatgaagcctgcagcagcagaccatccacacctattttcaaagaaaaaattaattttgttcttgccctaactaaagaagaccaacaattaacaacacaaaaaatagccaaccccatagccctctaaattggttcagcttacacaattctgactgaaaattttacactgaacaaactttccactcgatagatgccaaaacagttgtgcccagatcagctgcagacaagagcagaactttgaatggaaatgggacccaagtgggatcaagatcctggaggtttttttcaaagaattgtaacagaagatgaaacatggctttaccaacgatcctgaaggcaaaccacattcaaagcaatggctactgagaagtggaagtggtcagtcaaagcagaagtgggtcggttaagagcaaaggtcactggcaacagtatttggggatgtgcaagacattttacttgttgattttctagagtgccaatgaaccataacatctgcgtattatgagatgcgtattatggtttttaaaaagttacccaaagttttagcagaagaatgcccagaaatgcttgatcagagtcctccaccacgacaatgttcctgctcattgctctcatcagacaagggcaattttgccaggttttcaataggaaagttttgggcatcagctttatagtcctgatttggctccttccaacttctttttgtttcctaatcttaaaatctataaagggtacccatttttcttcagttaataatgtaa

SEQ ID NO: 14868 - DNA, 1028 bp, Homo sapiens
gatctctaggctggacacagtggctcatacttgtaatccaccactttgggaggtcaaggtgggaggatcacctgagccccagatttcaagaccagcctaggcaacatagggagaccacatttctacaaaaaaattttcaaattagctggttatggtggtacttgcctgtggtttcccagttacttgggaggctgaggtaggaggattgcttgagcccgggaggtcgagggtgcagtgagccataattgcaccactgctgtactccagcctgggtgaaagatgagaccttgtctcaatttttaaagaaggcttaaactgcttaatctgattataaatgataaatgtctagtatgttattctctattcatgaaatatagcaaagataagctttttggccttttgaagcatttatgttttaaatgacaaatatgttactgtaaactgggattatcagctggccaggtatcatttactgcagttcagagtctcccaacctccatatttctagaactgaatttagactgaaggatgtgcctcttaaactgctctgcccttttggtttcttgctggcaattgtctgctgatattttataaagctaaaaattttctactcaatttgttccttattttacatttttatctcagcctaggtataaactagatgaatttgattgcaattattttcattgttactgctcttcatttgcctattttcatcagaaaaaaacagtgtattttctggtgagattggcatgaatttctcagataaaggaatatttggggatggtgtccctttgggaatatgattgctttcttgcatggtgatttgcttccacttcccaggtgttgagaataataggcagtcagaaggtctgcatgccaaaggcagaagacatttgggaattttttcatcatgaactttaagttgaaggagttaatgattggctggattacaatataaaaagtggatgtctttacagtaaagtaagtagagcttgaaatacaaagaatggaaactcctacatgaa

SEQ ID NO: 14869 - DNA, 1050 bp, Homo sapiens
ttaatacacataaatgcttttttcactcttcagcaaggatttattaagtaactattgggtgcctagtgctgtgctacattctgtcagacatgttaaaggaaaagagaggtagaaaatttaatgctttagcatttacagtccatctggggatagaaaacattcaagtgaaaatggctttgtatatctgaggtggtgtatagaggaacctttgaagactgcctgcatagatcactaggtctaggcaaggggagagttgctttgagctggaatcaattttttaaatttatttttaatttttcttgagacaaggtcttgctctgtcacccgggctggagtccagtggcatgagcatagcttgttgcagccttaaactcctaggcacaagtgatccttccaccttaacctcctagatacctgggactacaggcatgcaccaccacacttggctaaattttaaaaattttgtagagatagggtcttgtgatgttgcccaggctggtctcaaactcctggcctcaagtgatcctcccccatcgacctcccagactgctgagattacaggcatgagccaccatgcttagtcttcaattttttattctttcttgagggaagtggttctgtagttagactttgattgatgtccaagttttggcttaacaagctgagaagttcagtatgtgccaagaattacaggtgaggagacttggggaaaggagaataagaaggttttgttcgatggtgttaagcaaactggtttaactagactggacattgagaaataagttggaactagttgataaagggcttaagaacctatctaatatagcagtttgccctgaatttgaaaagcagcagattcttaaatggtaactgacacatcataagggtggtgggttttttgtttgtttgtttttgagacggagtttcactcttgttgcccaggctggagggcaatggcacaatctcggctcattgcaacttctgcctcctgggttcaagcagttctcctgcctcagctcccaagtagccgagattacaggcgcccgccac

SEQ ID NO: 14870 - DNA, 1053 bp, Homo sapiens
atttcattcattcaaccagtgtttacttattaagtagtaatcatctatatagagttctagtatctttattttatttatttctttttttgagacggagtctcactctgttgccgaggctggagtgcactggcacgattcggctcattgcaagctccacctcccgggtttaagcaatcctcctgcctcagcctcccaagtagctgggactattttgtttcttaacctataagattaagagatgcttcctttgaaattcttctttggtatttcccttgttagaatttgattaactaatcaatggatttttgattagttggaaaattgaatgttagttttccaataacaacaacagcaaccaaaataactaacattgaatactctgggccagatgctatgctctttacataagttatctcatttaatcctcatgaaaaccctaagaaatacatacttcattgaacacattttaaagataaggctggcatgtagaaaggttaagtaacattactagatccagctggacctgactgtaaagctcatacactcaaccactacactgttattgttgttgttgtttatagtattttatgtttccttgtttccaaatatagctgatggtgttgctttgggagcagcagcatctacttcacagaccagtgtccagttaattgtgtttgtggcaatcatgctacataaggtaagcaacattttggtgtaaggtttggtattgagtgtattcataattaaaatttctcatggtccttaatgtttttcctggaatgggaacattttcttcatttcataattgctattcattttggaaaattgaataaatctgttcatagcttcttgttcccattttcttaagcttttccttgaggggtttcaatttttttgtgtagacatatacacaaattgtcaaattctcctcagatttttatatttcatagtaataatttctgttcaaaagtatttttcttttcttgactgtttctcttttttactatccaagaaacacacaaataggatcttttcttggcttagaacattaat

SEQ ID NO: 14871 - DNA, 1032 bp, Homo sapiens
ggatcataaatgagaagtgtttgcctattgatttaaagcttattggaatcatgtctcttgtctcttcgtcttttctttgcttttcttctaacttttccctctagcctctcctcgccacaatttgctgcttactgctggtgttaatatttgtgtgggatgaattcttatcaggacaaccacttctcgaactgtaataatgaagataataatatctttattctttatcccccttcaaagaaattacctttgtgtcaaatgccgctttgttgagcccttaaaataccacctcctcatgtgtaaattgacacaatcactaatctggtaatttaaacaattgagatagcaaaagtgtttaacagactaggataatttttttttcatatttgccaaaatttttgtaaaccctgtcttgtcaaataagtgtataatattgtattattaatttatttttactttctataccatttcaaaacacattacactaagggggaaccaagactagtttcttcagggcagtggacgtagtagtttgtaaaaacgttttctatgacgcataagctagcatgcctatgatttatttccttcatgaatttgtcactggatcagcagctgtggaaataaagcttgtgagccctctgctggccacagtgaggaaagtagcacaaataggatacagttgtatgtagtcattggcaacaattgcatacaattttactaccaagagaaggtatagtatggaaagtccaaatgacttccttgattggatgttaacagctgactggtgtgagacttgaggtttcatctagtccttcaaaactatatggttgcctagattctctctggaaactgactttgtcaaataaatagcagattgtagtgtctggtttggtttggacagtagtgctttctatcatattgttgtgtgcaatggtaatttgttctactggccaaagcctctttcagcagtgccttgccatcatgcttaaaagtttggctagtatatcttgctggatggagccttgaactccggca

SEQ ID NO: 14872 - DNA, 2029 bp, Homo sapiens
attccaagtgctctcttaaatggcaaattaagttaaagaatactactgctccattcccctcacttattctccagttaattgcttgtcagttccatttcaagaaagcagtgatgttccaggtttgattcagttttcctgtgcacactattgccaaatttttttttagcaaagattctgcactggaacgtagacagttggaaacagtactacctacctagaggttatgtgttttctctttctccccgctttcacctctttctttcccaattcaaaacagccaagtgagccctgttctggtattttgaatcattagagaaaagaaagggagtggctgttttgagttgtcctttctttgcagaaaggagaaaatgtgattgtgttttttttttaccagcctacttctaagtgtcactgcctggtttttctctttttcaaggattagaactaagaggacacaccagcatcggagtgtattaagcccctgaaacacatggtagctagggactgaacacaggaaccgtatgacagcagcacaaacccccaaaggatgttcctgccttgtgggcccctgagccccttgggagactgagaatcatgaccagattcatccagaactgctgcagtgttaagtgaaaatcctctgtagttgttctgcagaggaaccttccttccattagaaaatttctgctcaatacagaatggtccacatcacccaaagtgcactgttggagatgctgtgaaattaaaacctctttgtacctgagacatctagattcacctcaggaggcctgaaggaaatgtgtaacttgtgggaaagaactagacaaccatttaggaattctctagatatactcagcctaacccagtggcttaacacaaggagattggctttgatctttttttcttgtggcatcttccagcaagttagaagtctcatgggataagactgcagttcccctggttcaatagctggaacagtgattttaaatgtccctttttctggatcccttgtaaacatgaaatcattccatggatggctgccttataattttgtctctttccactttaattgtgaatggttaaaaaaatgctgttttctgatattaaatttttattagtgcataccttaatctgagtggctcattacttatccttttggcagtttgtttgatgaccagaattgacctgtatttgaacatcagaaaagagaatgaaaagttgtgatggatggtagaaagatgtacctaccacaggcacatcctttagggaagggagggagaaaggagagaggggaaattaaggacttgatagaccaatctgccctgaaagacacaaatgcattgataattgtttttgccttgctgttgttagcaaatattatttacgaaggtagctctctctactctcagaaaagagaaagaggcaacagatccaaaccacagtggattcatttcatagggcagagttgttatatgagtagatagatgctatgaacaactgaccctggaaattaaagagatttgattagaaacgtgacgtgtgaatttgataaatgtttttctccctctgtggacttatggttagtcattagatttcattaaatactactggcccactttgtgctggttttctatatgtatagttacatgtatagctagttacaaagattgtgctcagggcaggcatggtggctcacgcttgtaatcccagcactttgggaggccgaagtgggtagatcacctgaggtcaggagttcgagaccaccctggccaacatggtgaaaccccgtctctactcaaaatagaaaaattagccaggtgtggtaggggggtacctgtaaatcccagctactcgggaggcttccctgagatcaaaacacacacacacctgggcttagccaaaatagccaccaatccttttctgtttggtgtcatttttattttattttttcctgctcacatgatctgttttttgtttgtttgttttttgagacagagtcttgctctgtagcccaggctggagtgcagtg

SEQ ID NO: 14873 - DNA, 1021 bp, Homo sapiens
ggaggaaatttattctgtgtctttccttctctctttctccctccctccctgtcttcttttatctttccttcccttcctttttcctcccatccattcactcaaatctaggcgatgcatccctgtagtgtgctagctattgtttctctaggtgaagaggcatcagaaacagaatacttcccctgagtcaggagcagcactgaattattcataggccaatgtattgcaagttttagagggaattttcttcaaggttgtggctgtgaggctgcagagtgaaaggagtaatgaatatgcctaacactcacagaggtgagaaatgctgcctggactcacacagcccagggtctcaggctcacgcagccctgggacaatcacagtgaagagaaatgccctgaatagagaatcacactgtcttggccttggtggatggaaccctaatctctctgaactcttcaatctgtgggttgatggattaaacacacatgtattcaacataaatggatagctgggtctcctcgaactctacacctgtatggaatccatttcctcttgttctggaccatttagaagggcacgtgggtaactggagctgtctgacagacatactggctggagaagcggtgaggtccccaatactgaaatggtttgggttggaaatgatgagtaaccatcaggcatgctgtgggaggggctcctgctctgggtggagatgggactggatgtctgtggatgatcaaagccatcttgttaatcaatttgagggtcaagatcatcctcacatctgagtatcttgaaaggttcctcacaaatctaagattcaactactaggaataatggtctcaaagtagaatctgaacatggattcccttagactcaaaactggaatctgaacttggattcccttagactcacaactgtttggctttgtcaggtgttgcttcttggatttgcctcctgactgttgccaatcccctccctacctcatagtcttcattcatcccctgcagtgccccactgatga

SEQ ID NO: 14874 - DNA, 1035 bp, Homo sapiens
tagcatactgcgggaatactcacgaggtttttaatttgagagtagtgttggaggaattttttgtgtacggtagactttcagcttgattgtttgggatttgtcagttacttctgtgctccaaaccacagtcatcctggaagggaagaacttgaaaagtatcgttagagagtttcccctagtctccccattaaataaatgaattgtctttctctgcagtgagctaggtctaacagtttggtgtgctttgaggattcctgtttcttgctttatttaatcaactagtttttaatctgggaatgttttcagaccttgacatatcctatttttaattaaaagaaaaaaggagatgtgggttcaactatgagaaactgggagaaggggaataagaggatcagtggcatgaattccttagggaatcttttttcttccatctccctcaagcctcaattttagatagaaatgttgatttgtgagatctttttcctgatatatttgtggctttacaacctgctggggacagtaaaggacctagttcccagtaaacgtacgccctccccctatattttacctctttgggtggccatctctgtgtaggccctggttccaggctgacattggaagttccctgaggttggtgactgtctgatccacttccttgtaccccctcctggattaattggatgattaataaatgattgaccaggtgtaggggattaaaataacaagtataggagggcagggtgactttgaggttatgagccttgatgacaaggaatgaaagagtggtattattgatgaaattctaaaaatggagtcatttgtagggaggcctggtttgagtgaaaaacaaatataaacagggtgttaaaaagctgttaacattcaccaagttcaccctgtctggtggcaggaaaagaagtcagctcaggaaccatggcagtgggaggtgaaggagagagagggtattagaggttgtccagaatgttttagcaaggccaatcagaaacaaactatagggtccccttattatggggc

SEQ ID NO: 14875 - DNA, 1030 bp, Homo sapiens
ccatgttggccaggctggtctggaactcctgacctcaggtgatccacccacctctgcctcccaaagtgctgggattacagacatgagccactgctctcggccccaaagtgactctgaactctgttttcccatcccctctgatcactttctctcaccacgtgggtcatttgtggtggcaaagtacaaagtgaccagccttctctctcatagaatttgaaggttgctgatggggctatgttactaatggggctgtgtgcttgctacagagatactgctggtgatgaaagtgtatgacatttctgttattcctttgggttaagacatctgtatttagcaggtattatacctagaaggagtgtctatatcagagtatcccagaaaagaaagaagaaaaatcccctggggagtgggaaaaggcagaaagtattgaatgtgtgccctgtgccaggcagtgtgctcagtgctttaactcggtaggctaatcttcactggataaatcaggaaaccaagctctgaaacatttcagtactgttaattactgtattggaactagaaccaaggttggagtgattctaaagcctgtggtgggtttttttttttttttttttgagacagggtatcactctgttgtccaggctggagtgcagtggggctatgtaggctcactgcagcctccgcctccccacctcagcccccaaccccagtagctgggactacaggcacataccactacacccagctaatttttgtattttttgaagagatggggttttgccatgttacccaggctggtcttgaactcctgggctcaagtgatctgccagccttggcctcccaaagtgctgggattacaagcatgagccactgagctcggttctgcctatggttattttatggcaggtaaagaatatgtggattcgaaagttgggtgggggatgaggtggtgagggaggcagagaacaaatgcctggagagaggagggtagggccaggtgggagttgcagtggaggggcacttgggagtgaatggt

SEQ ID NO: 14876 - DNA, 1065 bp, Homo sapiens
cccaatgtatgtgttgaatagtcactgagttccttaagaaagaagcatgttaggaatgagttcataagccctgtctggagggaaatatcaaattctctcattaatttatgatgtttcttcttcatcttctctgtgtttatcataatcccttttaacatattccagaatgttgcctgaattaattaattaattatggctgggcacggtggctcacacctgtaatcccagcactttggtaggctgaggctggcggatcacgaggtcaagagatcgagaccatcctggccaacatggtgaaaccctgtctcttctagaaatagaaaaattagctgggcttgggggcgtgtgcctgtagtcccagctactcgggaggctgaggcaggagaatcgcttgaagcaggaagttgcagtgagccaagattatgccactgcactccagccttgcgacagagtgagactccgtctcaaaaaaaaaaaaaattaattatttctcaggacgtgtcctcatctgatttgcctggattttataaagttattcatttggtgcctttgtctgaactttgcctaatttggattacttttggaatctctatttggacgtttgaaggactctcctttatgttaattagtttaagcaaactccttgattcctgatttagggccccacatgcagggaactggaagtatgactggagctagaactagaacatatagaccttggcagagggactttgtacaattagaaggtgaggtaagggtataggtggcggcaggggcatggggctaatcaaagggaaggaacagtgggcaagttcctacttctcatttttgcttgtacctcacagtcccaccttgacagcttacaggaagcttgggtaatttatgatgaagaggacaggaggaatcatggtttggttataaattaggaggcttcctggaagttacacaagatggagaatatttggagccagaagacaggatcttgtttggcttgagtgtgcacctcattggggctgttaagcttcattagatggaggtgaagacatgtccctggaatcctaaacc

SEQ ID NO: 14877 - DNA, 1060 bp, Homo sapiens
cttgcctgaggccaaaccgcttttcagtggctaggacctaggctgtccctcctgtcctgtgatcaggtccctgctgcagtcatcctgctgttaggtgctagagacttgttaaagagaagacttaggtggggtggtagtgtgtctgctggctttcctgttgtctgaagttggggaaagcgtgttgcccagatgatgtgagcaattctgggggtggaagacaagggcgcagggaatatcaaagcaattcaaaaaaacctctgacactgtgtaatggcttaggtggcttaagaggaaagctgagggtaatgtttgtgatttggaggctgtgtgattttaacaggagtttgatgtttgccttttcaagtaggagctggagattaaaggaaatggataagttaatattctggcctgaaaggatgtcagagtccggtaaaatatgtggctgtcgaagcactcaagtgttagtggcaaaaaggaaaggggaagatatagaagttagtaggactggaagaatccattgatccacaatgggagaagatagaaggcatctataaataactgaattttggggggtaggaggcattaaggtccaataagtgtttagatatgttttgatactgtagcctggccatttcagggtgagtaggagtacagaggggagatgttgcagggaagaaagagaggttaaggaagggcctgggcagctttggctgtattagtcatttctcttacttatcacacccctctggggaactttggacttcaaagtgttaggacttgttatcattacaacctgaaatgtaattagcgggttaatttctgttcatgtttctggaactgttctttgtcctttctcatcatgtggcaggatcaaggttggtgaacatagttaattaaaggaataaactctgttgttctggactctcaccactactaccattatcctctgtctagattagtctgaggcaagaaaaggatttatgttggttttatcatcccagttccctctcttaactaatggacagaggagccatggtttaggaaaaaatttgttctaaaa

SEQ ID NO: 14878 - DNA, 1049 bp, Homo sapiens
atcctctggagacaatttgtctgcatcgtctctggtcgtagataccacagtcatcataatctgtatcatctcatcatcaaatatcacagttttgatcacagtctaaggtaggaagaatcaggtacttgagagttctggagtaaaattacatcatgtttaaagttcagtttccatactggtttctctcatctacagctcgagatttgcagttatagcagaaaaggtgttagagaggcattgggtccagctttcctttggtcattcctttaaatggggagaattattgataagtttcctttttaagagtggcaaaaggaggcgtatcttattcttcacacctagtcacaccatgcagtggatagaccagaattaaaaataaaatctatgcacatgctatccaatttgcctttcttggactaggcggaattaagatcttttctctgtagcagcctttctcaggtctccaagtctttcattttacctgtagtcttaagaaacttgctgtatgacctgaggcaaatcacatgacctctttgtgtcttttgcaaaacagaaacaataatccttaagaatgttaagttggtgttgtgtagactaataaaaatgattggaaggcaggcacttggcatataaaatgaagtgtgtgatgtaattcccaaataacaacaacagaattggtatgtgacctactgttgagttacaaggtgcagtagactttttatgcagttgatattctttgctgtcattgaaacacaaaacttaaggtgcaaagtactgtttgagttggggataagagatttttggagcagttatcaaatttgaccagtaaggagggattaatttacttcaggaatccccattgctttccagaaagctcatgtttgcatagtttgatcttaatccaactggcttgctgactcataaaaagtttttgtttgcattctctttctttcctgagcttatttactaaacaaactcagtattttacttgtttctgatttttttccccttaaaatgttgccatgacatgttaggccgtgttaaacatc

SEQ ID NO: 14879 - DNA, 1051 bp, Homo sapiens
actttgtctagggtagctgggaatgttttcactgtcctaggggaatttgctgttcttcagattgaatttgaccccgttttcagcctttatttcccaccagagcctgatggtgtttgtattggcaagccagaagactcctggcttggagagaattagagttagtacagcctgcctggccctgtcttttcagcctctatctgaaggggcaaaacaaatttttcggccttggttaattgttacttagcccctctgatccagcctgggcaactttcaggtagctcaggcactgactagcctgaagtctctgttgaaacagggaagattaaagttgatttgattcatttgaagtaaaatcagcaggcttttgatgatttcattaatttcctcccttctgaacaccctcctgttagcagtaattggaaaccctgactctgtttctcatttcccccccacccctctgctttaatctgagacaactggaaactgcactcagctttttcatttactggaagaatggtttgaagatggttttaatgactggctttgacactgtttccagaagctgagactgttgccgtgcttaagttcacacctacctgggggcctcagttttgctcaccttgcttctataaaactgcttagttcttggtgtgcaggtggaagagggtccccatgagaattctctttttatcccaggcaatatatatgcaagcttttcattactcattttcatcactcaacatttacagactgcctggggtgtgtgccaggcactgtcctagtaactgagtgtgttcccagcacctcctcctggccctggtggacgtccagaggactaggtaggtgagattccagcaggatggtggctaaactcaaaccttgggaactgtagtctctggggctttctttctctatctgtttttatagttgcaacttcagtttctgtgctttttttttttcttgggcctgaagaggaataaataatatgaaccaccacttgatgtcagagaaatagcaggtagcaatagctgcaacagctaatcactattgg

SEQ ID NO: 14880 - DNA, 1084 bp, Homo sapiens
tatccttttggcaacagagatcattaaatttgttttaaatttgattgtgtgtttcttgaggccctgctgtgtatgcctgggactgtacttggcattaggagttaccattagctggtaggattggaaatgaaaccacaattttggcctttgtacccaagagtccaaccctgttttaaactctaagccagactcctaagtcagttatcacctgctcatcagctttccttctgagctgccgtaaacagccatctgggcctttcctgagaggaccagtcatctcctctgggagatgaggaattctgagaggggagagcaaacacatattttagctcaggtaggtgatatggtgaaggagatgagaacaagaagtgacaatggctgatgaggaaaaaataagcattctctgctttttcttaagcctttaactgccactgtcaagggaaacagtaacacttgctaatacacgtggaatagcctggctccctacctccattgtcatcccaccatctggaggtggaggtaggagacagctgtgggctctgctctataggtcactgtactgacctatagcagtggtagtggctttgggcactgagtgggctagccctgtacctggagcagcaggataaaggagaatggtcctctggcctgcccctccttgtagcagtggtaacagtgggagggggaggggttcccagccccagctggcagcctgtttccctgggtccctgagctgcaagaacaagaggaggtgaaagggtaacaggccatatggagtccatttgtcagccaagagcagcctgggctgtattgtcgagaacgggaagtgaaaaaggagccggcttattactgaactggaacaaggagagagcaaacaacaccccccaaagtgcttatcctgctctgttttctgcctgccccctctccaaatatccagaaatttctgaaataatcctttttctttttaccaaagcctttgcccattccaaaaatcagagataagggtttagtttgctacatgaaaatttatcagtgcctagtaatgtgccaggcatgatacaagaccctttcaagtatgcagttt

SEQ ID NO: 14881 - DNA, 2454 bp, Homo sapiens
tgaattttattgaggctgaaaacaactttaacttgccggctcactggaaccccactcccagtggctccttgattaggtttgactgtatggcagtgtcgttaagatactcttcccattctgtctcctgatttcagtgctcttaatgtgttgtagaatactcttctaaagccaatgttaagagtcttatgcttacattttaggaatttgaggatccaagggatgcagatgatgctgtgtatgagcttgatggaaaagaactctgtagtgaaaggtgagattcctgtgtaactagataaccctgggacatagagcagactgggtctgctggcatatttttctaagtagatttatgtagcttaagtgtgtaacggagatttttcttccctttttgtagggttactattgaacatgctagggctcggtcacgaggtggaagaggtagaggacgatactctgaccgttttagtagtcgcagacctcgaaatgatagacggtatgtgaagggtggatggctgcattgaacaattattgtaggggtagcatttaagattcaggagtcattagcagtgatgattttgggtcctgccgtataatctgttcttctattcccacgttagccagttgttcttgatgaatctatatgagtcatagaacacaaatctattgacggaagtcattagaatggcttgtgatatctgatggcttgaacttgcccacagttgaacacaagtgctgtcattgcatttcttccattgtgaatacgaattttcttcctcagaaatgctccacctgtaagaacagaaaatcgtcttatagttgagaatttatcctcaagagtcagctggcaggtttgttgaaatacagttttgagttattttgatgtggctttttaaaaaagttaatgggtagctaatgttgtattgttttattaaaagtagttttaaattaatggatttaatggaattgtaattttaaacatttaattaaatgtaatttgggggatattttgaactttaatattagtgatcaaatgtaaatgttttgaggatatttttcttgttttttaaaatcaatttttaaccaaatattaaaccctttatttgccagcctgtctgtgtcgttggccttatgacgaggagtgcctgtgggttatcctaatcgttgtcttggtcactcttggttgggcctggttgactttgccagtcagctcctacagtgatcagttggccacctctagatctgtgtttgccggtctagacgttatcggtgcacttccttgaagtgccaggttgcagcgatcccagagcgttgataacgtgatctgatccctaagttgagacctgtcttcctgtaacgcttccgaataagaggtccggtcgaaaagagttgaaagatacgaaattaggtggtcgttggaatcctgatcgcagtaaagtggtccttggtaactgctcgagtagaacatgtctgcatccgccaatagtccgctaatagggagggctgtgcgattaaaggcttccatcgattgggtagtgtccttcaagtgggtggcgaagagccagtcgggcatatgtcatgaaggtttctccgaccgattaatggtttgctgcttgactagcctagggaaataataataaaggtaaagtaaacttttttaatgacatatggggcacaaaataactggtgtcttgtaaatgttctgtttttttaaataaaacttctctactttagtctttactttaaaaatatgtactgtttccttttttgttgtttttttgtttgtttttttttcttttgtactgagctcagcatagactaatactaccttaatgttaaaatctgaatttcttttagcattttgcttaaaagcaatatgctatttgcttattccgtgccctgacatagataatttttgaattctgatagaatacaagtgtggtaaatgccatgtttgtactttatctaacatcttctctttcagtagtcttgttttttttatatcatgtgattgtttgtgtgtcccctttcctcttctttgcttaacacaattatcttgtgttaaggatctcaaagatttcatgagacaagctggggaagtaacgtttgcggatgcacaccgacctaaattaaatgaagggtatgtactggaaactgtgaaagtctttaaaaatatccggaaaattttactgtgaacttagttttgaggacttaaaatttgaatatgttagaatgcagagattctccagagacaattttgctgcttccctcctcccccccacacctttggcagtgtctggagacaagtttggttgtcacaactggttgagagaggatgctgttggcatgtagtcagtaggggctaggcatcctgctaagcatcccacggtgcatagggaaccccctcaacaatgaattggctcaaagtataacagtgccaaaactttgctcttttaa

SEQ ID NO: 14882 - DNA, 1189 bp, Homo sapiens
aggcacaggtatctctaattttttaaagtcaaaagttgtatttaatgggtttgttgtagagtcttatctaggctgatttcttttcatttttcatagtaggtcaagaagcaggtctcgatcccggaccagaagttcctctaggtctcgtagccgatcccgttcccgtagtcgcaaatcttacagccggtcaagaagcaggagcaggagccggagccggagcaagtcccgttctgttagtaggtctcccgtgcctgagaagagccagaaacgtggttcttcaagtagatctaagtctccagcatctgtggatcgccagaggtcccggtcccgatcaaggtccagatcagttgacagtggcaattaaactgtaaataacttgccctgggggcctttttttaaaaaacaaaaaccacaaaaattcccaaaccatacttgctaaaaattctggtaagtatgtgcttttctgtgggggtgggatttggaaggggggttgggttgggctggatatctttgtagatgtggaccaccaaggggttgttgaaaactaattgtattaaatgtcttttgataagccttctgctcacatttttgtgaatgtctgaagtatatagtttgtgtatattgacagagctcttttataactaaagcaaatttaatttttttgtactagaaaaaaatttgaacattttagttcttggttataaaaatgttaattcagaattagtttaatgccttaattaaactaattaatagctttggacacttaaaagagctctaaatttgcttgtacataaaggcttaatttgttttccttgttagggtcaagggtgtcctccactctttaacagctgctggacagacacattagagcagctgtttgttattgataataaaatattataaaactactttttgtctgtttgtctgaagaagtcctatgctgattatttctcatccttatacagtagatttaaaacacagaacacatccagaatcctggagttggttacggtctctctttaaaaataatgtttttgacgtctccaggctagtgaaaagatacagaagtaagtgaatgccaaaatcacaattgttgagttttgtgtccgtggcccccctgtcccccaaagttctttctctatctcctgaatttattggcatcaggttacttaagcttccagagccaaga

SEQ ID NO: 14883 - DNA, 1030 bp, Homo sapiens
attaaaaaaaaaaaaaaaagaaagaaaaccatctaacctactggaggaggagaggtcacgtggagcagaaccgaagtcccctagctgccccacatgtcagtgaggtcgtctcggacctcagccttgctgaccttccagctgaatgcagctgcactggggggcccaggtgaaaccagcaggtggatggccccatcagcccacagaatcagagttgttattttaagccacaaggtcttgggggtggctcattatacattaataaattcgctgataaattttttatttgcttgagtccatttgattttattttctgtcattcacaacagagagtcaggactgatacacttctgtaatgaactaaaccttatcagaaatgtacctctgtggaacttcttcccacctatgagtgaaaccagctgccttgatctggagcttcacttgccaagcatgcatgcatgtgtgaattctcttgctggtgggatctagttcttgctcatgtttgtgtaacttatctgaacaatggtgccactgtctccgaaggggtggatttctccagcacatgcccttaagggaagacctttcaacagatccttctctactggtcacttatggggtttagcacttggcattcctcagccttgttgtagctcctcttcataggctctcacacatgtgacttctggggttactgatctgtcctgaaaatgcccaggagaggtgaagcatcagctacttgagactaagaaaagtagtagaggcagtgcaatagcatgggccctggagtcagaccttcgtgggctcaaaggctggctctgccacctgctgctgagtgccttgtgctcatcatggagcctgtctgaaactcggtctcataggtgaaatgggaggtaatcatacttccttcatggggttgtggtgaccaaaacatgaggagatgcctcccatgcagtgttggtagcccagatttagcagcgatccttcaacattgttcctcttgaaggtggcaggatatcacagaacaccatcccac

SEQ ID NO: 14884 - DNA, 1064 bp, Homo sapiens
tattatattttgaacatctagggtagagtatacgatggccaggcaggaggcatgaagctggcaaagccactttggcaccttctgcctataagacagcctctgtttatttcatgccagagaatgtggagagtggcttaaatgatttatgtttgaaggatttttttttttttggttgacaaaaatgcctctattgcaataagccttggatactcaatttttaataaactgggctcagcagctgcatagggtcaagagagacagactgtgtgtatgccgaggaggtgtcaagtcaaatgcacctctggtcaggatccctcctgagcagacggattttccatggcctgacttgtagggattaaccctggatattcaggacttgagggtacgctgtcctctgggaggccatcaaggatagctgtttggaagcctgagactggggactttagtgggagcgggtctgttgtctgtgttattaccagggagtttccaaggacggagactgttataagctatagatttaagactgacacattgaactgtatccagactccatgttaccctgggcagatcctcaagtcctgggagttgggcagctgcaaaggccagtagcagggagtcatcatggaacttgttgctaatgtttatgcagtggcctgtatggcgcagcatacaatatagctattgttctgtgtttcaggagtgccagttagtggctggtgttaaaatgtgtccaggatttggatggagaatcctctctgtctaccactgtgttagattttggagggatatccagactgtgcctgggggtaaaggctggagatggaataggttagggcagatactgagactgggcccaaggtagaaggcccaggagagccatgtggcccagagatcacatatttaaactttcaaagtttatttcaaaattaatatacagtaaatgcaacacagtttttggtgaacagttacatgaattttgacaatgcatacagttgtgtaaccaccacaatcaagacacagagcagttccatccttgctccgcaccccaaatctcttgtttgctc

SEQ ID NO: 14885 - DNA, 1077 bp, Homo sapiens
gctttgtggggtatagggtctctgttgcaaatactaaactctgccactatagtgcaaaagcagccacagttaatatgtaaaagaaaagaatgggcatagctaagttataaagtaaataaagccttatatttacaaaaatggggagctgggccagatttgtgcacccatttccccacagtagtttgcagacccctgaaaaaactaaaaggcatcttcagagtagtcagacttgcttgttacttgcctcgtctatttagtgatacattcaaaatgctccttaacacccacacgatcagaagtgggagacaccagtaggaaggaaacaaacaaacaaacaaacaaacaaacacaaagctgcctaggtctggtgaagtagccattatcatgcgagaagatgcccagtgaccagagatatctgtccctctctaagtcttacctggtttccaactgtaatgcttattaatgagacctttctgactgttctcactagaaatttgttcttacttatcccaagtgctgcctgacagttctgttctcttcctctagtccattcatgcttctggtgtgctggaagactagtttacgtattcttttttctaatttattttattcattcattcattcattcattcattcattcattctgttgcccaggctggagtgcaattgcatgatcttggctcgctgcaacctccgcctcctgggttcaagtgattctcctgcttcagcctcccaggtagctggaattatagccgcccaccaccacgcccggctaattttttgtatttttagtaaagatggggtttcaccatgttggccaggctggtctccaactcctgacctcaggtgatccacccgcttcagcctcccaaagtgctgggattgcaggcttgagccaccgcgcccggccagtttacacattctgtcctcaaacttccaacacattggtcctccttcttcaatctcagccttgcttcctctttcactgagaaatccaggcaatggaagatagtttcttcaggttaccattactgtatctctgaatctacccatgtctgtgccctgaacctcctgtca

SEQ ID NO: 14886 - DNA, 1047 bp, Homo sapiens
attatttttaaaaattcattatggctgtttctgaaaaatgaaagactttttttttcactacggttagttaacacatgtactgtttctgaatttaaaactcgaaatatcttccacctctttttgtcatggttctttatacagctgtgtgttaaaaatcactgtaatacaaaattagaaagaaatgagctcacacaaatgtaaaagacatttttttgtttttgttttttttagacagattccttctctgttgcccaggctggggtacaatggtgtgatctcggctcactgcaacctgcgcctcctgggttcaagcgattctcatgtctcagctgggactacaggtgcacaccaccacgcctggcttatttttgtatttttagtagagacagggtgtccccatgttggccaggttggtcttgaactcctgacctcaagtgatctgcctgtctcagcctcccatagtgctggaattacaggcatgagccatcgcgcctggccagaaaattggctatttcacaaaatatacgaactttgactttgtttgcaaaccaatatctagaatccttgctaacttcagtgaaagtatgttgaaaccatgggatgcagtttaaaaaactgatttagtcaataatagaagtattaatgtagtaacatctaagatttttcaaacagtttttatgtgccaacccactcctttattctcagaacatcttcgatactgtaactgccatatttccctgccttaacagatgaggaaactgaggctcatagaggtatgtatcttgatcaaggtccaaggaccaaggactggatcccaggtgtgtctcactgaaagtccatgtttttaccgcctgccttgcattttctgcccagtacagaggaccttcccaagcagcacccctttctttgctgtgtcccgttgaaggctcacatctcgtttctgttagaagcatcacacctgattgacgactggggtattgtcattggcccagggctttgacactgagttagtctggcatccatctccatccaccgaggcatacatga

SEQ ID NO: 14887 - DNA, 1018 bp, Homo sapiens
aagatttgtgtacatttttttgtgtttatctgttttcaattctcttggcatatacctaggagtagaattgctaggtcatatggtaactatgtttatgcttttgaggaactgacagactgttttccaaggtagctgaaccattttacattcccaccggcaatgtatgaaggttccagtttctccacatccttgtcaacacttgttattttccatctttcttattagtatcttttctagtgggtgtgaagtggtatctcatggtgtttggatttgcatttctctgatgactaatgatgtcaagcatcttttcatgtgctttttggccatttctatatctttggagaaatgtctactcagatccttttcccatttcttaattcagttacttatcttttcattattgagttacaagagctctttatatattctagatacaagactctctctcttttttttttatttgagatggatctgactcactctgtcacccaggctggagtgcagtggcaccatcttggctcactgcaacctctgcctcctgcattaaggtgattctcctgactcagcctctggaattgctgggattataagcgcgtgccaccaagcctggctaatttttgtatttttatattagagatggggtttcaccatgtcggccaggctggtcttaaactcctgacctcagtaatctgcctgccttagcctcccacagtgctgggattacaggcgtgagccactgggcattaggtaccagactcatcagatatatgattcacaaatattttctcccatcctgtgggttctttttacgttctcaataatttcctttgaagcacaaaagcttctttttttcttttttcttttcttttctttttttttgagagaaggtctcactctgtcacctaggctggagtgtggtggtaccatcttggctcactgcaacctcggcctcttgggctcaagcgatcctcccacctcagcctcttgagtaggtgggactacaggtgcatgccactat

SEQ ID NO: 14888 - DNA, 1034 bp, Homo sapiens
ctgctctggctttcctgctgtctgtgggagaggagaggctcagtaatgggaggcttcagtcactctctctggtattctttttttttttttttgagacagagtctcactctgtcgcccaggctggagtgtagtggcgcgatcttggctcactgcaagctccacctcctgggttcacgccattctcctgcctcagcctcccaagtagctgggactacaggtgcccaccaccacgcccggctaattttttgtatttttagtagagacggggtttcactgtgttagccaagatggtctcgatttgctgacctcgagatctgcccgccttggcctcccaaagtggtggaattaaaggaactgctcttcttttttagataatcatcatcatcaacaacaccaccactttcttaacctatacacaaggtgccaggctgttttatatttgcctgacacatgttaagttattcagtcctcactataagcactgttacattcccattttattgatgtggaaactgaaccacagagaagctgtgtagcttgcccagggtctcacagtgtgcaagtggcagagtcagtattcaaacccaagtaccctggctccagagttcttgatcctaaccatgattccacactgcccctctaagagacattgccatcttttaaagtgatgttgccagactagggcatattcaggagggtgactcaggtgagtaaagttgggaaatgatgtcatgtgaggaatatccaatggagccagagataacaaccaaaggatggataaaaagatgactaggccgggtgcagtagcgcacgcctgtaatcccagcactttgggaggccgaggtgggtgaatcacctgaggtcaggagatcaagaccagcctggctaacatggtgaaaccccatctccactaaaaacacacaaaaaattagccaggtgtggtggtacatgcctgtagtcccagctacttgggaggctcaggcaggagaatcgcttgaacccgggaggtggagattgcagtgagccgagttggc

SEQ ID NO: 14889 - DNA, 1029 bp, Homo sapiens
tgtgaagacagaaaagttttattaaaagtgaagtcagacaggagaacaaggaaaggctccactcctgcaggccacttttgtcttccccaccagccagcgttctcacagttctcatctgagtaaatgctcctatttatgagggactttcttattatgtactttttaaacataaaaatatatttgatacttaacccccaagatagaaataaaattaaaggaacaagaggtatcatatttgctgtttacaaaacctggaccattctaggcaccagacagaggaacaggagtgaagacagtgaagtttcttgggtccccggagccctaacactcgggtgttccaaatgtctttatatgtcctttgtgggggatgctgttcaaactttttggaaaatacaaaaaatattcttcaccatataattggattggtggtcttaacactgacaattaggtactagtttataaatctcctccctactcttcaggagcaaaagttcaccttacagcagggttgtggaattatggaccttctggattaaagaggacctcagagacatctggtttatcttcttcctctacctaccccactccaatccagggctcacgctccacttacagtctctacccaagtagtcttccaccttctgcttaattgctctcagagacaggaagcttattctcacaatgaaaaaatccatagtgaattttgggacaatttttttggaaagtcctctttaccttgacttgagagctgtcttcctataacttccaagagatgacttcagttctagctatgggaattatagaatccacagaaagacttgaagatgagcaccattatatccttgtgaaatcttctctttcagccaacaatttatttcccctggcagaaatccttagttctagcactcattcccataccatagggatttatatatctttccatctggcctccttcttctgagtctaatttgccaaggcccttcttatagggccttccttatagcatccttcctcacattggacacaaga

SEQ ID NO: 14890 - DNA, 1051 bp, Homo sapiens
gagtgtggaattttgtaaaaatgtggtcaagactgtttccagggaacctagaaatcatagttcatcttaacagtgctgggttatcagtgacattgatgttaaacaaaccccactcaacatgtgtatatgtactaacattgtatataatatccttagatgtgtatacaatacatatatacatgaccatatgctcataacatcaggttttgccaactcttagaaagaaaccaaccacaatgcattctgagtggctatgtttttgtttcccttctcacccaaggttcagtcaccgacaagcccttgagccagggtaactcaggaaggaaaggtgagtggagttttatgctttatctaaatgtttgcttccaaaggtggtccaagcaggatttcttagatgagatagaaggagcctggggtgaaagcctaaggtgtcccgcagaacatcttctccattcttattccatgtttcctctctgaagcacccgaggtaagtaaggctcatacagtgatggacaccaagctcccagatttcccaagggaggtgactgagtatagagcccagagctgggaagcacctttagaatgtgagccctaggaatattggttccctggggagctcggtcaatcaactaccagtgtagccagcattaaaccagagaggatgaggaaggtagggtgcccaagtctgcccttggctctcttgttgtgtaagcacatttgggcatttttcccccctcgctgatgctccttcataattgtcccagcacatccagattctcttcactaaggcgaggctggctttgtgggcatgcgacctgtgcagttgctatcctgaaattctgaataattctgtctttgagtctgatgggacagtgaagatgcgagtgagtggaggagagacacgtcatatgagtgtctgctgaaccttgtcacctcattagcacaaagcttttgtgaggtgtactatgtggcttccatagcatgcttaaaattttaatttttctttatctaggacaatactaagtagcaaattaaaataacaccgtgacaa

SEQ ID NO: 14891 - DNA, 1093 bp, Homo sapiens
taagttgaactttaaaatttgctctgcaaaaagtgctgttagagaattaagaaaaaactacagcctgagaaaaaatatttgcaaaccgtctatccaacataggactcatatctagagaatataaacaactcttaaagcttagcagctaaaaaacagtttaattagaaaatggtggcctggcatggtggctcacacctgtaatcccatcacttcgggaggctaaggtggatgaaccacttgaggccaggggttcaagaccagcctacccaacatggtgaaaccctatctctactaaaaaaaaaaaaaaaaatacaaaaattagccaggcatggtggcacgtgcctgtaatcccagctactcaggaggccgcgaggcaggagaatcacttgaacccaggaggtggaggttgcagtgagccgagatcgcgccactgcactccagcctggatgacagagcgagactccatctcaaacaaacaaacaaacaaacaaacaaaaacaaaaaattagccaggcatggtgatgtgcacctgtaatcccagctactcggaaggctgaggcagaagaattacttgaacccaggaggtggaggttgcagcaagcgagatcatcactccagccttggtgatggagtgagaccctgtctcaaaaaaagaaaaaaaaaaaagaaaagaaagaaattggccaaatgcacaaatagacatttcaccaatttcaccaaggcagacaaacagagggcaaatatgcacacaagaagaggctcagcatcattagccacaggaaatgcaaaataagtccatggcaggatgtcactacatatctattaggagagctaaaagaaaaagtagtgtcaacaccaaatgatagtgaggctgccgagaaactggacctctcatacatcgctggcaagaataacatggtacagacacactggaaaaatactttggaagtttctgaaaaacaactaaacatacatataccatataatccagcagttgcactcctgagcatttattccagagaaatgaaaatttatggccacacacacaaaaaacctgtacacgaacaagaagcagctttatctgtaatagctg

SEQ ID NO: 14892 - DNA, 1075 bp, Homo sapiens
tatacaacccaatgaatttaataaattcatagtgttgtacaattgtcaccagagaacatctccatcaccccaaaaagcaaccttgaacccattcacaggtattttctactcctacctgtagctctaggcacccccagatctgttttctgtgtctatagatgtagccttactagacatttcatatagatggaatcatacaacatgtggtatttacatctggatttttatacttagcataatgtctttgagattcttcatctacattgtcacatgtattagtaattcattccttttaattgctgaatagtatgctatcatatggatatatcacaatttattcaccagtggacagacatttggattgttttcagtttgaagctttaatgaataatgctgcagtgaatatttctatacatgtctttgtgtgggcatgtttttattctcctagatggattctaggagtggaattttggggttaaaagttgatgtttagctttttaaagagactgtcaaactcctttccaaagtggatgcccagttgtacattctcaccagcaatgaacaagggttccatttcctccacatccttaccaacacttaatattgtctatctttttattttagccattctagtggctgtttagaagtatcttgttgtggttttaatttgtaccttcctaatgattaacaatgttggatatcttttcatgtatttattagccatctgtatctcttctttggtgaaatgtctgtcaaaatatgttgtccatatttaaataaggttgcttgttattgagttgtaaggtttaccttattttcaatttaaaaactttgataggattttaattttgtaaacccaattttaaaagtaagcagttgaataagatggtttgcactcatggaattatagatgccctttagtgggcctttaaagtgttttacacctacacaaaaaagtgtcccgagattttgtaggcaggtatccttcaattttagaagaggatattgctatccagagaagtaaaaggaggggctcaacttatccagagtaaacttattacatgtgaagggggat

SEQ ID NO: 14893 - DNA, 1164 bp, Homo sapiens
ggtgctgttcgctttggcttggcttcccagcctttgagcatgctggatgtcacaggtgattcctggcagcagggcatcttgtcttttctcacttcataaagatttccatttaggacctccccgtggcagagcagctgtatctcttcaccctcagtgaccctaccctgcaggaagattccttccctgcaagtggctttatgcctcatgggcttctctgactacatctgggaaatctgtggaggtccttgacctgcaaaagggcaaagcttccccaaaaaacctttttgccctccttgagtgcagaccttctttgctgatggctgggcccgatgggcagtccaagattttcatctggatgatgggagaaataaacagaatgttttcagttgtcttgctccagagaagagatacagttcttgtaatatgggaggattttcatacctacattgaatattaaaatattacataagccatatgcacttgagttctcattatcatccctcctggaatgtttgatttttcactttccctttgttagcctgtaagactcctaaaatgaagccaccctgtgtggaagggctgagcacactgtgctggactatttagactgtgaactctgtatctggcaggcacaaccaaatgtgcattgcagctgccaaaagactcaattcagtggctcattgaattcaatggaaagaggtgttaatagagtcaggggaagtgatgctattaaaaaaatgacattgtgtggctctgttctgtgtttattctccctcaaagacttccagatcaaactcacacagtttggcatcaaaagatgcctgttttggactccagtttgaggcaaatagtatatccagcatagatactcttctcttcctgctacatctcatttcttgggatgattgtcagataattcaggatcactttggcttctgcaagagttgggtcttggtgtcagtacatgagaataatatcagggtcaggtgtcacccgactgtcagctcagctgctggcctcagcctctaacaagggttagagtctccatagctcttgaatcttaagctcccaagggtgagatgttgatgcaaaaaggagatcaggactctgtattctctctccctcccccaataagatgcacgaaagtcggccaaaggtactgag

SEQ ID NO: 14894 - DNA, 1063 bp, Homo sapiens
gcttggaatttgtggtcctttcgcagagcacagtcagatggccaatgtcgggaagagaccatccagtgtcaatgtagaccccaggcataccaggggcactcctgggctaagcgatgatgctctgtactgcccctgccttcggcccccttcccgtgctagtagttctggtctgcacagcacacggaagccaagcaatggctgagtgtggtgagctcagatccaccgagctcagggactcctcctagccttcctctgaagcctttccaggcaccaggtgtctgccagtcccagctgacatacaggacctgacagaagcatccagagaaaactgaagtagaatgtagatttagggatccctggtcatctggatgttcctcctcaatccaggctcagctgcagacaagtgttagtttcagttatcctcatagctttgcccacagaggcccctagggtgctttggagtgcaactgtcattcttcttggcccaatacaccctcttgaacctctcacctcaaaggtaggactatggaaagtctggccagaaagcccgtgtctgtgacatgtctctgaatgtatatacacatgtctgtttgtgcatgtctctgtgggtaggcctgagtgtgcacctgtctgtgttcatgtctgtgtctgtttgtacatggtctacacttatgtctttaagtatggctatgtgtgcatgtctatacacatgtgtgcatgcattgtgcatatgtctgtgtatgtctgtgcatgtgtctgcatatgtgtgtgtatgagtgtgatggagtgagggagagtagaacattgagataagaggaagagggtatgtaggattaatcaatggggtggggtgaagtggaggctgagtagacttaaagcctatgcagaggcagaaaggattcctgtgtccccactctccatttcaacacacaccacaggacacactgctctggacccaagcagcccagagctagaaggctctgtgggtcctctagtccattttgcagtctaggagtcaaggctagcccagagaggagtagcgatttgctcaagggtacatgtg

SEQ ID NO: 14895 - DNA, 1645 bp, Homo sapiens
tgggttttaggaggaagttggactactagcccagaagtacctggaaaattaagctgtgttgctaagggcatcgctgctccaaacaagaggtggttatgaggcttctggaatacatctaggctcagtgaacccttgtactccacatggaagcctccaaaagaatagcaagaggacagctagaatgtgctaagagatgtcggtctaaaaacctatttggatgacttgaggggacgcatgaagggtgtgcaggcaatttgcaaagggcaccaggttgtggtctcttctggctgggatttccttttggttggaagagatctggccagttgtgctgggcccctgggtgtaatttttgcgtatcttgttttccaggaaattcaaagaaataggtagggatcgttctgtttctacggaattttgaatgatcctgatacaatgattagaaaagatatcctgaccttcctggggagacataggaatctgatctttacagaggctacaaaggaagcatgtattggcctgttgatggactcttcttgacattgaacaagacacaggactcccctggggccttggaatgttcagtgtagaaccctttgaagggcagagtcttttgccctacatctgttcctgtggggctgtggtggccctagcagaagtgtgatcaaagggatacaacacacaataactttgttggtattttcaaatgatgttcaaggctcgaatgccagcagtagagatggaaatcaacaaaccatggcattggacctgaaggctaggagcttgtgcctctgtccctgggataccttgtgaccttggataagcccctgccattttactttacctccattttcccatctactcagagctatgtttaggagatttttgttgatcttaccaaaggggcagctaatatccattgatcccaattgaagccttgggatagggatgtggcaaggcctagaaggaagtcacactgggaaatgcctgggatggtgctggtttgaaacaagctttgcttttcagtgcttgtggacacgtcttaaagccatgggatcagagccagccacataatttgcagggcccagcatgaaatgaaatgtaggactctttgttgaaaaggcagggaggaagtgtcgctaaagatcctgaaagataaagcttttctctttcttttgttctctctttctcttgacttgacatggtgttttgcatttgctatttgatgtcattgcaaataaaaaattttaaaatttaattattagcatagattttactattctttatgatgtgtggtgccagttttaaatgaacttataggaacactttacttatatgaggaattataaaaattatacaatttatacttctgtagctcatacatgcatatgtatttattcttactagaacagtggaaatgctgcaccaaataaactaaactatttttatttcacttttttatatgtgtactttatatgcatacttcatatgtgcactttccaccaggctttcagatgagccaggaaaggaaaagggaatacacgtgaccctaccctttccttctgtgtcatcattttcagcatgagtggttggctaatatgggaaagcaacataggtaggaaaggatatgatagggttcctagattat

SEQ ID NO: 14896 - DNA, 1048 bp, Homo sapiens
gcgccgggcctctttctctgcctggcccagggctggcggccggcgggggtcgcggcggcggcagtgggggcgctggcgggccgcgggtggcgggggccgggccgcggctccgggtgttaggagacaagatggcggcggctctcagaaggccggtctcctcctctccgccgtcctccgccccgccgctcgccgcctcctcctctcgggtctcctcctcctcgtttgctgcctcctcctcctcctgcagcagcaccagcgaccgccgaagcgccggctcgctcacccggagctccggaggtggatagacggggcagctgcaggctccggcgaccgaggccgagctggggccggggcggggacggcggcggcggcggcggcgacggcggcggcgccgggtggggatggggtcgcagacgctgcagatcctccgacagggggtgtgggccgcgctcagcgggggctggtactacgacccgcaccaggccaccttcgtgaacgcgctgcacctctacctgtggctctttctgctgggcctgcccttcaccctctacatggtgagtgtgggggcggggagcgggtggctccttccccgcgagccggtggggagatgctggggtcgcgccctcttcctcttccacggggtctcgtcccccgggggccgccaccctctcggtgtgaggctccccgcccccactgcgtgctcccactcctctcttcggggctttcctggtttcggaggtgacacgagcaacgagcccacggcaacccgcgccggccgcccccgcccgctcactgggaagcggcagcgtcctaggccccttctcggggttccctcctgcggccactcggctaggccgtccccgccggggccccccgcccgtggggctgtgtggcaggcgccgagcgctctgcggctttaggggacgccgcatccatccttggcacgctgggttcctcgggcgcccggcatccggcactgcccgcccccgccgcggccctcgtccggggctcccgggagaggccgcccgccgcctcgccgctaatccgc

SEQ ID NO: 14897 - DNA, 1521 bp, Homo sapiens
gagggaccctgatcttatagtcaggggatgaaccctagaccaggggtggtcaggacagagaatttgtaaacattttaggaaacatactagtaaaaggtagatagtttgaagtatacaccaaaaataaagcaaaatccaacattttgtgttaaaatctcagacagccataggttattatttgcatgctcttacaataataactgtaagtgataatgactgttttaaaagtacatgtataggttctttaaccccgtgacctcatgaggttttgctgttagtaggcaagttgtgagctgggatttacacagagctttctgaaggcaaagtcactgtacaggctgccttttatttattcccccccaaaaagtgcctaaatctgtggagagatcgtacattaagttaggaaacagtcttaggactttataggattcaaacacttttggtgtttatttaggagcatttgtggatactttgaaaggtggactctatatacatcaactagttaaaaatcttttaagtagtgaaaatgaagaaaaaatttttgtttcttaattctgattgtcctgtctgtttcctttaaggtactcattcttttttatctagttacagtgatttttgtacatgtcacagatgatgagatttttgggggtgagtggcatttttgtatggtggaaagcagattggaattagtgtcttgatttttgaatcttggctttgttattgattgtgtgtcctgtgggcaagactccacctttctgaaccttgatttactcatttgtgagatatttcatgggtgtttttcaagaaaatatttatgaaatagaagaaattatttaccttcagaatggccttcagtaaatgtcatttgaaaaaatggctaattggaagtgtttcctctataatgctgtatgactgtaggagactaaatagctctggattattaagtcaaatcattttcataacatattgctcaatatattgttttcctctgtaaagcaatatatccctaggtgatgaaatagaacattaaaatttatggctgggcgcggtggctcacgcactttgggaggccgaggcaggcagatcatcacgaggtcaggagatccagaccatcctggctaacacggtgaaaccccgtctctactaaaaaaacaaaaaattagccgggcatggtggcgggcgcctgtagtcccagctactcgggaggctgaggcaggagactgttgtgaacctgggaggcagagcttgcagtgagccaagattgtgccactgcactccagcctgggcgacagagcgagactctgtctcaaaaaaaaaaagaaaaaagaaaaaaaagaacgttaaaatttattacgtaagtggttcccagactcctccagttgacatcagaatcacttgacaatgttaatgatgtgcaagccctttcttattcggtagatctggagtgtggcctattgatttgtattttataaacattctaggtaagtttaaataacttgatcaatattcctaactaccagc

SEQ ID NO: 14898 - DNA, 1070 bp, Homo sapiens
ttgcagttgtcatctttaaaactttacattttgttataattttagatttacagacaagttgcaaagatggagttcctgtatacccttcacccagtgtcctctaatactaaaatgttacataaccatggtttcaaaaaattagaaattaacattagtgcaatgctattaatggactatacactttatttggatttcatcagttgtactttttctgtttcaagatccttcagtccaggccactgtgttgcatttagtatcatctttactatggctttcttcttttcccctcacaggctagaattctgttctttgaggatgtatacaatttgtcaaatgtatcttatgagaaaaatttgcaaaaggttttacatctatgatagatacatttcagatggacaaaagagagggagagtattctgaatatttttgaataacctaatacaggctaaccattaacctatattaggctattttaaaactgaggtattttacatatgacaaatttcgtaaaatgaaataattccaagatgaaaaagactagagctcatttatgacagtatggacacctgtctcttggctctctgtataatgctgtttttactaatttataaattgaggctatgagacaagtacacagccatattataaggtagaatatgactaatgccttgtgtgtcataaagtgctcaggaattggaaggaggatgtaattatttcctagaatgctttatgcagaggatattcatacattcagaaccttcactgtgtgctgggtgctgtggtaggccttatggtgggacctttatgaggttatttgtgctggaatagtgtttccataatcttcccactgggcaaattaatctttgttctggggaaaagattgttccttaaaagaatgtatgttcttggatgtagtgttttgctctgcttaagtattctaatttatctaacacattaagggtttctcagtgagttattttttagcttctgagaatattatttataacattcttggtatgtatctggaatggttaaaagaaatgatataaaaacaaacaattcagaaaacc

SEQ ID NO: 14899 - DNA, 1033 bp, Homo sapiens
ggtgttggtcctgtggatgcacagaagccaagaattgaggtttgggaacccttgcctggatttcagaggatgtatggaagtgcctggatgtctgggcagaagtctgctgcagtggtggagcccttatggaaaacatctgctagggcactgtggaagggaaatgtggggttggacccatcccatgcagagtccccactgggcatggcctaacagagctgtaagaagagggctgctgtcgtccagtccacagaatggtagatccaacagcttgcaccatgtgcctagaaaagccacagacactcagtgcaagcccatgtgccagccaggaggggagctgtaccctgcaaagccacagggatggagctgtccaaggccatgggagcccacgtcttgcatcagtgacctggatgtgagacatggagtcaaaggagatcatttcagagctttaaaatttgactgccctgctggattttggacttgcatggggcctgtagtccctttgttttggccaatttctcccatttggaatgagtgtatttacccattgcctgtatccccattgtacctaggaagtaactaatttgcttttgattttacaggcttataggtggaagtgacttgccttgtctgtgataaaactttgggcttggacttttgagttaatgctggaatgagttaagactttgggggacagttggcagcacgtgattgtgttttgaaatgtgaggatgagagatttgggaggggccagggtgaaatgatggcttggctctgtgtccctacccaaatctcaccttgaattgtgataatccccatgtgtctagagtaggaccagatggagataattgaatgatgggggcatttctgcccttcagttcttgtgataatcagtgagttctcatgagaactgatggttttataaggggcttccccgttcgcttggtattcatttctctctcctgctgccctgtgaagcggtgccttctgccatgattgtaagtttcctgaggcctcctcagccatgtggaactgt

SEQ ID NO: 14900 - DNA, 1062 bp, Homo sapiens
ctctcaaaaacttttcttttttttttaaagaaatttgatcatacctgtattctaaacctgtctggcccataaagacctttttatttttgtctcaagtgatttgaggttaacttttttttttttgaaatggagtatcactgtgtcacccaggctggagtgcggtggcatgatcttggctcactagaacctccacctcccaggttcaagtgattctcctgcctcggcctcccaagtagctgggattacaagtgcccaccactacgcctggctagaggttactcttttaaagccaatttggggtcatgttctcagataactgagattgaatcttgtgaaaacatgtgggatctagagctatagatgtctgggtgatttttctcatgaaattgggataagttgagcctagttgtattacctctgccagtagtgactctaggccttgccttcccagtgagctgttctccaagcctgccacctgtggactcaagttccccatcactgaatcctcctgtgtgatgggccttcagccccacacccaggatgtttggctgacttattttatttaatctgttacttgattctgtcctgtgttcttttattctttttgtttggcaggccacaatttttaagtattttaaatgtttaactattttaaaataaaacccacctggattttgcatgtcttccatatcttacctggttttacagtcacagttctaaggtcattctcatgacagttttaacttccaattttctggaatacgaagaatgtatcctaaaaaacggttgcacagagcccataaagaggcattatatttggatcacaaccttgatttcttcacatatactgtaatgtgatacctttgttctccaattgtatgataaggcttttggcatggactgtatacctgtgctgtccagtgggaatgtaatgcaggcaagccatatatgtaatttaacattttctagtagccacattaaataaaaagaaacacatgaaattaattttaataatgttttatttgaccagtataatctaagtattatttcaacatgtaatca

SEQ ID NO: 14901 - DNA, 1047 bp, Homo sapiens
ttttacattttttatattgaatctttgaaatgcagtgtttattctcactttacatctcagttcaaactagccatatttcagttactcagtagccacatgtagctagtgtcttttgcattgggcattgaagctgctaagttttgcagcttagcgctagtaacatagttgttgctttgtgtgtaaatgtgtttattattttagatacagatttatctaattgaatacgatataaaatattttaaaatgtatttccttattttctttctcttaaaggcccttccttctaccatgattatagtagcagtttattgtcctgtgatagctgctgttttcattgttctgaagatggtcaactatcgactacacagagcacttgatgctggagaagttgtagataggactgcaaatgagttcacggatcagcgaaccaaagctgaacaaggcaactgttcaaccaggagaaaagacagcaatggaccgaggtaaggaaacctatgtcattgattgatcgtaatgatttagattgtgttatctgtataatgatgtgattattatattgtacttgttttctttatatggttttaaggcagtgttagatcttaccactgtagatacaatgatgggtacatattttaatattagaacagagctaagctaactggtgtgtttgggggattaaatcaatattcttggcctcattactagacaggttagaacagtactgttgcgggaagacagggaccccgaacagagggaccagctgaagccatggcagaagaacataaactgtgaggatttcatggacatttgttagttccccaaattaatacttttataatttcttacgcctgtctttactgcagtctctgaacataaattgtgaagatttcatggacatttatcacttcctcaatcagtactcttatagtttcctatgcctgtcctttaatctcttaatcccgtcttcttcttaagctgaggatgtatctcgtctcaggatcctgtgatgattgcgttgtctgtataaattgtttgtagagcatgtgt

SEQ ID NO: 14902 - DNA, 1699 bp, Homo sapiens
aagtgtctactttattcatagtcaaaagtttgtgaccttacagaaattaataggtacccctaatataactcttggaaaatttgtgaacacttgacatacctcaaaacaattctagcaggtagatgctgttattatccctgatttacagatgtggaaaccaagttgagaaagatcaaataatctaagcagttgtttccactgagcataatatgaaatatttcagacatcaagacataaataatgtaagaaaaagtgggcactcctctcttaagacaggtgatatttctgtatattttccagggcattgaaagcctttgtttattccttttcaattacatttttttccttattcttaacatgagtaccctgtttgttaattaaacacgtattttagcctcataatttttgtttattgccttaatcactatctgaaattatcttaacatttatttgcattgatgaacttcttgaaggtaatgaccttattgttcttataaactattatattcccagttccaaaatcagtgtctggcaatgataggtactcagcaaatatttgaagtagtgaaaacgattattctgtgatattatgtttaatgatgcacagtatctcattatgccaatgtattttatcctattttaaattatatcaatcattttgaaatttaaatattagataactgtgatgtttaaattttcaatgattaaatgttctatcatagtttttcagaggtggaattactagaaatgctatgcacatttataagttttccaatatgtattgccaaattcccaagattttaccatttaatgactatgaccagaaattcagctgcctcttttttttgcacttttgacaactcttgagtatttagtattttgaaaaactgtgatatctcattgtttaatattgtttaatatgtaaataaattattgtttaatattcccgtttttgaattactagtgaaatggaggtatttttcttattgccatttatatttgttattctgtgaattgtatatttttctattggtggatttttttttgctattgattttggaactttttttaaataaaatatattagctcttctgtgtcaaatactcttcctcagtttatagcattttatttgtcagtgtctttatatcctgtaatttatttttctgtggtccaattttgtgtgtttgttatttctgcttttgataacgttttctaagattttccttccctcaaattatataaatatacaataaattaagatctttgtatctactttcagtatttttatcattttactttttactcttaaattgttgtcagtttgaaaacattttaacttaatttgtttaggtttgtttatcacaacaccattcattaagtaacaaattttttccctgtaaatttagatgctttctttttcatgtagtatactgtatatacttatgctagtttctgaacttagttttctgcttcatctttctgccttttttcatttataccatactgtttttatcatagtggctttataatatgtttaatacttagcattgtgagtgactccagtattttacttttttgatattattatttttttggggggcgggggttggttggttgtttgttttgagatggagtcttgctctgttgcccagacgagtgcagtggtgcgatctcggctcactgcaacctccacctccca

SEQ ID NO: 14903 - DNA, 1059 bp, Homo sapiens
aaaagagcaagttattttctgctatttgatctattcagataaattcgtattgttttcaccctatagttttttaggttaataattttccctgggaaggaaattcatgttgggtcaagttatgtaatttgcattcctttttaaattccacttgtttttaaagaaatagttttattagtttacattttgaagctttccacattgtttggtttgtagttctgtgagaataattaagtgctctgatagtccatgatacttcctgctagttcagtgcatcttccattattgtaacctttgatacacaaaaactactttagttgatagacattagtactccttgatgtattaatactccttggttatgccaccctacagccttactgttaatataaggtcctcacatgtttctcttaactttgtaggagatacagacactgctaagacttctgatgatatcagtttaagtctgggccaaagttctagtctttgtaaggaaggaagtgaagaacaaggtaagaacgttatactttaccatgatgtcatatactgtggtgaccagagttaatttgtagaatatgctgcatacaatttggcagaagtttataacaatttaatatgatatttaaggaaacattaacataaaatgttatggtgatagtagtaatacagagttacacatgcttttagcttacttgaactcagttatacatgttctgccagataaacatggagagagaaattctatgagcatatgccccagagtgaatatgagatgggagataagaatctgctattcttttagttggtcagaccaactagcccagcttagggataacctagtatgtaaaactgttactttccattcagtacgatctctaaatgccagctgcttcatctcttgccaactgcaaaaacagcaataagttttgacatagtgtcttagtccatgtgcattgctataaagaaatacctgagattgggtgccttgtacttgggtgcttttttggaattacagtaccctatcattgtttctttgcttctgtggactgccctatctaaccc

SEQ ID NO: 14904 - DNA, 1040 bp, Homo sapiens
tgaagttgatgtcccattttgcagatgaggaaacagatttacaggggggtaacccaaagttaccaagttagtaagttggagatagagcttgcatagaaatccaggcctattttaagtatagtcctttgttgctctttctttctttctttcttttttttttttttttttgagacagagtcctgctcttttgcccaggctggagtgcagtggtacgatctcggctcactgcatgctccgcctcctgggttcacaccattctcctgcctcagcctccggagaagctgggactacaggcgctcgccaccacgcccggctaatttttttgtatttttagtagagacggagtttcacagtgttagccaggatggtcttgatctcctgaccttgtgatccacccaccttggcctcccaaagtgctgggattacaagcgtgagccactgcgcccggcccctttgtttcctcttaattttattgttgatagtctatacaactctttctgaggccagttgaagaactcaaagatttggaagttcagttcatttcgtgagtagaatgctttctttgtgcagctgtgaaacagaaagcagctctttggagaactacttgagaaattatttatacttgatttactgtatgcagtgaattctttccattgttaaacagtagaaaagcagatcatacatttattttaacatttcaaaatatgtgtttgaaacagatttggcagctgatcggaagctctttcgtcttgtctccaatgactccttcatctctattcagccttccttatcctcttgtggacaggacttgccaagggacttcagtgacaaagtgaacctgccaagtcataaccaccaccaccatgttgatcagtctctgtccagcgcctgtgacacagaagtagcttctcttgtacctttacactcacactcttatagaaaagaccaccggccgcgaggtgtaccacggacttctagctctgctgtggcttttccagacacttcactgaatgattttcccctttatcagcaaagacgtg

SEQ ID NO: 14905 - DNA, 1001 bp, Homo sapiens
ctaggaatagcttgccaaaccaggttgcatttcctgaaggggaagagcaagatgcagtcagtggaggtaagtaaactgtaagaagagatttctgtaagactcactgctttttcatactattaattagagtagtacttactaaaatatgcttctgttaatattcccccttccactgtgttattaaaataagctttcttgaatgaagaagtaggtgattatcttagaaaaggttttggtatgaacaccaagaacatattttttggttgcaatacttgaatacgtcaatttgttcttgatggtgtcaagaacaccagtttctaagccagttgccacctgttaatgttttgctgggaataacaaaaattagccctcttcctttgtatagcaatagcaacaataaaatatataattatttaagggcaccaaaccagttttaatcaactcttatacagtatatgacactgaactttcaaaattagatcactcagcctattatataagagttttacaaatattactttagatctgattatgtacattgagaattgtggctctttttttaagtctgtatctttggttttatttcttgcttactcaagttttaggcgttacgaaaatactatttttttctataatttcacacattattcttaaagtttattaaattcagatttgtagtttatattgacatttggtatccattaattgatgtaagatgcccccataataacagtgatggtgttctggttaaagtaatagcttatttatttcaggtttttggagaattgtgcaaatttggataggtgattttatattctgtcagtgtgtgttggcctctttatttcagagttatttcttgctgtgttcttctgcccaagatagtttgtttatttggttctggtttttatggaatctgcttcttgaatagaatcagaaaaatcaggtcttttgttgttagtaccttagcatttttagcctctacccctattccctttatttat

SEQ ID NO: 14906 - DNA, 1048 bp, Homo sapiens
attgctgttctgaatattgtggaaatgtaaatactgaaaaaatgtgtacaaaaatatgtagtaaattcatgcgtttatatttaaaatgtcatttccttttcatggggactgtgaggtgttctgttttttaggaaaagttacctgaaaggtgttatttgcttctcggtgctgttctttaagctatattagcccttgtttttctaggctctagcttttgttttcttttgtttgtactgcttttttttaatttaaataactcaattaaatgttaataagagataatgaaataaaaatatctgctttggtggaagaaatgtaatagtctgtgggctgtttaaaaacatttttttgcctggggcaggcattgcacaggcttttttaatttgagcttcattgggtttagaatacaaataagagcaaaactaaagcacttaaatgtgttgggggttttttaattggtttttatcataactaaatataggggttttgttgggagtttacttgggctttttgaaaggttggaggtggtagaaggggatttgttttggttcttattatttaaaaattacagagactctcaaatactgtttaaagatacttgtttatgttaacattatctgttacagtcctgtctgacaatttagaagaaatgtttctgggctatccttccttacatactgtactactgaaacctgtcaaccatcatgttactgcttggccattcatatacctatgcataaaccataggtagattttatcctaaagaatatgaaggtgtcgataagttctccaacgatttcttttcattttattttaaggtaggtggtggtggtagtgtagagagatggaatttaggaaatagactttaaagtactaaaataaagtatgctaaaataggaggtaatctagtttagtgacatggagtcagatacctttgttagtatgtgggctccactgttgtgactctaggaaagctacttacaaacctcagcttcctcatcttaaaatgagatgattatagtatctatctcatagggttgttgtgagg

SEQ ID NO: 14907 - DNA, 1062 bp, Homo sapiens
caattgttcatctgatttttcatttcttccctcaattggcttgttttcttctctgctttgtttcatccttcatccattgattgcccttccctaatacatgttttctcctttgtggcaatgctgattgcattttcatttcattgaagtcatggttgtcaggaattggcaaagtatgtaatgtgccttgtagctgtggtcacaaaaaggcaaccttatctttctagataagcactgttcaatataactttgtgtgatgatggaaatgttctatatctgcactgtccagtaatggtaaccactagctacatgtagcaacggagcacttgaagtatgattcatcaatctcaggaactgaatttttatttttatttaattttaatttaagtttaaatagccacatatggctaatggctactgcattggacaacagttgtagatgaccggatttaatcagcatcttttgctgtcataggccatatataatttttgtatacatggacttttaccccacaagtaaaggaatttaaaggaagtttcatgtttggaaagaatgtttctgtgctaacttgtgtttttattcatatttagcatcaaaatgccctttctcaaaagcaaaatgattcccaaattatttagatcacacagttgttttgttttatatttaaatggatgaaaatcattttacattttgctttagaaacccaaatcggtcaatttttgtggttttgtaagatctgtgtagttctactaagccattgttgtgatgttctcatgttgtatgcttggctttagtacaaactaaaaaaagtacaaacaataaagtacaaacatttttgcttgtttgtactttattttttgtagattaagctatgagttcctgtgcttgccaatttgccaatatttgcttcctaaagttgagaggaccagagccaggggcatggagttgaataaagtttgatggtaatgaagtacctttagagtaaaatatattcatgctatgttgaattaacacactggttttgcagcttcacaaccagaggtttcatttaatgctgccaaaat

SEQ ID NO: 14908 - DNA, 1044 bp, Homo sapiens
tttgagatttcatcatactgcttgcatgtgtgagtagtttgttctttcttactgctgagaattccattgtatgagcaggctgtatattgcttatctgttcacctggcgatggttgtgttgtttcccgtttttggctgttgtgaataaaatttctgaactgtctttttgaaaagagttctacatccccaccaccaaattccagtagttccctttcttgccaacatttgcttttgttggcctttagaattgtagacataatgggtatagaatggtaactcattgtggtttaaatttgaatttctcttatgactaaagatagtaagcatcttttgatgtgcttattggccacatacatatatatcttcttttgtgaagtgtgtccagaaatttactcattttaaaaatcgggttgttggttgtcttcttttttttttttttttttttgagacagagtctcactcttgttgtccagcctggagtgcagtgatgcaatctcagctctctgctacctctgcctcctgggttcaagcgattctcctacctcagccccgcaagtagctgggattacaggtgcgtgccaccgtgcccagctatttttttatttttgtatttttagtagagacggggttttgccatgttggtcagactggtctcgaactcctgacgtcaggtgatctgcccgcctcggccccccaaagcgctgggattacgggcatgagccactgcgcccagcctgggttgttggtcttctaactgttgaggtatgagttcttttgatattttaaatacaacttatttgtcagatacaaattacaaatattttctcccattctgtggcttgtctttttgtttacctgaccagtcttaatgtcatcaatgtcgttattatagattattttacccaagtaagaagaacttgtctttttgaaataaaatgtgagtggataatgaaatcacagcaaaatatgaacttgtacattcacttttggaaagttcagctgatttggggattagcaagcaggagtggagtttttaacaattaat

SEQ ID NO: 14909 - DNA, 1044 bp, Homo sapiens
ctactgtccaacgttccttttcaactcacatcttgctgaattacatgcagatcattgttttaaaaaaattttttttaaaggttatggtgtattttcttaagatgtagaaacttacgaaatttagtatatcatgaaggaaaaattctgagtattctaatggctttttaaaataatcatttatttgctaggtaagttctcttctacgctgtatgagactggtggctgtgatatgtcacttgtgaattttgaaccagcagcaagaagagcatccaatatctggtatgtgtgaagtcatattaggagtgtgtgtactttcatatgtttgccatatttaatgtttttaagcctagaactataaaagttaatttttttgttttttataatttaatgttgttaattgacaaataaaaatcataaatatttatggcatacaacctgatgttttgaaatatcatatacattggcttaattgagctaaaattaacatgtattatctcacatacttataatcttgtttgcggtgaggacacttaaatctactctcttagtgattttcaagtatacagtatgttgttaattgtagtcaccaggtcagatataaaagttattttgaaaacatctttatatttactctaataatttgtcatagtgcatttgtttctaaaaacttaaggtagaattttttttgctatggaaaaaagaaagtattgtttttaaaacaaaagctattctgtgttttaaaaactaaatcaagatatcccgaagatcttacagtggcacagtgttttcccacagtgtcaaatttaattgtatttcattttctctatatattgtataatgtataaaagctaatcaggacttactcttcatgtaagttcttacataactaagttcaaacctattggttctctttctttatgtaattttaaaattttatttccttctaagtgtttggtcaagtacctttttaaataatcaactttcattttgtttaaaatttcttttactggctttaaggaagtatttcttaaaatatgtctcata

SEQ ID NO: 14910 - DNA, 1038 bp, Homo sapiens
caatgataagagactgtgggaagaaatgagagttgctgccatcagatccaatgcagtggggctcagatttaacactgataatgaggttcaaagcttaaggagaaaagactataaatgtgagaagagaagccactaacgattcacagtaagtggttttagtagattcgctagctatacagttataaaatcttaaggttttttcttaagcattccctgagaaaaatcttaagattttagacacttttctagtcaattatttacaataggtttattgattaattaactttgttttagttcacttcctattgtcaccttctatagtttctggtaatcataacatattcataaagagtaggctgggcgcagtggctcctgcctgtaatcccagcactttgagaggccgaggcgggtggatcacgaggtcaagagttcaagaccagcctggccaagatggtaaaatcccgtctctacaaaaaatagaaaaagaattagccgggcatggtggcaggtgcctgtaatcccagctgcttgggaggctgaggcagagaattgcttgaaccggggaggcagaggttgcagtgagccgagattgcaccactgtacttcagacaagactctgtctcaaaaaaaaaaaaaaaaaaaagtgtatgagagaagaaaattaaagggcttagataactgataagctaattgagtaactgttgaattatgaagatattttattttgaataaacatattaaataaatattgaagatattttaagcctttcaatgctgactttcttttagctctctctcccacagattcgattgaatagactattgaccattgatacagatttgttggagcaacaggacattgatctaagccctgacttggcagctacttacggcccaacagaagaagctgcccaaaaggttaaacactattatcgcttttggatcctaccccagctgtggattggcattaactttgacagactcacacttttggccctgtttgataggtgagattatagtgtgatattaatgatacgt

SEQ ID NO: 14911 - DNA, 1052 bp, Homo sapiens
ggagacatttatggttcatattttatggtgccttgtgtagaatactcaggaagatatttaaaagtggggaataattacccctagcaggagcactacttcacacccacctaacaagtaataaaaccaagacctgaagggatcaaactgtttccaagtaacataaagtctaagaagatttatggaaatccagaaatacccagcacccaacaagttaagattcacaatgtctagcattcagtcaaagatgaccaagtgtgcaaagaagtgagaaaacgacctctaacaagaataatcagttgagaccaaactgtagcttaaatagatactagaattagcagacaaggacattaaaacagttataactgctttccctatgtttaaaaagttaactacggacatagaagatacttttaaaagtcccaaatcaaacttagagagttgaaaactataatccctgagacgaaaaatatactggatgggattaatggtagattgcaccttgtagaagaaaagattattgaactcactcgaaggcataataatggaaactatccagaatgaaacagaagagtccactgtccccagtgaaaagaatataaaaacaaaatgagagaaagctgtgggacaactacaagaggaaacaaggagacaaaagattttgaagaaataaggagacaaaagattttgaagaaataagagtggagaactttccaaatttgatgaaaactgtgaatatacattcaggaagcccagtgaacctcaagcataaaatgcttgaataaaactacaccaagggacacaactgctcaaaaccagtgataaaattgttaaaattgcaaaagaaaaaaagaggagcaaggataaggaagacatcctttttattgttggaaataacgaagtgaaaagacagtagaggagcatctttaaagtactgaaaagaaaaaaaccctgtcaacctacaattctatacatagcaaaaataccttttaaaaaccaaagtgaaataaagacatcttcagatcagaaaaaaatgggaagaattcttatgagca

SEQ ID NO: 14912 - DNA, 1639 bp, Homo sapiens
cattattgggttagaagatctggatgagccttatgaactttcctttaaaagattgtcaacaagttgtaaacataaaaatttaaaaatttttgtagacagctttcagctcctcatgcatacttgtggtttatttttgttttttgtttggcgactagtgcaagacaatcagagaatggtagggttgaaaggactatgacaagtgactcacagatccttccttgcctcatttaagtagcatttatagagcatttatgtgtaccaggtactatgctaaaccattttctgctttgaaggagcttgtagattagctatgattaacaagtcagccagcatgttcaagacagtgtaacgaaggttatgaaaacagttctgtgggtgtacaaattaagactactttattctgccaaaagggattaaagacaattttccaggaaggtgatataaccagattttgaagatcaaataggcattagctaattgaaacaagaaatgaagacccatggacttgtaaagaaaatgtgttgtgtagaggaaatggcaaatgattaggaatttctggaggtttgggtacatgaggaaagatgacatctaaggtcattcctctaaggctagaaaggtaagcaaaggctggatcatttagttttaatttcttcttacccacattgtatgactatatcacagtttacctgctgtgttagagatgctcatttgagatgtttctagttgaggaatattatgaataagcctgctgtgaatatcatcttgcaagtctttttgtggacatgtgtattcatttctcttgggtaaatacctagaaatggaattaacagttttccaaagtcgttgtgctggacatcttttggtttttttagttttaatttttatcagagttgtacattcatatatcacagtgtcaaatagttttacaagacttatagcaagaacagcaatctcctaacctgttttaccttcctcagacttactatttttaactgattctttttggcatttacctgtatagatctacctttcatttctgcttcttacattttctgacagcttcagcagaacctgtggactgccctttatgaaagttggaggcttgacttcctttctttctttttttttagaagcttgtttagaatgcatgtggtccatttattcctcagagtattctagtttacgtgcctagattaggttaaaccatccgagagctgcatgtttggaccaggctgtctggccacctctagggtttccttgcccacgtttcccttcagcattatgcctgccatttgcacggaggcaccttccaagggtgtgtgtaagaaaacagcggtccctttatcatggggctgtaatgttgatgtccttcaatgctttgtttagtgtcccttctgtaaagactcaatcaagatgtttcttttaaatcttgatgacagccagttcttgtttgttttcctaagaaatctagaatgcattttggttttggctttttgttttttccccatataaccagtgttatttttaaaatttcccttggccattaagcagctcaaagccaaattccctgcttacgtccaggaatttatggcttttgtctcccatatcccttccctcatcatcataaatgaggtcctga

SEQ ID NO: 14913 - DNA, 1110 bp, Homo sapiens
tattggatgacataaatgtctgctaggtccatttgttctgtagtgcagactaagtctgatatttctttgttgattttctgtctaggtgatctgtacaatgttgaaatcgaggtgttgatgttcccaactattactctattggggtctatctcattagctttaataatatttgccttatgtatctgggtgctctggtgtagggtgcatgtatgtttataattgttatacccttttctgaattgatccctttattattatataacgaccttctttgtctcttttcatgtcttttgacttgcagtttattttgtctgatacaagtatagctccgccagcatgcttttggtttctgtatgcctggaatatatttttaaatttcttccctttcaatctatgtgtgtgtttacaggtgaagttagtttcctgtaggcagcatataattggctgtttttaaaaaaaaaaaaatttaagcagagtgtatttttatttatttatttttgttgacatcaggatacacatctggacagtctatatcttttaactggggaatttaagccatttacattcagggttttttgctaggtggaggcatactcccatcattttgttcattgttttctgaatgttttacatatcctttgttcctttcttcctcttttattgtttactcttcaatttgattggttttttgtagtaataacatttgacttaaaaaaatcatttgtttatcttctttatcaatgtttttatcctttcctgtgttttcatgatggtgatatcatccttctgcttctaattataggactcaataatttcttgtagagccagcctagtggtaataaattccttagtctttgctttttggtaaagatgttatttctccttcatttttgaaggataaagcttttcttggtatagtatttttagctgaagagtttttttctttcagcacttcgaatgtgtcacctcagtgtcttctggcttgtgaggtttctactgagaaattagatgttagtctaatgggggtttccttgtatgtaacttaaccctttttctcttgctgttttcagaattctctttttgtctttgacttttgacagtttgactata

SEQ ID NO: 14914 - DNA, 1032 bp, Homo sapiens
gctctcatgagggatgagtatactcttgctcacatgttgatgtgatctttggttacttccttttctttatagtgtgatcccctgtctcacctacccgtctgccaaatattaatcaaaagtgtcattattttgccaggcagatatttggatctgctgagcattttatctactttccaagacagactccattcagccaatttattatttttaaattttatttgtctatcctggatgcttacttttaagtaatattgaaacaagtttcttgatcagtttttatagctcttagttaaacccattcatatttctcatttccatttttattttacagatactctagattctttccatgtaaactttatgtgaaaaatttgggttatcagtcattttttgtctatatcagaattttctgattacactttctttcatgttaattttttactgataagtgtaaactgtaccaggtacagttttagaagtcaaactttacacatcaacagtatgttcggctgactggattcctttccatttttactcaggttaaacatgccttattttcatgattgtttgttttatttagttttatcagtaatattcactatgaagtgactggaagatttaggtaatccagggaacagttggtaatagttcctcatagaatccctattaattaatattaataattgaaaacagaatatctcctagtaatacattttgctcagaaaaaaaatcttttttcaattattaatattgctataattattgacttcattttctgagcaaaatatattagtagggcatattgggtggaaatagtcatgggattagaatggtagagtaaaaacattctgctttaattcaggtatcccattctccttattctgctgctataaacaaggacctcagttgggtaaatgtccaaacttttacatttcctcttgccatgtatgatttctgtccaccactaacagtgatctgcacaaaatacagctcttgtgttatttcgtcatttaaaaatctttgataaacttc

SEQ ID NO: 14915 - DNA, 1028 bp, Homo sapiens
tggtaaatgagcatttcaacttaaacttagcagctccgttagaccctatcaaagagagtcagcctgtcctttgaagatttgaagccaggcattgactcctctctagctgtgaaagtcctagatggcatcttctttccgtgtaaggatgtttagtctattttgaaaatctgttgttgtagtgtagccaccttcatcagtgatcttagctagatcttctggataatttgctgcagctttaacgtcagcacttgcagcttcaccttgcagttttatgttatgaagacagcttctttccttaaacctcatgacccaatctctactagcttccaacttttcttctgcagcttgcttgcttctcagccttcaaagaattgtagagagttagagctttgctctggatcaggctttggcttaagggaatgttatagttggtttgatcttctctccagaccactcaaacattctccatatcagcaataaggcttttttgctttcttatcttttgtttgttcactggagtagcacttttaattttcttcaagaatgtttcctttgcattcacaacttggctatttggtgcatgaggcctaacttttggcccatcctggtgatacggtttggatttgtgtccctgcccaaatctcatgttgaattgtaatacccagtgttggaggaggggtttggtgggatgtgattagatcatgggggtagattttccccttgctgttctcatgatagtgagtcctcatgtgatctggttgttcaaaagtgtatagcgcctcccccttaaccctattccttctgctccagcatgtaaaatgtgcttgcttctccttcaccttacaccgtgattatgtttcctgaggcctacccagccacacttcctgtacagtctgcagaactgtgagccagttaaacctcttttcattacaaattaccctgtctcaggtagttctttacagcaacacaagaatggactaatgcatttggcttttgacatgccttcctcactaagcttccttatttct

SEQ ID NO: 14916 - DNA, 1527 bp, Homo sapiens
tagagtaagacagccatcatatcagcctctttttactccatcaataagaacaggagcatcttgtacttcctttctgagcagtggcctttgagcttttatactagatgtgcagtatatactgagcagagtagtatatcttaaaagaagggatagtgagttggataaaataacctcacaaaaggttcagaagaccagcagacagtggctagaagtagaggacctcaaagctaaacttctttcttccaaacatataataaatagttttattttttcataaataaaatacacttaaaatacttcgcgtactgttctcaaatccttgaactgacttttgttggggagagtaatgggaacagtcatgttattctatatctcttctttggcttagatgatattggctattttgttatgagttaatcatgatgttttgggctaggagttcacagtctacccactcaggaacagggttccatcctaccttaaggacctttctcttagagattattgctgaagtcatgaacatggctcaaggaagtcctcctgattggtaataaatcatatattcaaaaggtttacctctaaacttgggtatccccagtctcatcaggtagcttatttcactaatcctggtctgttttgttttctactcttacaatctgtttagaaaaaaattatcagttgtatttttccagctatatagtcttcccatctgctctagtttctcttttaagttgaacaagattatcttcatctccttaagatcttgcatgctattccctgaatcaacattcccagaataaccttttcctggggacattaatcaggccagacttgctgactccaaactgtagtgccctcatctgaatgtttaaaagctgcctcagacccttcttccatagtttcctttcaagatagtgtaagattgatcctgaactaactgcattaaaattaccttcaatgggaaaatgaaaagattcatctcagcttctttctcctacttttcaaacgataagtatttctttcactttgttgttagtattagcaagaattcttggtgagaatttctaatgcaatttagggactagggcacacgccttctccaccagtaacaaaatagtgctaccaggcttgaactaatttttttctttcagcaaattaaagatgttgctatactgtcttctggcttgcattgtttctgatgagaagtctgctgtcattcttttctttgttcctctgaaaaaaatggtaggtacaatataatatcttttttcactggctgcttttaagattttctctttattactggttttaagcaatttaaatatgatgtgccttagtgtagttttctcatgtttcttttttaattattattatactttaagttctgggatacatgtgcagaacatgcaggtttgtggcatgggtatacacatgccatggtggcttgctgtacccatcaacctgtcatctacattaggtatttctcctaagctatgcctcccatagccccctacaccccgacaggcc

SEQ ID NO: 14917 - DNA, 1050 bp, Homo sapiens
tcatccttttttatggctgcatagtattccatgttgtatatgtgtcacattttatctagtctatcactgatgggcatttggattggttccaagtctttgctattgtgaacagtgctgcaataaatatacatgtgcatgtgtctttatagtagaatgatttataatcctttgtgtgtatacccaaaatgggattgctgggtcaaatggcatttctggttctagatccttggggaatcgccactctatcttccacaatggttgaactaatttacactcctaccaacagtgtaaaagcattcctatttcttcacatcctctccagcacctgactttttaatgatcgcctgactttgtaacttttttttgtttcctgactttttaatgatcgccattctaacgggagtgagatggtatctcattgtggttttgatttgcatttctctaatgaccattgatgatgaactttttttcatatgtttgttagccacataaatgtcttcttttgagaagtgtctgttcatatccttgacctacttttggatcgggtttttttttcttgtaaatttaaattccttgtagattctggatattagccctttgtcagatgggtagattgcagaaattttctcccattctgtaggttgcctgttcactctgataatagtttcttttgctgtacagaagctttttagtttaattagatcccatttgtcaattttggcttttgttgccattgcttttggtgttttagtcatgaagtctttgcctatgcctatgtcctgaatggtattgcctaggttttcttctagagtttttatggatttaggtcttacatttaagtctttaatccgtcttgagttaatttttgtataaggtgtaaggaaggggtccagtttcagttttctgcatatgggtagccagttttcccagcaccatttattaaatagggaatcctttccccattgtcttgtttttgtcaggtttgtcaaagatcagatggttgtagatgagtggcattatttctgaggcctctgttctgttccattgatc

SEQ ID NO: 14918 - DNA, 1009 bp, Homo sapiens
ggtatcaagatgatgctggtctcataaaatgattagggaggagtccctctttttctgttgtttggaatagtttcagaaggaatggtaccagctcttcttcgtacctctggtagaattcagctgtcagtccgtctgatcccgggctttttttggttggtaggctattaattactgcctcaatttcagaacttgttattgatctattcagggattcgacttcttcttggtttatacttgggagggtgtgtgtgtccagaaatctatccatttcttctagacctagtttatttgcgtagaggtgtttatagtattctctgatggtagtttgtatttctgtgggatcagtggtgatatcccctttatcatttttactgtgtctatttgattcttctctcttttcttctttattaatctaactagcagtctatttgttgatcttttcaaaaaaccagctcctggattcattttttgaagggttttgttgtatctctatctccttcagttctgctctgatcttagttatttcttgtcttctgctaccttttgaatttgtttgctcttgcttttctagttcttttaattgcgatgttagggtgttgattttagatctttcccactttttttctgtgggcatttagtgctataaatttctctctaaacactgttttagctgtgtctcagagattctggtatgttgtgtctttgttctcattggtttcaaagcacttatttatttctgccttgatttcattatttacccaatagtcattcaggggcaggtttttcagtttccgtgttgttgtgcggttttgagtgattttcttaatcctgagttctaatttgattgcactgtggtctgagagaccgtttgttttgatatctgttctcttgcatttgctgaggagtgttttacttccaattatgtggtcagttttagaataagtgcaatgtggtgctgagaagaatgtatattctgttgatttggggtggagagttctgtagacatcta

SEQ ID NO: 14919 - DNA, 1059 bp, Homo sapiens
tgtgggttaagcctaacatcaatgtcagttgtgggtcagttttgattgagtggttaattgattgttattatgggtcctattttcctgctacttgcatgcctgtcaattttttattagatgccagtctttatgaattttactctgaagggtgctggatatttctgtattcctgtaaataattcttgaactttgttttgtgacacagttaaattctttggggacagtttgatcctttcagggcttgctttggagggaccagagcagctgttagtctggggctaattcttccccatgaccaagacaatgccatcctgagtgttctagccagtcccaaggtttttcgctgttcctttgtattccattcggatgattcttttctcagcctagggtcctctttgcgtgtgtgctgttgccgtagatctccgagttccctcgcctccctctctcagtagctctctctagcactctgccctgtgagctccagctggctcagaggcctctgtctcaatttgtgctcccctttcttgtgctgtggtctggaaactctctaggtaataagctcagtcagttgtagggctacctcatttgtttcctgtctctcagggaccggtgtccagtgtctaaaaactgttgtgtcatgtattctgcccagtctttggctgtttcagctaggggggtaaatatggtctctattgaatcatcttggctgaggtaaatctgaattaaaaaaaaaaatttctcatcacagaaacaatacatttttagtctagaaagttgacaggggaagggaggtagagaaaaagaaaaaaagaatgaagatcacccgtcattttatcacccgttgtaactacctttagtattttttctttatacaacttcaagtctacacccactctcttttatttttcttttgtatttctttaaactagtgctctcatactctttatttactgttttgtaacctggacccaaattttttttcaaaatgcctacttgatgaaactagagtacgtgctgtaagaggtaatatgtctttagaaacaatctaattggcaagca

SEQ ID NO: 14920 - DNA, 1033 bp, Homo sapiens
acaaacagtagatcagtggttacttgaagtttagagagtaaatgccagaggcaggaaggaactttttgaggtgatggaaatgctctatatctagattgcagtagtggttacctgggtatgcacatttgtcaagatgcatctaactgtacacttaaaatgggtgcattttgttgtaaatcatatttcaaacttgacttttaagaagattctgtttccagagagctgaaaatataaaatttctattaacctttgcctttcagacatagtctttgatgatgtacttttagtacttcataggtgtttttgaacttttttctttatagttctttccccaccccctccaaccttatggattacatgtgcttactttttggtaattaaaactgttacgttggacgtgatgcctcacgcctgtaatcccagcaccgttgggaggccaaggtgggaggatctctagagtccaggagtttgagacctgcctggtcaacatagtaggactgcatctctgcgaaaaagaaacagaaatattagccaggcaaggtatcgcatgcctttagtcccagctacttgggaagctgagacgggggatcatttgagtccaagagtttgaggttacagtgagctatgattgcatcactgcactccagcctgagcgacagaccaagaccttgtctctaaaaaaaaccccaataagaaactgttatgatctgtgcagtatttactattgcatattgtcctacatgtacacagtactttcatatgcattagatcaccacgacccagaaagttattttaatcccaattttgtagaagattaaccaaaactcagatgaagcaaattgcttttttcatctgttctcttgtcctctatttaattgcttttgtaaaatatctttcctccttatttattttcctttattagtactctttgaggattacatagttattagaactaaaataaaccaatcaaaatccaaatgagtttacatatgatatgtgctgaaaattttacagtctgtgatatccttgagga

SEQ ID NO: 14921 - DNA, 1006 bp, Homo sapiens
atatatttttctcaaaacaagttgaattttgttaacatatataattctttagtgaatttataaattaggaaccctgagaagaagccctgttgtttttcttaagagtctaaaactgacaatcttttaaaaatcataatacttttctagtaattgcatcagggaattggtgataattgaagaaagatccatttcttaagaataatttgatctaaattattatatggaaataaacatacttgtgttaactaaattgatcataaattcttgttcctgcctcacccctcaccccccagagaatagtgagtgactcgtttagattctctgctttttttcagttatgtacaagacttcagcatacattaatgtctttagtttataaatttgccaatgctttaatttccataatttgaaagttaaaagatgtaactaaaatactagcttttttattcatttccttttggtggagttgtatgattgaaaactttgctttttcttgtttaattcttccgccaccccctcttttgagagaaaggtaatcgtggaatgagttataaattattgcctttttttcctttatttctttcattcagtggcaaaaaacattttataactcctaagtttttggttaatcttccaacttataccttggtgtgaactctctttttacaccattttcaacactggataaaactttaatgttgactttttgctaaagaactttaatttttccaagaatctagattaacataagatgttgatatttaaggaacttggaagagtaagtggtgaggctgtatgtatattttttaagagattaccttttaggaaattagtgaacaaacttaaccagtgttctgccttctttgactttgttactggaggatgataatctatttctattagattcgaagtattttggaaaatatttcaagtatatctgaactacttataattcttaaaacagaagtagtcagacaatatttgtatcctaagtgagatatggaaa

SEQ ID NO: 14922 - DNA, 1030 bp, Homo sapiens
gtatttgaatggtgaccatatgaatttttgtttgcataggtgggtctctaaggagtaatttattcacttttcctgtaagtgtttattgaatcccattatatgccagggactggtggctgctgctggtaaacaggatacatggttcctgtccttgtatagctgatactcttctagtgacttatgtggcccttgtcaatgttctgttcctctcctctagttggatttttcttttagtcaaaggccacctgttttggtgcaaaaacaattgcagttgtttatggtcctatattaaatattatttatatatatagagagaaataaacagtcaactgcattttggtttccaaggagatatatcttggcaaaatttattttatcaagtgcttttctaagaaagagtaccaaaggaaactggctgtaatgccttttggttaagattttcctgaggacccagatagggtttttaaatcttggtttcttctactcccacacccaccccaaaagaatctggaaagctagttatgactagtcctgggtttgatattgattgctggagctttgaagagtcatataacccttctgcatcttcattcattcattcatttcttcattcacttaataagtcttcattgtttacctgttatgtatcaaataatccttgtaaaagggagaaaattgagggttgaattcagttttctttaagacctactgtaaaaattctataaatttattactatgatttagtaagatttaggcctttttatagatagtagaaatatttttgaaagaactgaagaaagaaatttagagtatttgtttttaactctaaaatattttagtgagaaaattctataatggtggataattttagtgttagttcattctgagctgaaaccaatcaacatttaaactcagctcagagtttttctttttaattttggtagtagacagttctgaatctaacctttctgttgttacaggtagcaccctggaaacttaatgcctgtttcagatgattggtataatgtgt

SEQ ID NO: 14923 - DNA, 1036 bp, Homo sapiens
atgtaccatattttctttatccaacccactgttgatgaacacctcctttgattccatgtctttgctgttgtgaatagtgttgtgaggaacgtgtgagtgtatgtgtcttttcagtagaatgacttgctcttctcttctttttttttggagacagggtctcactttgttgcccaggctggagtgcagtggtatcatctctgcttactgcaacctctgcctcctgggttaaagtgattctcccatttcagcctcccgagtagctagaactgttgttgtgccccaccatacctggctaatttttatattttttgtagagatggggttttgccttgttgcccaggctggtctcaaattcctggattcaaatgatccacctgcatttttgggggccattttttgtcccccaaagtgctgggattagagatgtgagccaccgtacctggcctgttttcctttgggtatatacctagtagtgggattgctgggttgaatgtagctctgttttaagctctttgagaaatctccaaactgctttccacagtggctgaactaatatacattcccaccaacagtgtataagagtcccctagaaatatacagatttttaaagagatgttgatggaagtgaagttaattgaaaataccgaaaatacaagtgtaagttcagtcttggcttttccaagtattcatctaggaagcatgttcagttgatcagacagaaatgaaattgctggtaaagttcttgtagttaacttagattatgatgggaaaggagtactttttttatacctgaacttttctattgagttttggactgtgtatgttttttgaatccagtatacccactttaaaccttacgtacagctcatttctccaaaccaaatatttgagatttctctttcatgtttataaatcctcaagatttttgctttggtttattagataaggatttttggtggtataataactaggttgggtggttttatcttaatctctcgtttgctttaatatttagttttatttaatctcctaagaa

SEQ ID NO: 14924 - DNA, 1041 bp, Homo sapiens
ccagtgcctgacatatagtagatgtccaatagatgttggacccagggcttcttacaagccctcccaacttttcaggtttttaaaaatttctctatctgtctgtctgtctgtctgtctatcgagagagatggggtctcagtctgttgcccaggctggaatgctgtggtgtaatcttggctcactgcaaccgctgcctcctgggctcaagtgatcctctcacttcagcttcctgagttgctgggactgtaggtgtgcgccactatgcccagctaattttttgtattttttggtagagacggacggggttttgccacgttacacaggctgctctccaactgctgagctcaagtgatccgccagcttcagtctcccaaactgctaggaggtgtcgtgagccactgtgcctggcatgccaacttttcaattttttctagtgtctttctcttggattttgaaggaccttaatggaaagatatatttcatttgaattatcatggtggattcttggatttgtaaaataaatgtcatctgcactgcacaggaaaattccatctcatcagtagttttctttgaaaggtcatcctgaacattttcccctgggtgtctggggaaggctaagggtaggaaggctaagagcccaggtgggagtgggggagaaggagagcaggaggagtcaatttgggtattttcctggcgtagtttgctacctacccaccttagtaaggactgtactatggccatgtgtgactgggattgtaatggagcagaggttaagagggcactgtgtgggagacgggtactatgtggaagatatttggttctccgtgcatactcatgctctttcatgcacttattcagtcatcagacagttgttgacgctttcctatatgcagtgcactgtgccagtcctttgggattcaaaggatgtcctcacctctgtaggattaagccaagttgatagacaagtaacagaaagttacagctcagttttaagtgccaagttagagggaagctgggggagctttgccaaagcatattaaa

SEQ ID NO: 14925 - DNA, 1052 bp, Homo sapiens
ttttgtgactggcttctaataatgttttcagggtttgtacatgttgtagcatatatcatactttatttctttgtcttgtcaagtaatattctattctaataacattttgtttttttctgttcatcagttgatggacacttgggtttttctactttttggctattaagaataatgttgctttgcaggtgtaagttttaacgtgcacatatgtttccattttttcttggatatatacctaggagttgaattgttgacttatatagtaactctatgcttagtaactctaaacaatccgggcttttgaggaactgccggactgttttccaaagtggctgtaccattttccatttccacgagcagtgtattaaggtcccagtttctccacatctttgccaacacttgttactgtatggcttttctttttatttttgctgtcataataggtgtgaatgacttttatttccttaatgactaatgatggtgagcatctttttatgtgtttgctggccatttgtagatctttggagaaatgtctgtttacattttttgcccattttaaagttaaggtttttgtctttttttgttgagttgtaaatattccttatgtattttagatacagatcttttattagatttgcaaaatgtttcactctgtgggttgtctttctattcaggaggccagactttaagtggaatacaaaagagaaaagggcatgtagtaagcatgaaaacaaaagaataggccgaactgctacaaatattttagacagagtatacctagggtgacctgtggcttgcaggaaaaaaatttgaaattaccacagtgatttaaaaaaatttttggaagtataatccacatcaagtatgcaaactgtaaaggtacagcttgataaatgatcacaaaatgcatacacacatgtaaccaccatgcagggtcaacacagagactattaccagcccccacaaaagccatcttctgcacctttgcaatcattagccctcctgcaccccaaagataacagctcttttgatttctgtcaccattgattagt

SEQ ID NO: 14926 - DNA, 1048 bp, Homo sapiens
tttgccaaatcataaatggtaccttgtgtctgtgacatcacagtttagtttctatgttatttatatttgtatatcttgtttttaaatagtaataatttaacataagcagaaatagtccaggctctgcagtatctattctatagaaagtacttataataaaagtgatatacattaatactataatataaaggcaaatactaaatgaatttaataataagagtggtattttggagtgaaaaaggccactaaatgggggaagttgatctttaattctatttattaaataacaggatgaccttgataaataatgctgttttctcattggtgacatactattagactaagtagttcactttatatttaatcagccattatcctgagtattattagtgtgaataagaaatacttgttagaacattgggcagtggtaatcaaaatgaatttcgaagtggaattgtagtaatggttgccttaccttgagtaatgataaggacaatatttctgtaatggattgtttattcatgaaagatgaaagattaaaatggtctgtctctactgatgaaagtaacagaaggcagcctcaaagtttatttttatttttatttttttagagacatagtcttgctttgtcacctaggctggagtgcagtggtgtgatctcagctcactgcatcctcgacctccctggctcaagtgatcctcccacctcagcctcccaagtagctgggactacaggcatgtatcaccatgcctggctaatttttgttttgttttgttttgttttggttgggacagggtttcaccctgttgtccaggctggtcttcagctcctgagctcaagtgatccacctgcctctgcctcccaaagtgctgggattacagacctgcaacaccgtgcctggccagagtcttcaaagcatattaaaatatctattattattttattataggcataattgagtgttttatggagctatggatggttgtttctcaataatgttcactataattggagtttaagcaaaggtatggtttcacatgtattctt

SEQ ID NO: 14927 - DNA, 1046 bp, Homo sapiens
taatacaaggcttggaaagaaaaattcctatgctgtatgcttcctgcttctctctctgaggcaaccgttttgaaagttttttttttttttttgctgtttctagtcgcattcactgccatatatctaaataatatattttcactcctatagcctgtagttttcaattgcaaacattatattttgacttcttcctatacaaggtaaggatttggctcctcctatttccctttccccatcctctcaatgataattttacctaagttttggtcaagccatcattcagtatttacagtattatcatttgaatgttgatgacagtgaccacagagttttcagtgatcataatttctttctccaactgtttctccaatagagacagaccattttatttgcttagctttctatttatcaaacaataattttgttctaaatattcttatagaactataacaactcaaagggtaaagcagattagagaattcttcagttctggttttctcttggcactgtctctttcggggttctgtgtcctgttggttctgagctgcttgctttctagcctctggggagctgccattttggaacttctttttaccaccatcttggggattctcttgggctttttcctttggtggactttctatttcctagattctgtgtggtcatctttctttattttcccattttggtgggaaagagatatataagtattaatatataccaatatccatctgcccatgagtgggatttaaagcaaacttttatttcctaattgtctgctactaatatgtaagaatatacttgatttttttttacatcagctttgtatcctgcaatcttgttaaattcatttcttataatagtgtagttgttttttagattctggaattttctacacaaatgatcatgttccacaaataagagattttacttctttatttccgatctttatgctttacacctctttttcttgctttattccagtatagtgttgactagaaagtggtgatatcaagcattcttgctttactcttctcaggagaaaa

SEQ ID NO: 14928 - DNA, 1029 bp, Homo sapiens
tgggcaacattgagcactgagtgagtgagactccgtctgcaatcctggcacctcgggaggccgaggcgggcagatcacccgagttcaggagctggagaccagtccggccaacacggcgaaaccccgtctccaccaaaaaatacaaaaaccagtcaggcgtggcggcgcgtgcctgcaatcccaggcactcggcaggctgaggcaggagaatcaggcagggaggttgcagtgagccgagatcgcagcagtacagtccagcctcggcaaccgagggagaccgtggaaagcaggagatggagacgagggagagggggagacagtggaaagaaggagagggagagggagagctaatcttcttaaatgtctataggatctctggttttttggttttgtatttccatttctgatactaatgatttgtgttttgtctttttttttttgatcactctaactaaaagtgtgtcggttttgttgatatggtacttttaaagactcagcttttggctgtgttaattttttctgttgtctttttttcatttcagtgacttctgttttctgttattttcttctttctattttgggtttagtttgctctttttcttgtttcttaaggtggaaccttaggtaactgtggtagatctttcttattttcttttattaagcatttaaaataagacatgttttctatttgttgccatttggttcagatgttttctgatttcctttttggtttcatttttgacctatgagctctggaggtgtgttgtttcatacattggggattttcttagatatcctgttattgatttctaatttaattctgttgtggtcagagaatatttgtggaatttcaatccttttattgagagcccaccatatgatatgatctgtcttgataaatgtaccatgtgcatttgaaaggaatgtgtctttttcaattgccacattttctgtgaatgttaattaggttgatagtgtttttcagaacttctaggtcattcctgatttttttttttgtctaattgttct

SEQ ID NO: 14929 - DNA, 1031 bp, Homo sapiens
aggtgtgctggtacccgcctgtagtcccatctcctcagaaggctgaggtgggaggatcccttgagcacaggagttcaaggctgcagtgagctatgatcatgccaccctgtctaaggaacaaaagaaaaaaatagttagctaaaggtcacatcttaaagtttgtctttaattcagtaatcaaagacatcattactgtagccaagaaaggtgtgtgtgtggcttctgtaggtgtttaacacaggctgtctgaataacagaaggcacataaaaatttgttaaataaaaagactttatgaaaaggtatgcatacgtatgtttcaaacgattcttctagataaccatttcacctctgcagaagttgttttctagcaggaatgtgttacgatttctgttctacacgtggagaattgtcttttatatagaggaaactacttaaccagcatcgtaacccttcgttgcttaaattattggattttgtgtctttcttgtttcttgagccattaaaatggttggttttactgtgcttaacatttaaataaaaacctaaggcagatgcttttggtatgattcaatttgttatgctaaagatgaatccaagttaatttctagagtatcagtatgatacgaagacattgcatttcatcttccttttggataaaagccaagacagatcactctgcagagcaaggtgtgttgttaactgagatatcagtgcacagcacatacttcatacaaggtgttcaaatatttgaatttgtgagaaatgactctggtgtgcagaaaatggcatttattgagaaggcctaaaatatgatttttaattttccctaagtcagtagatactgcaaaatactttgttcattattgttcattttaggataatgtaccacaagtttgaaaaagtaatgcaaaaattattcaataaaagatacagacgcaggtttttgtcaaagcagaatctaccatctagactttaattgacccaagctacaaagaagttaagtctaatttatcttatgtatttgggagat

SEQ ID NO: 14930 - DNA, 1062 bp, Homo sapiens
ctgcccgccttggcctctcaaagtgctgggattacaggcatgagtcactgttcctggccttgggtaagatttaaaacttcactgattattatactccttcctaaaatagagataatgcccatgtcctaggattgttgtattggttatgtgatgtaaagaatatgtgcctggcatattggagacactatcattattatttataagggaaattacttaattggaagacaattagatatttggtatttaaaattaatatcaaggaggaagtttctagatgtcctagattttatttttactattataatagtatttgtggttattgaggactgtgtgaacagttttataactgccgctgtccccctctccctccacatttggaataggtagccatctttaaaataacatgtaaagatgcacgtttttgagagaccttcacatgaataatgaaaagcttctgaatataattatatatattgaaatatgtgcccctattaatgccacttatatgttcattgtagatcatctgtctccattcttcttaaactgggtatctttcatagcagtgccaaacagacttttcatgtacttctctgcctcaatattttctttttgagtttaagttttagaagtaccaattcatattccttctttttgctagcacagtgtacctattagttatttacatatatgtataatgagtttgaaaaatgttacataaaaagaatcttggcctggcgcggtggctcacgcctgtaatcccagcactttgggaggccaaggcaggtggatcatgaggtcgggagtttaagaccaacctggctaagatgttgaaaccccgtctctactaaaaatacaaaaaaattagctgggcgtggtggcaggcacctgtaatcccagctactcaggaggctgaggcaggagaatcgcttgaacccaggtggcagaggttgcagtaagccaagattgcaccactgcactgcagcctaggtgacaggctgagactctgtctcaaaaaaaaaaaaaaaaaaaaaaaaatcttaatcatattgttttcacattcta

SEQ ID NO: 14931 - DNA, 1028 bp, Homo sapiens
aactactaagttctgatgatttttattcttcttagcttccattttatgtgattgggaacagagtttggcaattacatagtttgaaatagtgtttaaaattatttattggaagctcttatggacgtgtctgacttatttaatacattttagaaattggtacatgtgctgtagatgattactattgggcatgtgtgtgggtattcttttaaccaataagcttagcattcataggaaatacaaccatggtgggagcttagtaggtgatctgaaatgagcagtgtgagaattgtggaatttccaaatatgcagtgtttggtttcttcggaacagggtttctaaacctcaccagtattttcgctttaggcaggataattctttgttggaggggactgtcctgtgcattgtaagatgtttagtggcttccctggtttttgtgtattacatgccaatagtgtgcccaccccccacttcacttgtgatgaccaaaaatgttaccagatgttgcaagatgtcacctgtgggtacaaaattgctccctgtagagaactagtattttggaatagtgattcccataggcatgtgatggaccaactcatcaaaatcactttgttgttgttgttgttttttcttctatacatacagcttccagggtgagatctttgagtagcagtctgtggacagactgaatgaatagccaagcaagaatttgttgtttaagtgggaatggctgttggttggcttaaatttaaatatgtgttgaggcggggcatagtgcagtggctcacgcctgtaatcccagcattttgggaggctgaggcgggtggatcacctgaggtgaggagttcaagattagcctggccaacatggtgaaaccccgtctctgctaaaaacacaaaaattagccggtgtggtggtgcacacctgtaatcccagctactcaggaggctgaggcaggagaattgcttgaacccaggaggcggaggttgcagtgagctgagatcttgccactgtactccagcctgggcgac

SEQ ID NO: 14932 - DNA, 1058 bp, Homo sapiens
tggctgcaagttactttttagtgtccttttatttttaccctgcagggacttcttttatcatttcttgcaagacgggtctaatggtagtcaactttctcagcttttttttttgtctgagaatgtcttcatttcgcacccacttttgaaggacagttttgacagaataacattctggttgataggtttgtttgtttgttttttgcactttgaatatatcttcctactgccttttggcctccaaagtttctgatgagaaaactgctaataatcttaggaggatcctttgtatgtgatgagttgcttttctcctgctgctttcaagattctatctttgtctttagaaagatattataatgtgtatcaatgggggtctctttgagttttcttgtctccttttggaactctcacaatgtatgtgttgcttagcttgatggtgtcccataggtcccctggctctgctcacttttctacagtcttcttcctgtttctcagacttgatcattttcattgtcctctcttcaggttcactgattctttcttctgcatcctcaaatctgcctttgattccctcagtggatttttcatttctattgtgcatttcaacttcaaaaatttttttctggattttgcatctctttatgaatattttcattttgcttatgaatttttttttaagtttctctacatcttcctttagttctttgtttatctttaacatggttgtttttgtctagtaaatctgccaacaagtatttttcagggtcagtttttaatttattttttcctttgaatgggcagtattttcctgtttgtgtttcttgtgattttgttgttgttgttgaaaactggacactttatttttttatttttattttttttgagatggagtctcatttttttgagatggagtgcggtggtgtgatcttgactcactgcagcctccacctcccagattcaagcgattctcctgcctcagcctcccaagcagctgggactataggtgtgtgccactgtgcctgctaatttttgtatttttagtagtgatggggttttgtttg

SEQ ID NO: 14933 - DNA, 1089 bp, Homo sapiens
agtttacagtcccaccaacagtgagaaagtattcctatttctccacatcctctccagcacctgttgttgcctaactttttaatggtcaccattctaactggtgtgagatggtatctcattgtggttttgatttgcatttctctgatggccagtgatgatgagcattttttcatgtgtctgttggcttcagcaatgtatgtgttttacctcccccttgcaggtagcgtgtgatttaacaattcaattttgcaaatttcataggtgaaaaaatggaattttatcactatttttctgtgcatttctcttgttataagtgaggttgaacatactatcgtgtgcttaagaacaatttccctttctgtgaattgactctgccaatttatctatggaaataatgtttttatataaaaaggaaattagcactttgtgataggggctgctagttttttccagtgggtttgtattttgtcgtttatggtaatttttgctatatatgaatttatttttggatcatcaggtttattactattctacttcatggttttggaattttatgtcttacttaggtcttaggctcttcaagattatgaaaaaatatcttgcttttaatactttgtggggttttatgtttaagactttaaatcaatttgggatttattttaatgtgagttggtatcccatcctcttttccatgtggctgtatagttgtgccagcaccatttattgaacaatttatcttttccacactgatgtcacattttatcttatcaaattcctgaagtctttttagaatgtttgttgtatccattgatttgatggcttgttcatgaaccagttttagaccttttaaattattatatatttataacatattttatactatctggcaaatattaaagctggtcccccttattactcttcttttttataattgccctcattgttcttgtttattttccatataaactacagacataccttctgaattttttttttttttttttttttgagacagagtctcactctgtcacccaggctggagtgcagtggcacgatctcggctcactgcaacctctatcgcccgggttc

SEQ ID NO: 14934 - DNA, 1089 bp, Homo sapiens
ggctaattttttgtatttttagtagagacggggtttcaccgtcttagacagggtggtctcaatctcttgatctcgtgatctgcctgccttggcctcccaaagtgctgggattacaggcatgagctgctgcacccggccagcttttgaatttctaaaagaatatcctgataatcttattgggattgcgttaaatttacttattaatttaaaatttttaaagcattgatcctctaagaatttgttttgtgtagctcaaatatttctcatctgcttttaaaaaaaagttgattttacaaaatttgctgggagtggtaggggcggctcatgcctgtaatcttagcacttttggaggccgaggcaggaggattgcttgagcccaggagttcaaaaccagcctgggcgatagtgagaccctgtctcttagaaactacatatatattttacaaatttatttttctttgaggcagagtctcgttctgtcacccaggctggagtccagtagcatgatctcgacttgttgcaacctctgcctctgtggttcgaggtatttcggggtgcctcagccacttaagtagctaggattacaggtgtgtttcacttcacttagcaaatttttgtatttttggtagtttcaccatgttggccaggctggtctcgaactcctagcctcaagtgatctgcccgcctggacttcccaaagtgctgggattccaggcgtaagacaccgcgcctggcttattgtacaagcatttcattactgatactacagagagcagttactcatcatactacctctatcacaacaaacatttctgttttccctttacttttagtgatgctgaatcatattttagggcctttattattatatattctgtaattagcaaggcatcatgcatacagtaggtaaaagtttagagagcttgtccataccactgtgggatcctcaataggaagtaatttggaagtatctattgaaatttaaaatatacacaggcatgtaccgtaactctttagttgtttactcagcatctatcctaaagaaaacatgggccgtgactcacatactgtttttttcagtaccttctg

SEQ ID NO: 14935 - DNA, 1154 bp, Homo sapiens
gggccatcgggaatctgggaattaaggaagtaaggaggtagaattggaatgtttaagccaccaagtaactattagattggtgcctgggttttgggtcatgctctcatgtgcttctgcctgcagcttacttgcctccctcttgggctggttggaaagccgtgggctggttactatgggaattgatgggtgctgctggcagtgagagaaggaaagtacttggaattgatacagaaatactaggagagcaggttttttttttgccctctgctttcctgcttactgttttttgatttgatttaactaatgtggttttagctgaagagagcctttccaagagctcacctgtggtaccctgaggaggagttgagctgtcatcactctaacccaggaagacctcatggagaggagggcaacacaaaggatggctagtttctcagatgaatttctgtttcagcaactggcttctcaggcttcattgaactcaaaattaaacccaagcctctttttatactgttaagaaatgtgctgcagacaggagggggaaagtcagtatttaattctctcttcttcactaccgtcttcttcactaccactcctctccctcttcttcactgccaccaccccttgcaaggaaaaggtaggtggagcattctgtgtttgtcataaatttaatgattctgaaatgttggaaatagaaaacagatgttttaatggggtgatacccacattggaaagcatcaaggtcaaaatatattttatgagtcaactttaatttgattaataacttaaaaccctctaccatagtatatgctactttattttcataactactcatgagtatggaatggaaaacattaatttatctttctaagaaaagtatttggctggaggagaaaagaatattaaagtgtcatggacattataaaatttggtagcacagtcttttttcccctacatttttagtttcagttcactgtttctgttgtttctaaatattttaccactaatgaaaaccttatttaggtaaaacgttttcttttgatttaaaagatttttgttgaattccttgcccagatgtgagagaagtgtctacatctattcaaactttaactttgggtcttagaggtgatgaatcacttggcagaacaaccatg

SEQ ID NO: 14936 - DNA, 1048 bp, Homo sapiens
ctaattgtgtcctcatagcagcgttatattttttaaccccaaaatggtacctaaagtggagatttgtatgcattatgaactaaatacattttcttaagtagtatttattgtgtttagggtttgccactatttctgactaaaatggatgttcatggtctcaagcacattgaccagttatcttttaataaactattttttattgtgcacagaaccaatgtaatggcattagttacttgttctttcagtttattttgataacaattttctcttccatagtagttctctccatttaattgaatttgggcatgttatgtgagtgcttttgatctataaattagtcattaatagatgtaatatttaaatgattttagggatataacgcaaactattttatctcataactcagacacagttttcaacatttctagagagaaattttcctgcctgcttggaacaacactttgaattgtcatgtgaaagcaattccattgccatttcagtgtccagatttatgtcagcattaattactgtcgctggggagttctgtgagccaacattgtatgtgtgtggatatttacaaatgcaccgttggattctttgtcgttcaagtgaatgttgactatttacaggtaaagaactctcttgtctttgtagatatcaggttatttgaatcaagtaatatttgcctatctatttatacattaatatgtttaaaaagaaatttctccaagaagaagcattcgtcattcactatttgtttgatgagatgatacttacattcttattgtgtaatcataaaatagctaattttgtcgtgcttaatgccaagagcagatgcactttctaataaaaacaacatgcaaagcccaaatctaagcattatgtagaagcctattaaaatcttggagtattttttttgtaatttaaaaacgtaattgtggtttgcattgtgcccagttttcaaaaaagtatgtgattggtgccacagcttaaaaaccgaagaagcaaaaattgtcccttatgtttttaagtataatgagtcattttg

SEQ ID NO: 14937 - DNA, 1064 bp, Homo sapiens
gcccccagtgtgtggaaaaattgtcttccacaaaactagtctgtggtgccaaaaagattggggaccgctggtttagggcatagacccccaaattgattcttatctaacaattcacctggcttgtaaaacacaaggaagcttttgtaaattgcttacatttgttgttgttgatgtttaacttccatttccccccctacattgcctatacaccctctctccagagatctttctgttggccctactcactctccctaattcagcacccagagtagatcagatgtttcaagaactgggtgtctttcctgcccaaagaaaacattggaaaacatttattttgatttaaaaagatgtttcataatcatacggatgtgcgatttagacagaaaaagatagtgaatcatgaaatatttttaataccctaaatgtatttgcaactgttttttgccaaatcttaccatgtgtactttaaatattctccagcatctgcaatgaaatttctgtttgactagtaggaacagctatctgactatacagggttcgattttctgtggggaaaccacttggggtggtgtttctatcaagtcatcaggaaaggacacaggctcctggctttcagccttttgggtgtaaggcctttgtccccaaatccacaggagctccagcctagttgtctgcaagaggaggggaaaggaaaacaggcaaatgagactttctggaatctctactcattgacttctacttgaaactccttggccactgctatcttcaagggaggctcaagtgtggtgtttaaatgggcactttgccagcccaaataaaatgatacttctatcgctaaagaaggggagcggagtggaaactgagtttgaaaaagttgactttctgccatcaaatacaacttttattttttaagtcatgaatctgcctaaccatcttgccaaaatttagagtgaagggtgttatttaagagtattttaaagaaatatttcagctttcgacaaattatttcccaggtcatttctatgcttttgtaaaattcttaatgcaccattattactttccaa

SEQ ID NO: 14938 - DNA, 1082 bp, Homo sapiens
agggagcaacctgtttgttgttgttgttgttgttgttattgttgttttgagataatctcattctgtcgtccagactggagtgcagtggtgcaatcatggctcactgcagcctcgacctccccggctcaagcaatcctcccacctcaaccccacaagtagctggaacaacagtcaaatgctcagcctgccttggcttcccaaagtgctgagattacaggcgtgagccaccgtttcaggcttaatgttttatttcaaacacacacacacacacacacacacacacacacacacacacacacacacacaccccttcccccgcccccccacatgaagagttggcatttgtaggctacattttcagtaaattgtaaatgaagagaattatgagaatttacctgataatcctcatttattatagttcgggttgtgcgtgtgtgggaaaaatgctgtcctgtttctgctaatccaagtctgtcagcaccatctcccctctgtcacctaatgatttgactgtatttcaacctgtgtaatggcgaggcaccacggtagctagcattggccgagatgcctgtccttgacaacaaggtctttgtttggctgtgttgggaaatattggctactaccagggctgagtgcaaagagggtggtatagtaactcagtttttcgtgctagcagcctgatggcacagttacagcaaggatttggcaggaaggagcaagtgtggattgcttgaagtttcaaggggagatgaggcaggagagaatttagaactgtggtgttgtttttattagtttagaagttttaatcttcaatatagccgtgtttttttccaacagcataaagggtcagcttgatgccctgttaaaaaagagccagaagtggggtttacaggtgacaattttagtgtgttccttttctttaagaaaaatctttgattctgaaagagcttgacagagctgtttaatagtgtggacatctgttgaggcagatagcagttttctggatataggtcatgttaatataaactctggatataaacaacctctgctgtctgcttcagacttgaagactgtgtgatagg

SEQ ID NO: 14939 - DNA, 1004 bp, Homo sapiens
agagacaggagctcactctctcgcccagggcacaattatggttcactccagcctcaatctcccaggctcaagcgatccatctcagcttcccaagtagctgggaccatgggcatatgccaccatgcctggctagattttttttttttttttaatgtagggatggggtccactctattgcccaggctggtctcaaactcctgggctcaagcaattctcccaccgtggcctcccaaagtgctgggattataggcatgagccattgtgcccagccagtaaatggcattttcatacatttacctccttttttgttgtcccggaaggcagaatctgggatctcttttacttatgtaactgttctccaatttccaaatcaatttatatcgaaagaatatatctgtggtgcctgcccctttatccctcccccaaaacataggtatttatttttttagagacagggtcttgctctgtcacccaggctggagtgcagtggtgtgactgtagctctgtagctttctgcagccttgaactcctgggcccaagcaattttcctgcctcagcctcctgagtagctaggactacaggtgcccaaaccctccacgcccccagttttttttatttttggagtgatggggtttcaccatgttacccaggctggtgttgaatcctgggctcaagcagttttccccattcaccctcccaaagtgctgggattacgggtgtgagctattgcacctggcgaaagtagttgttgaagaactacttgggcagatgggaggtcttgttttactgctatgtttgtgaacaatacaaattcaattatttttgtggatgtgacttctagagaaacaattaaattgattaaccagagtgactgaggagactttcattatgtttctccaaggacataatgttgaacaacaaaaaaagtattttgacaaagtatcatcaccaaagtatccctcatcagaatatatagcacaggctggaaacttggattattgttt

SEQ ID NO: 14940 - DNA, 1043 bp, Homo sapiens
tttcaccatgtttagtcaggctggtctcaaactcctgacctcgtgatccacctgccttggccttccaaagtgctgggattacaggcatgagccactgcgcctggctcaggctgatcttgaactctcgggctcagttgatcctcccatcttggcctcctagaagtgctggaattacaggtgggagccactgcacccagacagaggattttttaattgagaatttttgtttgtaaattcttgaggaatattggttcattgttttcttattttgtaatgctcttgtctggctttagtattgtggtaatataaaatgagctgggaagtgttgtctctttctctgttttctagaagagttcgtgaagaattggcattgtttctttatgtatctgatagaattccatggtgaagccatctagtcctggtattttctttttgggaagatttttaattagtaattcaatttcttgttttaggtatattgagattttctgtttcttcttgagttggtattggttatttatgtctctctaggaatttgtccatttaatctaatttgtctaatttgatggcatactgtttttatattttcttttatatatttaaaatatatttatattttatactgtagggtcaatagtgatgctccctcatttattcctgattttggtaattttgggggggataattttctttttttcttggtcaatctaaataaagctttgtctattttatttactttttcaaagaaccagcttttggttttattgacttttactgtttttctgttttcagtttcattgggttttgctctaaactttaacttctttcttttggcttgcttggggttactttactgtttagtttcttaaagtgaagacgattgagatctttcttattttctaaaataggtttaagtttaaagctataaaattctcagctgtgagcagtgtttcacacctgtaatcccagcactttgagaggccaaggtgggaggatcatttgaggccaggagttcgagaccagcctgggtaacatagtgacac

SEQ ID NO: 14941 - DNA, 1048 bp, Homo sapiens
tctactaaaatacagaaattagctgggcatggtggcgcgtgtctgtaatcccagctactcaggaggctgaggcaggagaatcacttgaacccaggaggcagaggttgcagtgagctgagatcacgccactgcactccagcctgggcaacaagagcaaaactccatctcaaaaaacaaacaaacaaaaaaacaaaaaaaaagatcctacagttttatttatttttattacaatggggtcttgctatattgcccaggctggtcttgaactcctagactcaagggatcgttcttccttggcctcccagaatgctggggattacagatgtgagccaccacacctggcccataccgttctaaatgatcatacacatatacaatcccaggaatttaaatacatgtatggatttttgtgactttcattataataaagattcagaagagttttgtaaccccctaaaactccctcatgctacccctttatagtcacctctttgcctacctataatctctggcaaccactgatctgccatccattcctgtagttttttcttttaaagaatgtcacttaacttaataaattgggatgttatataagtggagccatacagtatataatcttccaagactagctgctttcactaagcttgcctttgagattcatccaagctgttgcatgtatcagtagttgctttttatttcaggatattccattgtgtggatataccaatttgcttatacaatcacctgttgaaggacacttgagttgttgccagttttgagtgattgtgaatagagctgctatgaacatttgtgtccagatttttctgttaatgtaagctttcatttctctaggatagatgcccaggtgcatgatttctgagtcatagggtaagtgctttatgagaaactgccaaaccactttcacgagtgactgtatcatttttcgttctcaccagcaatgttggagagttctcatttcccattcttgccactacatggtattgccagcattttaaattttggccattttaataggtgtgagtgggat

SEQ ID NO: 14942 - DNA, 1046 bp, Homo sapiens
ggtttaagtgattctcatgcctcagcctcccgagtagctgagactacaggcacatgctaccatgcctggcaattttgtgtgtgtgtgtgtgtgtttttagtagagacagggtctcactatgttggccaggctggtttcaaactcctggcctcaagtgatccacccggctcaacctcccaaagggattacaggcatgagccaccatgcccagcctagaatcttgagtattttaaaagcccagaaacaaaaatttttggctattagggtagagtatgttaaatatgaaaacttgtcaacatttaaaacatgttgcagataactaaaataaaatactcttattcctagtgacccatttaatccagagagactatttttcacctacattagtgcaaatgtagttatggtttaatatacttctcagttttatcatccttgtgttctcgtaagactcctctaacaccgtgttctgccacatgttaatgaagttctttatgtttctttccctgttatactctgattttcttaaggacaggagctgctttttaaatttctcctagcatagtgcattccttatattaaataatcagaaaatattatctccatattttataaaagacttagtaataaaattccagaagttttgaattcttatgcatgtccccccttgctgtaggacagttagttgcaattcttgtatgatgtaacatgaaattttgtagtcatcatgtccctgacctctattgaaaaaatgtgcttgataaattttagcatgatgaagtttgtatgtctgagtttagcttcaaatggtgtagatagtattatttaaaaatgggaagatctggagttcttatatctaatagtatagctcattttatcctaagaacaatgcatgtgaaagtaaattacaaagttatacaactagaaggtcatgatggaattttctggcatgttacctgtttttgttttgatgctgaacccatgtgtatattcagtcacttttaaatgttctctgagtaaactgctgtcctcaataagctgattatgct

SEQ ID NO: 14943 - DNA, 1045 bp, Homo sapiens
atttttaaaaaaaatttccttcacaaaccaattgaataaaattagtctggcctatggagttaggtgccccctttgtaaaatggaaagctttactaaacagtgtgtgcagagagaccatctgtctctatttctatctgaatatttggctccctccctaaatttgatggtatccccattgtattactatgcagtggcctcaatttaaagatggagaagccaatgtacattcatctgttctgcatgtgtatagagtctgttgatcgtaaagatttaggccaagatcctgcattcattgttactataatttgatcctttagttgtattttgatgatcacttggaataacattcagttgtattcgttcagagcatcaaggaaaatctcatttaatacactattctcaacaaatgttaaaagtaacttacaaaaataatacatactggtaaaaaagtagaaaatgcaggtaaacataaagacaaaaatgaaaaccatctataattttaccgtccagaagtggccattactaacataggctaataataggttctcacagaacacagagcacaccattgagaaggggcagggggaccctatgccaacaattaataagggactggctggagatgatgacagctagaaactcttaaatacctatgtatggtgtgtgttagacttagtgtcttctaaactggaagtatttattagctgtgttcattttatttaagataaaagaaagcacctgttgaaggagtaactgccctattctggttgacttttgtttccattgattttttaggaagtgtttttcttatgcagggcatgtttctctatgtaagcatgaattttcctcttgattcttaagtgaagggataatataaaatgagctgctatatagaaagagtagaataataacatacttttaaaaggaatgccttctgctcctctgatggaaagataggaaagtcaagtcaccagaagctgcatgtggttattatcaagggataactgaatgtcagaatccctcctaggttttttttttttccttt

SEQ ID NO: 14944 - DNA, 1026 bp, Homo sapiens
cactaatcacttgctgtcagcagctagttcctctgaggggaagagcggggctgatcctgcctctgttgtgagactgcatgattagagggacatttctgaattcatgtccattccttcatttccagtgcatactgaaatcaaaataccatcaaaggctgatagaactgattcacagaatttgtttttaggaattttggattttttaaagtacagctaagcctggtggtggctcatgtctgtaatcccagcaccttgggaggctgaggtgggagaattgtttgaagccaggagctcaagagcagcctgggcaatatagcaagaccgcatctctacgaaaaataaaatttaaaaaattttaaaactaaataaaaagtgctgtgttatagctaggacaaacaaaaaaaaggttgtgtcatttgtcttggaagtgatgtctttgctgaatgagaaaaagaatacagtgacaagggaagcagtttcactgctgaaaacattctgactcttgttagaacagaattttcctcctccaagagagatggttatttagacatgacattgtttgaaattagggcaaaatcatgtagtgttttaaaaaagtactcaaatatacagtgaaaagaaagccaagctgtaacgcattaatcagaacttattcatgctggctgggcagggtggctcaggcctgtaatcccagcactttgggaggtccaagtaggcggattgcctgaggtcaggagtttgagaccagcctggccaacatggtgaaaccccaactctactaaaaagaaaaaaaattagccagacgtggtggcacacacctgtagtctcagctactcaggaggctgaagcaggagaattgcttgaactcgggaggtggaggttgcagtgagccaagattctccagcctgggtgacagagcgaaactccatctttaaaaaaaaaaagaagaagaacttatttatgctatatggaagataattttttctctctccttctggtgagaataatttgctgctccatgtgagg

SEQ ID NO: 14945 - DNA, 1029 bp, Homo sapiens
ccacagtgccaccagcaatatatgaatatattacgtctctaccaagggctggttttttatttcagaaacattgttttttatattgggttaggcatgagatagtagctaagttttatttgctttgtgtttctttgattcatgtttatgatgtctattttttctattaaacaatttaaattaactattgtaaacatgtttcaagcaataaattataactttacagattacttgtaaaactatatttttactgttcataattacattcagttcagattatgctatagatgtcctcagggaagtatgcaactgaaatattaatacatagcctgcagataccatgataaccagtgcaagtgacaaaaaattgatagttaaagccctgtaactcttgtaattgtagtttcctttccccttcacaagtaaaacaccaagcttaactttctttgccttgtacacacatgcttatatatcttataatcaggtgattggactgtacctgatctaattactttgagctttgaactattcgctgtttcccctcactaagaatgtgaaatttttattataatcattattgtgaaagtatcaaccaaaaataaaactatttacctggaatattttaatgatgacataattatttattgttactctttgtaccatcctggttaaaactcaagaaccagaactaataagaaaacttcacactaaacatttaaatgtgaggaatggagtaggtggaaggaagtcaaccgtatatggatataatgttaatctctccccctttcaacaaaaccttagctaaacagcacatcaagaaataaagcattatgtctcgtctgactagataaatagtttattcctttaggaaccaagttttatttaatgatttttttattcataataaaattttagaaacttatgggaacataatattgtgtgtaatggctaagtaaatgagctgattaattaacattaaatcagcagttaatatgtttaaatctggtactgctatatactacttctgactaa

SEQ ID NO: 14946 - DNA, 1075 bp, Homo sapiens
tgtgacatcttacatggttttttggactaagtctttgtaacctgaagtacattttagacttaccgcatatctcaattagaatgctaaattttcattggtgatacttgatgtatatttagatttcataaaatttataatgaaaaggtagatttaatatacctagattcttccaaatggacttttaaaaatctttaaaataacagaattaagtatccatttttaaatcatatattaattaaaatttaatataatttgatattccttggtcacactagacacatttcaagtgctcaatagccacagctggctgtggccactgtaatgaaccacacaagtctaaacagactgctcagggaggtatgttctccttcttcagtgctttgtttttttatttttatcatccctcccctgaaaattaggatttttgctttctctctcttatttttaatctgttgcctggagagcccaccgtttgaaccccatcatttaatgctagaagtctttgcgggaagtgggatactgaacacccctgctcaagacatgtgggcaggtctggaatttcctagttaccaggcttgtttgaaggcccaacacacagcttttaagctgtgaattttggcctgtttataaatccaagaaaacattagtttgtaacatcactgaaagaaatcacaagagattatagagcagtgacctatgcctattgcaaactttaaagatcaataattttttgccatccttctcaaaagaggcaggcacacctcctcaggtatgtggtgatgtcaggaagtgtttgaagacacagaataaacaggacacctttcttcaagcctttaatgttggggggaggcagggtaaggacgagcttattttctcatgaaaataaatgtattatgaggtagaatggaaaatatcagttttcagataaaacatgggtcttcaaagaatttctacacctgtgaatttttctcaagccccagccactccccgaactactagggatatgaatttataggcctgttttattaggggtggtttggtggaaaaacttagacatgggttgatttatactcat

SEQ ID NO: 14947 - DNA, 1016 bp, Homo sapiens
gaatcatctacctttgtttcaaagggttctagtcctgctttcaatcccatatacttgggcctgatggatctttcgaaagtgaaattgtggcctcatgatggcatcatttgaaagcctccgatgactgtttcccgaggagggtgaactttctctccttacctgctcttgctttcctgcctccattttgctcatggcattcccttgaattaggttctatgagtggaatacagctttgaaggcaattccagagatccaacaaaaacccaggagattggaaggaattcatatttgtcaaaaaatgtgtagctcaaaaatataaaaaaaaaaaataatgcaaataaaacccaatagagtataacaactatttacatagcatttatattgtattaggtattataactgatctacagatgatttaaagtatagaggagggtggcataggttatatgaaaatactacaccactttatattaatataagagacttgagcatctgcagattttggtatcctctgggggggtactggaggcaatcttcctgggatactgaggggtgactgtaacttattttcagtactttggtaatagtgtatttaacggtctattgtttctcagggtttgtggatgatagtccattaggatctgaaaataagatattagaagttctatttacttttttttgtttttctgaaattttaagtgtatatgaagttaagggaatacatgtaattttgaaataattaaatattcatgtttggaaatctgttcaaatttttgggtggctgggaacacaaccaaaaagatatgaaaaccaataacaattatgtatcagtaggcattttataaatagtctttgatattattttggatataagtgatttgattggcacttctcatttaattgcttattaggtgggtttctgttttgtagagaacatttaaaaaaaatttagacaagcaaaagttaataaaatcacctgtggtatgaccactcagaggtaagtataatgaatgttt

SEQ ID NO: 14948 - DNA, 1060 bp, Homo sapiens
ccacaacctccgcctcccaggttcaagcaatgctcctgcctcagcctcccaagtagctgagatcacaggcgcacaccaccacgcccggctaatttttgtatttttagtagagacgggatttcaccatgttggttaggctggtctcgaactcctgacctcgtgatccacctgcctcggcctcccaaagtgctgggattacaggtgtgagccacaatgcccggcctttttttttttttttttttttttttgagatggagtttcactcttgttgcccaggctggagtgcaatgacacgatctcagttcaccgcaacctccgcctctggggctcaagcgattctcctgcctcagcctcccaagtagccaggattacaggcatgtaccaccacacccggctgatttttgtatttttagtagagatgggattctccatgttggtcaggctggtctcgaactcccgacctcaggtgatccacccgcttcggcctcctaaagtgctgggattacaggcgtgagccaccacgcctggcatggattgttttatttcttaacctgggtggtgggtacatggctatatttagtttgtgataactcactgaactgtatccttacaatctgtacgttctatcaatgcaaaagtttattttaaaaaatattttttcgaagcacagtggctcatgcctgtaatctcaacactttgggaggccaaggcaggataatcgtttgagcccaggagttcaagaccagcctgagcaacatagcaagactccaatctctacaaaaaataaataattagccatgtgtggtggctcacacctgtgatcccagctacttgggaggctgagatgggaggattccttgagcctgggaggttgaggatgcattgagccatgatcacgccactgcactccagactgggcaaaagaacaagaccctgtcttaaaaaaaaaaaaaaaaaaaaaaaatatatatatatatatatatatatatatatagtttatttatttatttatttgtgtgtgtgtgtgtgtgtgtgtgtgtgtgtgtgtgtgtgtgtgtgt

SEQ ID NO: 14949 - DNA, 1032 bp, Homo sapiens
ggtccttaacatgcctttgttcaagcaccttccagaatgtaaggttcagcagctctggtttctattacggtgacttgaatgtcagattcaagggcccggcgtcaaaggaaattggttttgactttttgtaatctaggagcgacagttcgtgagatgtttattcagtgttaaagagcctgtttttctaccaaacaataaaaccaagagaagaatcatggtgtgacatgcacttctgtgaatgacttaggagatcatgagcttgggctgctgggaccagctttcatagccttcctggagagcttccctgggcccctccagacccactctgccctcatcatctgtccatctccaccctgctctgtgcatgcccaaaagactcacctctggactaggtcagggttccctggctcccagcagctaggtaggttcagccagtgggaagcagcagtagaacacagagggcaagaggagagggagtggttccccggctcccttctggttgggctgtgggtggctgtaaccaaaacccaccacttctattggaaagcgctcagagagagccgggttccagcaactcttcatttgtcccttcagacctacagctggtcatcacacctcactgttgctggcccagaatgcctcactaggtagactcgcagttacccacttgaatgtttcctgccagtaccctgactaatacagcatattctataaagaaccaaattttttttttttttttgagatggtgttttatacttgttgcccaggctggagtgcaatggcgctctcaccgcaccctccacctcctgggttctagtgattctcctgcctcagcctcccgagtaggttggattataggcgcgtgccaccacgcctggctaattttgtatttttagtagagatgggggtttctacatgttggtcaggctggcctcaaactcctgacctcaggtgatctgcccgcctcagcctcccaaagtgctgggattataggcctgagccaccgcacctggcccgattcttaaatatatt

SEQ ID NO: 14950 - DNA, 1025 bp, Homo sapiens
gccctacaactacgcataagcttttgcttttcaaaaaacctccacagcctttgccaattatttgttgatctcgagtagttgttataacagcacttggggtttaacactaaggttgcagatcgcgcccagttatcagttcctcgaacctcaaggaatcacaaagcaaggttccaccccccgaaaaactacgaaaagtgagaaagcctctaacactcctcgcgccgtgcccagccggaaccttgacctcaagatggcgtcccgtagtcgtaagattcagtcggctccaatcaaacatggtgggtcataatttacagttcgggcctttctagtaaccgctagacgctgcttctctatggttattcgtctcggcttggtgagtcagagccaacagcggagacgatctatatacgttcttctctatggttccgcgctccccgcccccggccgcagtgcacgccgggcaagaggaagacctccatcagctcgccgcgcagcgcggctgtatttgcggcctgtgcgagtaggcgcttgggcactcagtctccctggcgagcgacgggcagaaatctcgaaccagtggagcgcactcgtaacctggatcccagaaggtcgcgaaggcagtaccgtttcctcagcggcgggtgagtttgtgtctctgaacgcgtgtggaaaccgggagaccgggtgcctcagctggtggaggaggaaaagccggggtggctgcgaaagcgccagggtggggtagaggtaagggggagcgcggaggcgggggtgggggaggggtcggcacgaggcttggtttcttctcttctctaaggcctggaaaagctgtgggcccagccgtagctggtggaggccagacctacggcttgagctttccgtcttgcattgtcgcccactttccctttcccttccacgttccgccgcggagtgaatcgtctctgccccccctgggctccacgttagatacaaaacgatcgatctgccccaggggagcccttccctgagcccccttacttaccgga

SEQ ID NO: 14951 - DNA, 1024 bp, Homo sapiens
ccaacatggtgaaaccctgtgtctactaaaaatacaaaaaattatctaggcttggtggtgcgcgcctgtaatctcagctactcgggaggccgaggcaggagagtcccttgaacccaggaggcggaggttgcagtgagccgagattatgccactgcactccagcctgggcgacagagcgaaattccgtttcagaaaataaaagtaaaaattatgtcttaaacataacaaagttttcttggttatttttgtttcttttttaagaagaaaggtaatctagtagtagaagtttacttgtcacaaataagtttgcattaatgaaatgtgctatgcactttaggagctttagaagtatacaagcatgcagagcttaaataatgtgctatatatatttatttaatcctgatgtttttagcctaatgttaattgtggtaggaaatttaattgctggatcaatttttattttgtttcttcaccttaggtcttagtacccactgtgtctatggttggaaagcatttgggcgcaagaaaggatcatccaggcttaaaggctaaagaaaatgatgaaaattgtggtcctactaccactgtttttgttggcaacatttccgagaaagcttcagacatgcttataagacaactcttagctgtaagttaaactgtttatttttcattaaaaatttttttatcattctacatttcaaacttaagcagaaagaagactttcagtgattgctttttattttaaaaaatttcagtcctgcagcaaaggtgaaaaagtacagtgaacacgtttgtattcttttcctagattcaccaatgaacatgtttagatattttatgtacacatgtgtaccacacacacttttttcttggataatttgaaagtaaattgtggcataacatttcacctgtgaatccttcatttatctcctaagagcaaggacattctgcgacataatcacaatgccactatcacacatgaaatttggccgggtgcagtggcttttgcctgtggttgtcatcc

SEQ ID NO: 14952 - DNA, 1078 bp, Homo sapiens
tcctcagtgaattgattgctacctctttgtggccctaagctaattgtccaggttgaaagaaaaggtttagttttctcatacttatttcctttggataaacttagataaattataggaagtgttcttttaaaaatactggaagaagccagaagtggtggctgacacatgtagtcccagcaacttgggaggctgaggggagaattacttgagcccatgaacttgagtctagcctgggccacagagcgagacccttctataaagtaagaaaaaaaatcccacaaatattggaagtgttttatttatgtttttgagacagtatcttgctctgtcacacagactggaggatggtggcgcaattacggctcactgcagccttgaatacccatcctaaagtgatcctcatgtgttagcctcctgagaagctgagactataggcatgtgctaccatacccagctaatttttgtattttttgtagagacagggtttcaccatgttgcccaagctggtgttgaactcctgagctcaaatgatctgcctgcctcagccttccaaagtgctgggactacaagtgtgaatcactcatagctggctcaacgtgttttatatgcatgcattatgtaataaaaaagtactacgtggtatatatattatgattagttatgaatggatggttacattttatattattttaaatttcagtgcctttttaggccatattcagttttctttgtggccagatacatacatttttattatttggtatgtgtttcctcgtttggtcatagaacttttcttttttgttcccgcccctacccccacccaagacggagtctcactcacttgcccaggctggagtgcagcagctgcgatctcagctcactgcaagctctgcctcccgggttcaagcgattctcctgcctcagcctcctgagtagctgggactacacgtgcctgctgccacgcccagctacttttttgtatttttaatagagatgggtttcactgtgttagccaggatggtctcgatctgctgacctcgtgatccgcgtgagccaccgtgcccgacccataactttt

SEQ ID NO: 14953 - DNA, 1049 bp, Homo sapiens
attctgttaggaatggtaattggtagggtcagtaaggtacagggtaattgaggcctgtagaattcattcttcctctttcttcattagtgggaaaggagaaaaataacatatttgtttgatgtggattgggaggagataataaattcttcctctgtggcaggagttatgggtaaatattgttggtatgattagaaagccctgctactatgagagcaccttctatatttccatttcttgggggtgttggagtatccagagaggagggtagtgtgtgatcagttattgtaaaaagagtgaaatcacttctattcccaagtaatttgaaatcaagaaagcatcacagaagtgtactgtattgttcacgtcataaatgtatagggcattgctttgcagattagtatgagctctgtttttcttttttaaaaaagattcttggtggattttttcacagattttccgcagatttccagtggccccactgatcccttatccactcatcactaaggttagtttaaattgtaggctttgacaatacctgtgtttactgctgattgttgatttgtcattcttgtctatctgatttttcactatttaactttagattgttagatttgttattgtggatattctgtttacttatttactctttgagacctatacagaatatctaacctttaactgtttatattgaagtagggtgttctttattcattccctcctgtgcccgttttcttttaggaggatataaatgctatagaaatggaagaagacaaaagagacctgatatctcgagagatcagcaaattcagagacacacataaggtagtattcttgtcttttcacttgataccaatctagactttttacagaatccaaagcaaagagacaaaaaaaatcaaccttaaattagaatataattttaaatgttttttataggtttaattgatatttagatagaaaaaagaaacagaagaccaataccatattaaagtggtccttgacatgttgtgcttagttttttcagttactgactattctgcagtcatctc

SEQ ID NO: 14954 - DNA, 1458 bp, Homo sapiens
taggaataccttttctttagagctgagattaaaatttacattttatatttgtatagatttaagttgagtgggggagattttaaacagtaggtcagtggttaccagacttaccaaattttagatgcatggaagaactgtaaattcccataaagctaatctattcattgacccccaccattatgatagagatcatatggtgactaatgcaagatgaaactctcagcttggaaagtaacaaggaataggatgtaagtatgagcttctgttttttattatatttatggatgccccctcagaaaaatatgcaaaggggtaactggcttggaaatgggtatttatgcatagtaaatcccactcacgagttttgcctatttgaagcttctctcaatgacagtgcatctgtgaatgttcgctggtgttgaaaatgatgcttttgaacggtgcaatgcaaacactgcatgaaatgtattttgatggtcgagataataaggtgttgctggttcttactgatagactgagagatctttaactcagtgaaatgttaaatgttcattttctcttttattcttactttttcccattgctttcaaaatctgcagttcacaaataatgccaatgaatcagtgctgctgaacacttactatccagatgcccagcccttgctcacaaacacaatgctttttcaagaattaaatgtgtctaagagcacaaacataattctcccaaaattaattttgagagttgaaaaggtggtctatgggaaatcattttagatgaataattttggttaggtataatactgaaattcaggaccgagtaagcttaaaaatggtatatggttgtgtgtgtggtttaccccctttttgtttttatttatttgttaaaccctgtcatgttattggtaaattatgaggaaatcatgttttaagaaaaattcaaaaatatatttgctttaaagtttgggaatctgttaggcattttactgccttagtattatttcactggagggaatgttttgaattttcagaatgtcttttcaaaataaaaagaaatcaaaatgaaaaaccaaaacagttgttttttattgggtggtttggctaaaagggttgtttgaaactccagtaacaaaaaatgagctcagtgaacctttgcatgttttggtatgagtttattaaataaccacagactgtcagggtatcagcgtggcagggggcgtccatttacagcacggatgagtctgaagagagaataaggtaagatttatgattttttaatctgtcctttcctcttcatgactttcttacataattttagactcacctcatttcccttctccagtctttctttaaaaatatacatgtatgtttacatgtatacctgtatttgtatacatgtgtgtatatatatatatatatatatctcatatataaacttcaggaaacatttagtatggactag

SEQ ID NO: 14955 - DNA, 2018 bp, Homo sapiens
atctatttcagaaataaacaaatttctttataagtgtatgccattgaggtaagttttatatagtctagcctcattttacaatataaatttttatattcattggaactgtttcagaaatgagatttttccccctttaatagctgttagtttctgtcctctttctatcatatcttatttcatccctttgtaatttcaatgtattcagttttgactttgcccgtattctacttcgatatagactggcacagcaactgaatatattgctcatacattagctttcctttcataacctgctataagttctctgatccatgaggaagagaaaaagagtatctgacaggtaagattgctttttaaagttgttttaaatgcattacatgactgagaaaagaaaaatgcacattttattgttgcagtttaaaatttcattttggtgaaactaaacgtgaaacaaaagggataaatgtgttttgttttgttttgttttacctgtttggggtatttttttctgagtttgtgtagaaaccgtgtggtacactggtaatcttgtcagggtacaaacttggtctgactttgttatttggtttatttgtgaaccatgtacttgctcttcctcccagaaacatagcttgtaggcaaggttaatccagtgttggcgatccatgtcctagcacagcatctgtaagttaatgcacaatcgttccttccaaggatggatttatcattgtaaatatattttcattgtcttacaggcataatgggcataagtatgttgcttttaaatattttaaattaaactattacagttacatatattttgcttgaagtgagtgattttcaaactttttgtatttggtgggctgtccatcttgtaatggtgggagtaaatgtttccatagatgataaggcagttcttggctgaattcagcttgtgtttcttttggagggtgggcaaatcagagggcagagattatttagttgcattataggtattcttctataccacttgccctttgaaaccctcaacttgaggtaatgtgcagtctggggttttaattagtattaataatcttgtggatttacagaaatctataatgcacagagttgagttttaaccaatgatcgtattcatagaaaatatttcgaaccaccacattcttcatggtcattttagttagtacatagtcattgagtggccagccacacctgacacaatctcccagcatccaagattggagattcctggtctgtgtagagtatatggttttgcacgaaatctttctagtcttgtgattgcttcagtttaatttgtcacataaaaccacaagtatttaatattaatgtatcagtggtttggtgtttttgttcccagtactgggctttgcgccgggaaaaatctgaatactggagctacagagttaactctaaaagtgcttttattggtttctagaaactggaagaagagaaaggcaaaaaggaaaaagaaagacaggaaattgagaaagaacggagagaaagagagagggagcgtgaaagggaacgagaaaggcgagaacgggaacgagaaagggaaagagaacgtgaacgagaaaaggagaaagaacgggagcgggaacgagaacgggatagggaccgtgaccggacaaaagagagagaccgagatcgggatcgagagagagatcgtgaccgggatagagaaaggagctcagatcgtaataaggatcgcagtcgatcaaggtaaggctttacagaagttactgtttcctgatagctttaagaaaactatcgggtagtcctccagagtaccatttgcattcatggaatgagaacttttgtgtgtgtgtgagacattctcactctgtcactcagcctggactgcagtggctgagcaatctccgcctcctgggttcaagtgattctcattcctcagcctcccaagtagctgggattacaggttcataccaccatgcccagctaattttttgtatttttggtagagatggggttttgccatgtta

SEQ ID NO: 14956 - DNA, 1089 bp, Homo sapiens
aacttaatccatgcaacatgtcagaattctgttttccacatgtgccagcacttactccttgatctctagtaagctaaactatctcttaacatattcattagtccttcatatttcttttgggaattaagttttccttttttctgttttacaccatcaggggattgactattatttcagtatatgatgggcattaactaaccattcattttaatgatttataactattttatattcagattgtatttgttttctgacataccagtaagcattaggtattagaatgcattttaggatttgggactgcaatttatgtctttctgatgagtgtagaggaggttacatagttttatggaaatcaagtgctagattctggcctgtgagattttatattatttcataatgtatgttgtcctcctttactttggtcttgaaaacagaaagtagactgacagatttgtaaaatattttgtttacattagagaaaaaagcagagatcgtgaaagggaacgagagcgggaaagagagagagagagagaacgagagcgagaacgagaacgggagcgagagagagagcgagagagggaacgggagcgagaaagagaaaaagacaaaaaacgggaccgagaagaagatgaagaagatgcatacgaacgaagaaaacttgaaagaaaactccgagagaaagaagctgcttatcaagaggtaagttgagaaaatgcctttattcttaaatcttggtatcccttaataggttaatcaatatttatagaatgctatgtataaatttttaaagctttgaaaatttaatttttttagcgccttaagaattgggaaatcagagaacgaaagaaaacccgggaatatgagaaagaagctgaaagagaagaagaaagaagaagagaaatggtaagattctaggctaaaataagtgatttttcaggtaaaaagtcagattgtatctttactgctaactacaagtaacttaataattgaaatgcacaagcttctctattcatgtataatttaatttttatgtattttgagtaattttgagccaatttaagtacaccaaaatcttttttcctcttc

SEQ ID NO: 14957 - DNA, 1055 bp, Homo sapiens
aagtaatgaactgctagataggagagaacctctgctttctgttgattctacactactttctgagataatttttacaagtgaataaattgaggatacagaactctcagtgctactaatgctacttgatatatttttttaggttggtatctaggaaaacgaaaattatttgttgggtattccttgtgaaataggcacaaagtgtgagctctctttctgaaagtgactattttacttgtttagacacttattagaatgactttaagaatgaagggaacatagtgataaatgacaagataatgcttgttatacatttacatgtagagagcacactctggtgtgttccgtagatacagaacattaagacattctttaacctcttagcatgcaggttgtaatgttgaaaagaggtgctgttggagatgtcatgtttacttctcaatgatcggagtattaaatgaagccttttatcattcacttttacagaggaagtgctcttcagaaaaggttgcgtgatagagaaaaggaaatggaagcagatgaacgagataggaagagagagaaggaggagcttgaggaaatcaggcagcgccttctggcagaagggcatccagatccagatgcagagctccagagggtaagatactgtaccatctggtcgggcgcggtggctcacgcctgtaatcccagctctttgggaggccgaggcgggcggatcacgaggtcgggagatcgagatcatcctggctaacacggtgaaaccccgtctctattaaaaatacaaaagattagccgggtgtagtggtgggcgcctgtagtcccagctactcgggaggccgaggcaggagaatggcgtgaacccgggaggcggagcttgcagtgagccgagatcgcgccactgcactccagcctgggcgacagagcccctgactcctgggttcaagcgattctcctgcctcaggtacccgagtagtagtacggattacaggtgtgtgccacctcgcctggctaatttttgtatttttatttttatttatttatttttttgagatggggtc

SEQ ID NO: 14958 - DNA, 1050 bp, Homo sapiens
cactcctggggatgagtctccctgtggtattattattcctcatgaaaactcaccagatcaacagcaacctgaggagcataggccaaaaataggactaagtcttaaactgggtacgttagcatttccttccttctttattttcttcccttcacccctgcaaatacctgtattgtgctttaaagaaaaaaatttatatttgtgcttggttaggtagatagaagattactaaaaaatgcctttctagctcacgattgttttcatagttttactagtgctcctatatctgcagctgcctcgagttctgagaagaagtgaaaagtttaattttctagcacttgtgagtagtgagttattttttacagttgggatctttctctaagatttgtggaagtatattttgcattgcttttgagggatggtgggttataaaatgaaacatttggaaattaagtcatcttgctaagagagtgtttttactgtaggtgcttccaatagtcctggtcagcctaattctgtgaagagaaagaaactacctgtagatagtgtctttaacaaatttgaggatgaagacagtgatgacgtaccccgaaaaaggaaactggttcccttggattatggtgaagatgataaaaatgcaaccaaaggcactgtaaacactgaagaaaagcgtaaacacattaagagtctcattgagaaaatccctacagccaaacctgagctcttcgcttatcccctggattggtctattgtggattctgtgagtaggaaattatatttcatcatattattgggaacagttggaatatgccatacaaattcatttgaagaaaaaaaaacctcatttgattctattaatgacaaataagtagggatgatcatcttgacaccaactcaatgccatggtcaagaaattagtaataatggaaattttttttgtgctacttgaagacttactaaaagcagatgattgtatcttgatacatatctgtcttagttcaacttgtgaaataacattatattttagtctcaggaaaaatcatgaagctttaa

SEQ ID NO: 14959 - DNA, 1074 bp, Homo sapiens
gttagtcaggatggtcttgatctcctgaccttgtgatccgctcgcttcggcctcccaaaatgctgggattacaggcgtgagccaccacacccggccactaaaacaaccttaaaatcttaactagcatttaagtaataagtgcttattgtcagtggatgaaaaacttttttatactggccactgtttttggcagatgttgatgattgcttctcttacatgtgttgctgttttgtttcctctttaggtacttgatgaagaagcagaagtttttatagtcaaaatgtggagattattgatatatgaaacagaagccaagaaaattggtcttgtgaagtaaaactttttatatttagagttccatttcagatttcttctttgccacccttttaaggactttgaatttttctttgtctttgaagacattgtgagatctgtaattttttttttttgtagaaaatgtgaattttttggtcctctaatttgttgttgccctgtgtactcccttggttgtaaagtcatctgaatccttggttctctttatactcaccaggtacaaattactggtatgttttataagccgcagctactgtacacagcctatctgatataatcttgttctgctgatttgtttcttgtaaatattaaaacgactccccaattattttgcagaattgcacttaatattgaaatgtactgtataggaaccaacatgaacaattttaattgaaaacaccagtcataaactattaccacccccactctcttttgatcagaaatggcaagcccttgtgaaggcatggagtttaaaattggaatgcaaaaattagcagacaatccattcctactgtatttctgtatgaatgtgtttgtgaatgtatgtgtaaaagtctttcttttccctaatttgctttggtggggtccttaaaacatttcccaactaaagaatagaattgtaaaggaaaagtggtactgttccaacctgaaatgtctgttataattaggttattagtttcccagagcatggtgttctcgtgtcgtgagcaatgtggtttgctaactggatggggttttctt

SEQ ID NO: 14960 - DNA, 1060 bp, Homo sapiens
ctgtcgaggcaactttctaaatgagagggtccaggttcttggttaaagaaggaacttagaattaacaaaatagtgacaaacatttgcggcagcgcgcctcagggcaccagctgcaggggtctgcccacagaccctgaccctgcgacagatgaataaagtacactgacacacagatagtctgttttgccagtccagctgagggtgtcccactgcttacagactccctggagagttctgaaaacagttgcaactaggcctcagtcagctagtgagacttgcatttattcaaaaagattaaggatggcttgagtcaacaccattagagggtaattgatattgtggacttcccaagtaaaaagcacttaaccccccgtggtacatccaagattagtcttaagatcatatgactaaacaaactaggtaaactactctgccttcctttattactactttaatttgtttaaaagtaaagatcaggttgccttcaaccatatctatcaccgaagctatgcaaacttctcggccttccaagaattgtatctgtctctgtaacaatctttaatgtttttcccaccagcctgattgaatcccaacacatattcagaacttaaggctagaacaagatgaggaagatatgacagcccgtgattttaagcaatctaaggaaacccatgcttgcaaagaattcaaatgacgtgagagctactaagataaaatgtggccatgcaccaagccttgacggcaatatttaatctcataacaattcttctttcctcctatataagaagcatggcagcgacactgtgcataaattaaggcaaactgttgttatgtgaaaatgttaatgaggtagattcctttggaatcattagtgtgaagagctggtttttgttttcccattgcctaggccctgactttagtagtgactgatgcagcttttctagtctaacaaccctctcccccaagtaattctttgatgccctgcccttcagcttcatcttttaccacttactattgggttttgccaccatttattttatcattcacttatctgttcctc

SEQ ID NO: 14961 - DNA, 1041 bp, Homo sapiens
cagctccctttgctggaaatcagaagtcattaagtatctttgtggttgaaaatgtttggtgtctcaggcggttctacttattgctaaagaggtctaccttgagcttatagtaaatttgtcagttagttgaaagtcgtgacaaattaatacattcctggtttacaaattggtcttataagtatttgattggtttaaatgaatttactaggatttaactaacaatggatgacctggtgaaatcctatttcagacctaatctgggagcctgcaagtgacaacagcctttgcggtccttagacagcttggcctggaggagaacacatgaaagaaaggtttgtttctgcttaatgtaatctatgaaagtgttttttataacagtataattgtagtgcacaaagttctgtttttctttcccttttcagaacctcaagaggctttgttttctgtgaaacagtatttctatacagttgctccaatgacagagttacctgcaccgttgtcctacttccagaatgcacagatgtctgaggacaaccacctgagcaatactgtacgtagccaggtacagtgtcagtctctgaaactgcctttgccagactggattcacttatcatctcccctcacctctgagaaatgctgagggggctaggcaggctttctctactttaccacatttataatatatttggtgaacttcagctgattgctggaggacacagggctgtttaacacataggtgttgatacagttcctacctaattcacatatcaccacctcagttgaagccttctccagcttcccaaggtgtgcagcgcctcatagttcatgttgtttattattttacctatcttgctcttattcttctacggctgagtccattttatttactgtattcattacctaacagttccttttagtgctcagtaaatattcattatgattgtacaatgcaaggataagtgtagaagttctaagggttcaaaggagggattcaggaaaagaacgtaatctgtgctgtcggacaaagagattcctcaccag

SEQ ID NO: 14962 - DNA, 1026 bp, Homo sapiens
gaaaaagtgcagttgatcgaaagaaatggtggtataaacaggaataacaggcatgttgtttcctctctgatttattatttttgtaaaataagctacttttcagcaccacatacatatgttctgagacctgaatatttgtgaccaaagagtaaagaagtaataaactttatctcgcaaagagttattattgtgttttatttaaatttactgccctcttacttcaagtacttctcagtagtacgtaatactgcttttaaaaaggagaagggatgaatttcttctactctgctcttcatattttgaaaagttcagtcaaatcccctttattaaattcatctcagagtaatctttttaatttgtagttcatatccgtgattagtttagaagtgacttctccctgtttctgctcactgtaggttgacaactgcttaaaatagtctatctcatcattatctctgcagctttcctttaaactaggaagacttgttcctataccccagtaacgatacactgtacactaagcaaatagcagtcaaacccaaatgaaatttttacagatgttctgtgtcattttattttgtttatgttgtctcccccacccccaccagttcacctgccatttatttcatattcattcaacgtctttttgtgtaaaaagagacaaaaaacattaaacttttttccttcgttaattcctccctaccacccatttacaagtttagcccatacattttattagatgtcttttatgtttttctttttctagatttagtggctgttttgtgtccgaaaggtccacttcgtatgctggttgaaacagctcaggagagaaatgaaacgctttttccagctctcatttactcctgtaagtatttgagaaggatattgaattagtaatcagtgtagaatttatcggaactgaagcacatgtaactatggtcattttcatggtacttgttctcatcttaaatgcacagcattcctggaactcctgcagatctctttgtttccttgcaagcaattgtc

SEQ ID NO: 14963 - DNA, 1045 bp, Homo sapiens
ttgtgcttcccatatcaaaatgtcagggttacagagtggaggttgttcacttatcatgggaatggcaatgttctgggctattctggagatatccaaagttataaggaaaagatgaagtagcacataggaagaagggaaagctcccatttggacagctgaagatgattgggaaataatggcaaaaacgaagtgttgcctggaattccctctttagttctagctgagccccaccatcttcaccgacagttggtttgtttttttttttagatggagtctcgctctgtcgcccaggctggagtgcagtggcacgatcttggctcactgaaaccgccgcctcccaggtttaagcgattctcctgcctcagcctccaagtagctgggatgacaggtgtgtgccaccatgcccagctaattagagatggggttttgccatgatgaccaggctggtttcaacctcctggtctcaagtgatccacccgcctcagcctcccaaggtgctgggcttacaggcatgagccaccgtaccggaccccttcacagaactttaaccaataaatttaacccacactaatctctctctctctgaaaagttttaaaagggtaccttatatttattgcttgttcttgaatcatttgtgtatattagtcttattgttcctaccatagtgttaattttgtgaaagttgggacaatggtttttttgttttgtttttttttgttttgttttttgagacagagtctcgcactgtcgcccaggctggagtgcagtggtgcgatctcggctcactgcaacctctccctcccaggttcaagcaattcttgtgcctcagccttccaagtagctaggattacaggtgccagccaccacacctggctaatttttgtattttagtacagataggatttcactatgttggccaggctggtctgaaactcctgagctctgatccacctgccttggcctcccaaagtgctggcattacaggtgtgagccaccgtgcccggccgggactatgttttatatgtgtgtgccgaacactctgag

SEQ ID NO: 14964 - DNA, 1047 bp, Homo sapiens
agcgacgctgatcctggagcccgcgggccgctgctgctgggacgagccgctgcgcatcgcagtgcgcggcctggccccggagcagccagtcacgctgcgcacgtccctgcgcgacgaagagggcgcgctcttccgggcccacgcgcgctaccgtgccgacgcccgcgacgagctggacctggagcgcgcgcccgcgctgggaggcagcttcgcggggctccagcccatggggctgctgtgggcgttggagcccgagaaagccttggtgcggctggtgaagcgcgacgtgcggacgcccttcgccgtggagctggaagtgctggacggccacgacaccgagcccgggcggctgctgtgcctggcgcagaacaagcgcgactttctccggccgggggtgcggcgcgagccggtgcgcgcgggcccggtgcgcgccgcgctcttcctgccgccggatgagtagtctgcccagaatttggtcgagctctgcgacccccaccggcccctttcctgtcctgggaatcgcgtgattgtggaacatccctgaacttgttccttcgctccagagtctgtcatggattctgagtctgggcgtccgctgttgcccaggctggagtgccgtggctggatcgtagctcacactgcagcctcgaactcctgggctcaagtcctctcgcctcagcctcctgagtagctactccagtctttcctttttaagtttcacgtccctccctggaggcaccaccactttagctatgtgctgaatagtgcattcaacttattatatatttattgagagccactatgtgccagccatgtggttttgtttgaatacgatatgggcaaaaccttaagctgatgtgcaagaaggatttttgcctcctttcacatcaaacttccaaagaagctaaaatccacagtattggcaatgccctttaattgtttaaaaacacacacaaaactgcctgacagtcctctcccttctatcataaacatgctgtacgtggttctcaacctgcaatgattagccgccctccctgggggaaattt

SEQ ID NO: 14965 - DNA, 1031 bp, Homo sapiens
aaaatgggtggagtttggctctggtattctcagtgggatgggatggagagggaaattacagcaagccgcttattctcccctcgtccggaaaagggtgggaaacgccatcgttagggcaaaggaattaagaacattattttatgaaaagggtagttgttagggggacgttttaaggtttttaactttaggcggacaagtcactacagatcagctgaaattgctttcggtcctgactactcctgtgcggggttaagacctaaggaagcaaaagggcagccagcaacagccggacgggaggaccccggcggccgccacgcagtcccacaatgccccgctcgcaccaccctgagggcggagagaaaggaccgctgccggggatagggcttccgccgagagcgccgagaagtgcgcacgcgcactgaccccgcgggccctagcaaccagagcagtgacagtagcaaccgccggaatggtgagtacctttcgggccgcgtagccaaagctgagagaagattgggagtggaaaagggtgactgtggagtgttgagggtctgggggtccttgaacagcggaagggagccggtagctgacgctagctctgtggagtcaggggcccgaggcgaaagagaagccctggccgggggtggtctgtggtgagggcggcctggggtggatcggaggttgggttaaggtggagggactcagacaggagaaaagggagggcgaagagcaggaaattctctaaaaagagcgtattggagtgggaagggtgatgggaaggagagtgtagataaagatatctctttacatagaagtaattttagtgacccccccgtcgagatgcagggaggggctggttaccagagggttctgtataacacggattgcagcagttttcgtaacctgtgatgtacccaggttgccttctgaatgactacgagggcagttattaggtgacactgtaaagcacactctgatggatatattagagcagtgattctcaaatttcagtatgcataggtatgggcttg

SEQ ID NO: 14966 - DNA, 1057 bp, Homo sapiens
gatcacttgagcccaggagttcaaggctgcagtgacctgattgtgccctgtactgcagcctgcgtaacagatcgagactctgtctctaaactaaaaaacaaactaaaaaaatagattttatggcatttcataaagctctcccacttctgtaacctccaacatgatattatttacagagtagacatttacttttttgttttcaatacttacaatggtttgttgaccttaaaaaatcataaattttaatagctgagaggaaccttaaagaacttgtccaacttcctcattttttccaatgttttttatggtggtgaaatatacataacataaagtttaccatctaaaacatttttaagtgtatagttcagtggtagtaagtagacttgcacaaccatcaccatccatctccagaactctcttcatcttgtgtgtctgaacctctgtaagcatacagtagcttcctactgcctcttccctgatccctggcacccaccattccactttccgtctttacgaatttaactactctaggtatttcatataagtagtatcatacagcatttatctttttgtgactggcttatttaacttagcgtaatatcctcaagtttcatccatgttgtagcgtgtgtcagaatttcctttctgcttaatttttttttttttttttgagactgagtctcactgtatcgctgaggctggagtgcagttgcgcaattttggctcgttccaacctctacctcccaggttcaagtgattcttctgcctcagccgccaaagtagctgggactacaggcatgtgccaccatgcccggctaatttttttatatttttattagagatgggatttcaccatgttggccaggctggtctcaaactcctgacctaaggtgagccgcccgccttggcttcccaaagtattgggattacagatgtgagccactgcacccagcccattcctgcttaatgttaaatgatattctattacggtatgtatataccatgttttgtttatccgtttgtctatcagtggacacttgggtcacgtccatctttt

SEQ ID NO: 14967 - DNA, 1149 bp, Homo sapiens
aaaacatttttttaagatgttaattgggttagtttgtgtgtaactttttacttgagatttcttttcatgaccattttcttctatgcttaatattcaaaatcattgaaaaagttatttaacataattttatatgttgtaccttttggaaacaagtatgatagtgacatttatcttttcagataacctactttctctttttccagctgcattccagtccatgatgacaggaggtaacattggaaagcagatagtttgcatttcagaagaaatctctttgtaattgctgtaaatgtcatcaaggcaatcatagatttcttttccattttgcatattttcaaagatatgttaaaaaatccttagactatacatagctcttgatttaaatgtgatcataggtgttatttttagttgcatagggtatttgatacaatcattaatggatcatacacaataggtttttaaaaattaataacttttagtaattacttttattaatttaaaatagaacgcttgagaggcactttgtaaagatttgttaaactggaaacgttttacatgatctgatacaaccattaatgaatcatacacaataggttttttaaaattaatattaataacttttattaatttaaaatagaatgcttaaaataaaatagaatgcttgagaggcactgagtaaagatttgttgaactggaaatgttttacatgattcttaaactgaaacttggtgtaaaaatagaattgagatggcctttttttcacattgtagactgaaaagagacttaatggtatgatgtgtacatagggactgggggcaggattgggggtttcggagcttgtgtaacagtttttgggataggagaccagcggttttgggttgggattagtatgggaagataaataacttaggttggttaagttgacaagatttactccagaggatcatctctttgtatttgccaaataatttactgtatagcctaaaaactccatatatattgagaaaagcatatgtttattttaggttagcaggcacatactgtcaagttgtaaagattgagagggcaaacagatgtaaacatcacttgtaggtgattaaaaagattgacagccgggcctgatgtctcaagcctgtaatcctagcactt

SEQ ID NO: 14968 - DNA, 1034 bp, Homo sapiens
tacaaatatttagtacctaccagttgcttactgggaagcttgtatggaagccctttaagctcatagtaaacacattagaagtgggaagtgaccgttaatgggcacagggtttccttgtgaggtgatgaaatattgtaaaattgatcgtggttctgcttgtacaactctgaatgaactaaagatattttaattgtactctttaaatgagtcaatagtatggtatgtgaacgatatcttagtgaaactaatttttaaaaaagatttacattgcagttttggaaatctgttgagtaaggaattgggaataggaatgtttaattgtgtatttgccgttacacctatagctaatgtacatagtacgttgctctgttaaagatgagatccccacagtacacttgataagatactgagtgctctagtacaaattcttttgagttcagttgcatatcttaatgcatcctgctattttttattttattcataccgtacacatacaaatcataaacttggacacaaaaattgtatggtagtacttagttataatatgaatacccagtgcttgagaaaatgctcgtgttaatttttaaagattattgaagtgaaaacactgaaataaaaagatgtcatagataacataaaaaggacagtaaatagttgtctggttcctcagagattttacaatcctggaatctcaaagttggaggaaccttaaggatgacttaaacaacaaacatctgataatttcttggcttgttaagacaagctggaattggggaagaggaattcttgttttttttgagacagcctccatttgttacccaggctggagtgcagtggcgtgatcactgttcagtgcagcctcgatctcctgggctaaagcaatcctcctactcagcctccctagtagctaggaccacaggcatgtgccaccatgtgatgctaattgaaaaatttttttttgtagaaatagagtctcactggctgagatcgcgccactgcactccagcctgcgtgacagagcgagactcagtctc

SEQ ID NO: 14969 - DNA, 2032 bp, Homo sapiens
gatccctgtattataaggttccctatgaacctttcactttcttttttttttttttttttttgagacagtattactctgttgtccaggcgagagtgcagtggcgtgatcttggctcactgcagcctccgcctcctgggttcaagcaattctcccgtctcagccacccgagtagctggtattacaggcgcgtgccaccacgcccgactaatttttgtatttttactagagacggtttcaccatgtggccaggctggtcttgaactcctgacctcaagtgctctgcctgccttggcctcccgaagtgctgggattacaggcacgtgccaccacacccagccaacctttcaccttttgatttcattcctaaatgatacctgaatctcttatttcataaaggattgtaaaatggtggtttttcttattcctttactcctttcacattagttggaattcttctgtactgtgcgactctttagttggactcttccactaatatcaagtagggctatttgatcatttgcataggcaagacaggataaatatgtaattcttttaattgtgaattttgagaataaggaattgatgctctagttacttctagtatttcatgtttgatgctatttcaaatgaaatgttttcttgattttatttttgagttgttcattggtagtatatagaaatacaattgaattttgtacattgatcttgcaaccttggtaaatgcttgagttttagtagtttcttttttttttttcttccagctttttagttcaggggtacatgtgtaggatgtgcaggtttgttacctaggtaaaggtgtcccatggtggtttactgcacagatcatcccatcacctagatattaagcccagcatccattagctattcatcctgatgttctccccctcctcctacaccccatttttttttttcttttctgtttatttttttagagacaaagtctcactctattgcccaggctagagtgcagtggcaccatcatagctcactgaagcctttgaactcctgggaacaagtgatcttcccacctcagcctccccagtagctgggactgaggcagaaatttaaaaataaatatgcattcattcactccaagaaaagtaacaggcaaggcaagggttaaaaagaaaagaacaagttttcctctgcctagcaagctcacttcaaggacagttataagataacgctgtttgagaagccaaggccaaaggaatggactccagacaccccctcttccagagcaaggttgaaggaaaaaaaaaggaaagacaaattcctttactgttactcctttccctggcttcttaagcataactgtgttttgcaaatgtctgtatttagccagttcttatttttctttcaatgcagctataaggtcaccagctatgcaaggccacaagttatgctatgctataaagtatgtgacctgtcatgattaactgcttttgttttacttttgtaagtccgcttacaaaaaccccactccgtctttgtttaatgctcagctttttggatgtgaatccactgagctggtgcgtacctaaaataaacaatcctcctgttctccgtatcagtctctccagtcctcagtttcctgcaataggactacaggctcacaccaccacatctagctaatttctattattttgtagaaatggagtctttgtgttgcctgggctcgtcctgaactcctggcctcaagtggtattcccaccttggcctcccaaaatgttgttgggattacaggcatgagccaccacacttggctgagttttagtagtttttaaaaaatagatttcttagtgttttctacataaaagatcatgtcatctgagagtaaagatagttttgcttctgcctttccaagctagatgcctttaatttcctttctttcttgcttttttttgagacatggtctccctctgttgctcaggttggagtgcagtggcatgatcatggttcactgcagccttgacctgggcttgggcagtccttccacatcagtctcccg

SEQ ID NO: 14970 - DNA, 1028 bp, Homo sapiens
agtgatacgagattttctggtgactgatgagacagctcctccagtactttcctggggcttgcaggctgttctagagatccttctaaaccctgctctggatctctgatgctgagttttgtagtttcttggaacctgcagaataaattaaaacatgaaaaacaaaaaaaatttttttttcagacagggtctcactctcacccaggctggagtgcagtggcatgatctcagctcactgcagcctggacagcccagctgaagcaaccctcccacctcaagcaatcctcccaccttagcttcccaagtagctgggattataggcacgtgccactgcacccagctaattttttttttttttttaactttttgtagagacagggttttgccatgttgcccaggctggtctcaaactcctgggctcaagcgatccacccacgtcagcctctcaaagtgctgggattacaggcgtgagccaccgtgcccagtctgaaaaaagaaagtcttaaagcactgtgtaaggtttaagaacggtctctcccagcactttgggaggccatggcaggtgaatcacgaggtcaagagatcaagaccatcctggccaacatggtgaaaccccatctctactaaaaatacaaaaaatagctgggcgtggtagtggacacctgtagtcccacctactcaggaggctgaagcaggagaatcgcttgaacccgggaagcggagactgcagtgagcagagactgcagtgagccaagactgcgccactgcactccaacctggcgacggagcaagactccgtctcaaaaaaaaaagtctcaacattattactattttatatgggatgtaaaggaaaatttctaggggtataaaactgagataggaattagggtaggggctgctaggatttaagatacaaaacaattgagaataatggagagaagatactattttctccctttgactcaatatcaaaatgggttatggagggccgggcgcggtcactcacgcctgtaatcccagcactttgggag

SEQ ID NO: 14971 - DNA, 1024 bp, Homo sapiens
tacggcaggctgttggaatccagaatgtgagctggaactatgaccagtctgctgttgtggctactctgcatttatcagaggtaagatcctgagctgccatctggggactttattcataggcactaggtacttcacagagaaacttttctcctctctgttgcaggccacagaaaacaacgtagcctggcagagatttcttccctctgggcctattgctctgctcccggtaagaggtccttctgaccagtccgcccacatgcatgcaagcctttcctcttcactttctctcagcctttttctggtttcaagggaatctgcccaggctgtttgtaagttccctttttgtctttttatgcttgagagtttccaagtgcagcagagtcttagccgttggtattggtgttcttttgacacagctctcagacaccttgagttccttggtttggtccacgtcccatgaacatgcagcagagctagttagcatggatgaggaaaaatttgtggatgccgttaactctgcctttgtgagtatcaatttacccagctgatgatgtgctgcagggggagatacagaaaggtgttgtttttttttttttgaaacggatccttgccaggctggagcgcagtggcgcgatcttggctcactgtgcaatctccgcctcccgggttcaagcgattctcctgcctcagcctcctaagtagctgggactacaggcacgtgccaccatgcccagctaatttttctatttttagtagagatgaggtttcaccatgttggccaggctggtctcaaactcctgacctcaagtgatctgcctgccttggcctcccaaagtgctgggattacaggcgtgagccactgcacccagccagaaaggtggttttgagtcaggaaaaaggagtaaccagtcagctgtccctttctactttgtaactataatgcttggtctagattatgtggaggagtgtacacacggaaatgcaaaacaatagaaataataaataataaccttttgagggttgt

SEQ ID NO: 14972 - DNA, 1044 bp, Homo sapiens
aagtaaggaagaccgtaaatgacaatctccgtacagtgatagaagtatgcataggatgctgtggaagcatacaggggggaaacacagagaaagactggaggagttaaaaagaggcgacgtcttctggatgctctgagatgttatcctaatgaaatagagacgggcattctaagcagaggagagtcatggaggtagaaggatactgtgtgatgagctatactgtggctggtgcgtggttattgagggtggggactagtgaaaggtgaagctcagaagtaggcaggggccagctcatgtacagtttggctagatcttaaaacctctggggagtgatgagaagttgctttgcacttgaggggcttatcacttgtcaagatcagtgtaggcaagttgggtagcattagcctaagctttggttacaaacaaggtttctttattgaatttttaattccctgctactcacatttcaccttgtttgtcttgtggctgatgctgctcagtggagtgatgctgaccacacggacttcatcgacacagctggtgccatgctgcagtatgctgtcagccttctgaagcccactaaggtctcggctcgccagctgcccccaagcgtagccagggtggatgccaaaagccgagttctgtttcctcttgggttgggacatgctgctgagtacgtcaggcctcgggtggcgctcattgggtaagacgataacagagcagggccactcccttctcactttgctgccagaggtcacacctgaactctgctttattcttagggatgcagcccacagagtccatccgcttgcaggacagggtgtcaacatgggctttggggatatctccagcttggcccatcacctcagtacggcagccttcaatgggaaggacttaggtaaggattcagatactatggggaagtatccagaggtcatatagttaggcaagatcagggcccacagtagcaagagggagtggacataaaatatatctggcttgctaggagatggaagaaaaccttattattggattagggattta

SEQ ID NO: 14973 - DNA, 1020 bp, Homo sapiens
tctctctattgcctggtctagagtgcagtggtatgatcacggctcaccacaggatcgacatccgggctcagatgatcctcctgcctcagtcttccaagtagctgggactacaggcacgcacctccatgcctggctaattttttgtatttttggtagagacagggtttcgccatgttgcccaggctggtcttgaactcctgagctcaagtgatccacccgcgttggcctcccaaagtgctgggattgcaagcatgagccaccatgcctggctgatttttttgtagtttttgtggagatgggatttcgccatgtcgcccaggctagcctcgaactcctgggctcaagaaatcctcccaacttagcctcccaaagtgctgacattacaggcatgagcaatagcacctggtccagaaatttctatctttattttattttattttttgtatttttagtagggacggggttttggcatgttgttggccaggctgatctggaactcctggccttgagtgatccgcccacctcaccctcccaaagtgttgggattacatgcatgagccacaaaacctggccaatttttatttttaaaattactcttttaatagtaggtattattaaattgccctctataaagtattgttctaaagtaagtttttttagtcaaccatagaaataatttccaaatgtgttacttagatgctttgttttgtggcttgtaatagctcattgttattggtctacatcagtatcacttgtacttcctgattctcatctgcctccttatatcaaagggcagcatctggcagtaacaggtgggtaatttttataatcatggattgccattaaaccaaaagaaacaaccttgggaggaagaaacaaagtagactaaatatatcctcattaactagctttcccatagttttgttactcattttgctatatactagaaaaatgttatgttgttaaactttgtttaaactgtttatagtcatgttaattatagaaataatagaaatgaaa

SEQ ID NO: 14974 - DNA, 1043 bp, Homo sapiens
ttttttttttttttgcagaagaatgccaattaataaatttccaaggagtgatggagttagaaaaatcaccatttggcatcacagtaataactgaatcagtcaagaatcatcaatggatgctaaaacctactgggtgaaagtttgatgaggaggataattgcatagtctcaaaagattgtaccacaaattacttaataatcacagaagaaaaaataataacttttaggtggagaaagtgggcagacacaaccttaaccaactggttaaaattagcatcaatcacctaatgatgtgatgtactgaaaaggatacatcatcacttaggtactatatataacctaccaaaaacatacaacctgaatctactcatgaagaagcatcagctaagcccaaccctggccagtattctttttaaaaagtcaatttaaaaacaaagaccaagaaactgttccagattaaaggggactaagacacatgacagataaatgcaacgcatgatcaagggttgtattgtagacaagaaaaataaaaaattgcaataaaggacattattgggataattgtagcagaatttaaatatagagtatatattacatagtagtatattaatgttagacttcctgatctttataattttatagtgcttgtaaaagggaatgccctttttcttcaaaaatagatactgaaaggccaggcacagtggctcatgcctgtaatcccagcactttgggaggctgaggctggtggatcacctgaggtcagaagttcgagaccagcctggccaacatggtgaaaccctgtctctacaaaaaatacaaaaaattagccaagtgtggtggcgcatgcctatagtcccaggtacttgggaggcagaggcaggagaattgctttagcccaggaggcataggttgctgtgagccaagattgcaccactgcagtccagcctgggcgacagagtgagactctgtctcaaaaaaaagaaagaaaaacaaataaggaaatagatactgaagtcttctggggtaaaaggtcatcttgaaatt

SEQ ID NO: 14975 - DNA, 1034 bp, Homo sapiens
ggttgaagtgcagtggcgcgatcttggctcactgcaacctccgcctcctgggttcaagcgattctcctgcctcagcctcccaagtagctgagattacaggctcatgccaccatgcctggctaatttttgtatttttagtagagacggggtttcaccatgttggccagaatggtctcaatctcctgacctcgtgatccacctgcctcagcatcccaaagtgccaggattacaggagtgagccactgcgcccagctggctactgttattttttaaaaatataacaatagtttcattattataactacaatttttttaacaaacttgttaaatatcatcaaatagccaatcagggtttagatttctgtagttgactcataaatgcctttatacagttcattttttgagtctggatctaaataaggttcatatactgtatttgatatgtctctgaaatcttttttagcctgtcatacttccacctgcattttatttccccttgtcatttgttaaacctagtcatttgttctgtagatttttcaaaatctgggttttgttgattacattcctgtggtagagcttaacatgttcacctatcccttttttatctgctgattgttagatctagaagcttgcacagatacaggcttgattttttttttttaattttgataagaatatttcacagttggtgttgggtacattatgtgtgctggtctttctttttgtgatactaagattaatagttgatggattctagatctaactatcaggaaataaaaagggataggtgaacatgttaattaagctctaccacaggaatgtaatcaacaaaacccagaatttgaaaaatctacagaacaaatgactaggcttaacaaatgatggggaaataaaatgcaggtggaactatgacaatcagatttattcattgtaatattcttcatcagtcttatacctagagtagcaggctttgatcacagtctagatttactgttttattataggttgcaaggtagtaatattctgtcatttct

SEQ ID NO: 14976 - DNA, 1040 bp, Homo sapiens
tctccactggaatttttgtttatcatgtaaccagtaacaatattctcatattcccatgagaagaggttgaggaagaaaagaattcacactagtaatgtagtattttatttctgagatgctacagctttgacattattataacccaaattaaaagaacaggagtgtcattaaccaaaaaggagaatattgctaaacggaactgtagtaaaatttaaaacttatgttcaaattggagatattttattatggattgaaaatcagataattgtattgtgttaaattttttgagtttgttaattatattgtagctatgtaggagaatatccttgttcttaggagacaatgctgaagtatttagggatgaactatcatggtgtctgcagctagctctcagatagctcaggaataaaacaacaaaatttaaaaatataaatagatgaagcaagtgtgtaatgttaacagttggtgagcaggtgaagagtatatgattattcattgtagtattctttgtttctattttatttaaaatatgttaggatattttaggctctagaaaatttcactggacacttgtgagagtatgagtgaaaagagcatcttagtattatacaaataatttttacctgtccgggtgcagtggctcacacctgtaatcccagtactttgggaggccaagatgggcagatcacttgaggtcaggagtttgagatcagcctgaccaacatggtgaaaccctgtctctactaaaaatataaaaattagctgggtatggtggcaggcacctgtaatcccaaatacttgggaggctgaggcaggagaattgcttgaacctgggaggcagaggttgcagtgagccaagatcatgtgctacggcactccagcctgggtgacagagtgagactctgtctcaaaaaaacaaaacaaacaaacaaaaacaaaaacaaaaaccagttttgacctagtggacccccaaaagaagtatggcgagcccaggatctgcaggtgttccctgaccacactttgagatttgttgccttaga

SEQ ID NO: 14977 - DNA, 1100 bp, Homo sapiens
gcaaagatactcaacatcattagtcgttagggaaatccaaatcaaaaccagggtgataccactttataccctctaggatggctataattaaagaaaccccaaaacaaaaacagaaagtaacaggtattggcaaggatatggtgaaattagaaccttcatacattgctggtggctatgtaaaatggtatactccctgtgggaaactggtatttcttcaaaaggttaaaaggtagaattgccatatgcccagcaattccattgctaggtttatacccaaaagaattgaaaacaggtactcaaacaaatgcttctacacaaatgttcacatcagtactattcacaagagccaaaaggtagaaacaacccaagtgtccatcaacagatgaatgaataaacaaaatgtggtatatccatacagtggaatattattcagccattcaaatgaatgaagtactgatgctacaacatataaataaatcttcaaaatattatactatatgaaggcagttagacacaaaaggacacataatgtgtgatttcatttacatgaaacatctagggtaggtagatccagaagacatgaaaaggcagattggtggttcccagggcctagagaaagtgtggaatggggagtgactactttatggatttgggatttttgtggggaaggtgaaaatgttttggaacttgatacaagtggtgattgcacaacattgtgaatgcactaaatgccactgaattgtatacttcaaaaatgtgaatttcacctcaatcaaaaactagctagtatggtgtttgacacctagcaagctaccaataaatttaaaatattattacatagtgtcacctttatcagaaatttagcttcgtgaccttggtcatcaatttcctgagctgaaaaaatgaagttgttggaatagaagacctctaaggtccttacagcattaaaattctactatattaaggcctagtgtttctaattcatacagttaatatttattatgtaacttcagagtactatgctaggcagcaaggacttagcagtaaataagacagatatagttcctgctgtcataaagctaacattctagtagataagg

SEQ ID NO: 14978 - DNA, 1075 bp, Homo sapiens
tagctgggactgtaggtgctggcatcacacacagctaattaaaaaaaattttttttgtagagaaggcaggggttggggggaggtgtctcactgtgttgtccaggctagtcttaaattcctaggctcaagtgatcctccacctttgcctccctaagtgctaggattacagatgtgagccactgcacctggccaagaacagatttctgatactgatgatgcagttaagaaaactgtgaaattcaagccatataaaacctatactgttctagtgtagttggtttgtgtgtgtgtgtgtgtgtgtgtctgtgtatgtgtggtttttttttttttttttgacaggttcttgctctgtggtccaggtagagtgcagtgggataataatcacagctcactgcagtctccaactcctcccacctcaatctcctgagtagctggggctacaggtatgcgccaacatgcctagctaatttttaagtttttttttttttttaaatagagatgaggtctcactatattgcccaggctggtctagaactcctgagctcaagcgatgcttctgcctcagcctcccaaagtgttaggattacagggcggagccaccgctcctggcctctagttgttttaatctgtctttttacattggcttttgttttctaaatattgtcctccaagctattgtatgtttagattgcagaacaacttgtaaaatgaatacttgttttaatgtgcattatttaaaatgttctgagtgaagctaattgtcaactttataaggagaattgctctgtgcccaccacttagtatacaataaatcaagtaatacattcttaactgttgtggccctttttttttttttttttttttttgagatggagtttcactcttgttgcccaggctggattggggctcactgcaacccctgcctcccaagttcaagtgattctcctgcctcagcctcctgggtagttggattataggcacccgccaccacgcccggctaattttttatatttttagtagagatggagtttcaccatgttggctaggctggtctcaaactccttacctcagttga

SEQ ID NO: 14979 - DNA, 1035 bp, Homo sapiens
ccagcctggccaacacggtgaaaccctgtctccactaaaaatacaaaaaagagtctcagaataagagaatagtcgttaaaaccttcagaattattattctcagcctttagtgtggatgtattgtgtaatttttaggaatgacactccattaataataatttctttctagttaagggttaagttctgtatatgcgtttttacattttagccctttataagaagcatatggggtaatacttttcccccaaaagttaaagcatctgaatcttcagaagataactgtcacccttttacccattgcttggaagtggattgtgatccttgatgtgagagattctgactaaaaaataaatatagtataatcagcttttatttactcattaacaattcttatgcattattggcattactggttaattctgatacttccaggtactgtgctttgcactagagttatttgctcagaaagagtatgctgatattaacatgaggatatcacaaagtaggatttcttcagtagaccaaaaaaaaaaaaaaatggaactttagatttttgagattttaattgctgtggtttttcttctcccttggatttaatttacctttttcttcctagtaaagaaaaggatagattaaaacctaaaaagaaagaaaagaaggatcccagcgcattaaaggaaagagaagtgtgagtaatcaaacgtttgaagttttcctttaaaaccatagacctcttagaaatccaggctttccctgagctggtttgctaacttatttgttagtaagtctagcacaactatgtagatgaaagtcatatcgatgagcatatatcaattctagtggtttgaaggttttgggattttatggagcagtaaaatttcccctaaaatcctggagatattatctaggattattaactttttctttgccagggatcttttaagagacataagtgccattgtttaacacaccagcagttcataaaagagagactgtatcaccaaaaaatatttaaaatatattttcagaataaag

SEQ ID NO: 14980 - DNA, 1048 bp, Homo sapiens
acttggctgagctaaactccatttcccaaaattccctttctctctcttttttttttgagacaaagtctcactttgtcacccaggctggagtgcagtggcaccacctcaggctcactgcattctccacctcttgggttcaagtgattctcctacctctgccttccgagtagctgggattataggcacacgccaccatgcccagcttaagttttctattagtagagacagggtttcaccatgttggccaggctggtctctaactcctgacctcaagtgatccactcgcctccgcgtcccaaagtgctgggattacaggcgtgagccaccgtgcctggcagtctttcccatatgtttctgattaggttgggtcacagggagattttcacacctaacatgagacatttattgctggacaaccaaaaacattctctttccccagaaaagcacacaaagtcttttttttttgtctttaagataatattagttcatccttctccacctgattcacactccctctttcatgttctgtaacttaaatactgaaatataaggttaactcttattaacacatgttagataataaggaagaaaactaatgaaccaaaaaatatttggttaatacacacacacacacacacacacatatttaaacacaaatatatcaaattaaggaagaaatatttgtaactattgtagtccatatttctgcaatggtcatgtggtcatagctggtatatatgttcttccactactcattccatattccctttgctctaagtaagtacttcagccagttcggattccttgcctcatggggtgacccaggctttcattcttgaaagatatgggctattagcagttctttctgaattacttctgctgtttgcagttctacaaaaccctttgcaattttccgtggacttgaatctcaggacatgggaaatactaagagatgtcctagaggatctcttgcatttcagacacacttcacttcacctgtattgtgcaatagtcactcaaattcctcttgaaagttagggtcagttat

SEQ ID NO: 14981 - DNA, 1926 bp, Homo sapiens
caaagcagaatggaagacacacgggataaaggtctagtaaacagaggtcgcggccaggcaatcagtcgaggcccaggattggtcaagcaagaagactttcgggataagatgatgggtagaagagaagatagtcgagagaagatgaacagaggagaaggtagccgggacagagggttggtgaggcctggaagcagtcgggagaaagtgccaggtggtcttcaagggagccaggacaggggtgcagctggcagccgagaaaggggaccacctcggagggctggcagtcaggagaggggacctcttcgaagggctgggagtagagagagaataccaccccgaagagctgggagcagggagagaggaccacctcgagggcctggcagtcgagaaaggggactgggaagatcagattttggtcgtgatagaggtccattcagaccagaaccaggagatggtggggaaaaaatgtatccatatcaccgggatgagcctcctagggctccatggaaccatggagaagagcgagggcatgaagagtttccattagatggtagaaatgctccaatggaacgagaaagactcgatgactgggatagagagagatactggagagaatgtgaacgtgactatcaagatgatacactagagctctataacagagaggacaggttctcagcaccaccatctcggtctcatgatggagataggcgaggcccttggtgggatgattgggagagagaccaggatatggatgaggactacaatagggaaatggaaagggacatggacagggatgtggatcggatttcaagacctatggatatgtatgatagaagtttggataatgagtgggacagagattatgggagaccactggatgaacaagaatcacagtttcgtgaacgggatattccatctcttccacctttaccgcccctcccacctcttccacctttggatagatatcgggatgatagatggagagaagaaagaaatcgagagcatgggtatgatcgagatttccgtgataggggtgagttgaggattcgagagtatccagaaagaggagatacatggcgggaaaagcgagattatgttcctgacagaatggactgggaaagagaacggttgtcagacagatggtacccatctgatgtggatagacattcccccatggcggaacatatgccctcctcacatcattcctcagaaatgatggggtccgatgcaagcttagactctgaccaaggccttggaggggtaatggttctcagtcagaggcagcatgaaatcattttgaaagctgcacaagaactgaaaatgcttcggtaagttgactccttcagatcctttcttttaataaaaaccacattcagactgctctttttaaagtgatatgatatatttgaatggaatcattttacttcaagttcttatcacatacttttaatttatatttctggtcattcagtgctgttttagggttagaatgggtatttaggaactgtgttaatgataaacttatgccctaagatgtgaaaattgattgctgtcttggcctttgtagaagtgttgctggcatgccatgcctgtgcatgtttcaagtgtcaaacttcaacttttcagtgctctggatttcacagggttcatgtgtaaccttcattttttccagtaatcagtttgttctttggtattagatctgatagactttatattcactaatcattgataaaactttggaaagtgctgtatttttctttgttgaagctaagaatggtttgcttaggagcatcctcagatttgtcttaactattgatactttcttttggggatgttttatctttcattataactaaaagcagatatttctccttgaggatgttatttgtttctacataaccaaatgttttctttgtgaaatggaaa

SEQ ID NO: 14982 - DNA, 1033 bp, Homo sapiens
aacaataacaaaagctaacatttattgcatgcttactccgggccaggaactgtactaagtgtgttgtgtataataaactcatttaatccttaaaccagctgtatcttgggataggaatttagaagtcagtgacagattgaaaacttttttaaagcaatttttttgagaaagtcaattaatgattaggttttgataaattccaatgtatttcttccatttttcaattctggtttacatttgtggatcttaacaataaattataacttaaactttagaactaggaaagaaaaatacggtgaagaaaaggtaatgatgaaagaccagatacggcaggtttgtatggtctatagctaagaggtttattttttccagattactcatgaagaaaatgtggaaagcatgctatagaatatttagctactacactattcacttttaagttatagacacctttaattttaacacctaccgtgtaactgggcacttgctaataattgagtgtatattatgtcagtctgtctatctcaaaggcctgcaaagataaggtagtattatccccacttcacaaatgacactaaagttcaaagaggttaagttcccttggctagtaagtggcaaacccggcctttgaactcaatctgtctaaaactctaaaatctgtgttatttatggagaataccaagctgattggtgttgttaagctgccaaggtttctttttttttcctttttaaatttctttttaattcgttattgctttgcatggtaatgctggataaaaggtgctgctgctgcttcatccttttttaaagctttctaggcaacatgaacataattaaacaatatatagggagtgatggataatgtcatagccgaatacaagtcgtttatgttgtgtcagtgtaaagtcgtaaggagtatcataagggatgtgatgatgggatttacctgagcagtaaataatcttacacacttgacccttactttgtggtccctcatttgtggaccctcatttgggtcactttaatgtaagga

SEQ ID NO: 14983 - DNA, 1035 bp, Homo sapiens
agcaagaccccgtctttaccaaagaaagaataaaaataaaatgtatttggcaactgggtttcaatattgagtagataggaccaatttgctaagaagtcctaccatctccatcatagacatttctgatggtaactggtgatgctttgggaaaacaaatggaaggagggcacacaacagtggcactccttagattactagatgttcatttagtttattttgttgtttcatagtactcatgttctctgttggtctcagcttcaccacagatgactattgtcaaccagataactgaaaggaacagaagtgtggaggctatctaggatttctctcactgaaaatttactgtttttgtggaggagataggtctctagagtaggaagatagttcttatttatttattcatttctctccttcctgcacactgagcataggaagatagttcttaaccgagggttataaatcagaattattcatggagggtttttttaaaattttgaattactggtgggaccccacctacagaagttcagtagatttggtattggcctgggacatttgaatcttacgtggctaccaccctaatttggagtatggaaattttaaaacgttttcattacccctgtaagatcactgcaccagtttacagttagttaatcctcattcctaccccagtcccagcactttctgtctatatagatttgcctttctgggcattttgtataaatgaattatataatatgtagtcttttgtgtctatcttcttttcaaagtttacccatgttgtagcatgactcagtacttcatttctttttactgctttttaaatttctttttatttataacctgttacatgaatataccacattttgtttaaccattcaccagttgttggacattagggttgttgaatagtacggctatgaatgtttgtgtgcaagtctttggatggacatatgtttttatttttcttggatagataccgagaaatgaaattgctgagccatatgataaatttatgtttggccgggtgcggtg

SEQ ID NO: 14984 - DNA, 1034 bp, Homo sapiens
aaatgactgttggatttattagtataaaactcaccagagagatcagactgaactaacaaatttcaggaaatggtatttaaaaccgtgggactgaatgatcttgcccaaggaaaaagtataaatggaaaaggtaataggacgccagacctccaaaatttagttcagatagaggtgtttcaagaaggaaagagtatagtcagtttttaaatgatgcagaaaagacaagtaagtttggaacagataaatggctgctagatgttggcaacatggaggtcactgatgattgtagtttgtcatcagtctacagtgatgaggcagcagaaaccagtttggagcagattaaagaatgaataagaaatgatgaagtacagtacagcatatataggcaactttttgaagttttgctgtgaaagggaatagagaaatgaagctaggatattagataggtctttacataaatgttgaattcgatagtgatagatgtgtatatcctttaaaacaaaataaagcaaagggatcgtattatatatactgttgtgtagaagtctttttcagctaatccatcttgatctttctatataagcatatacagaactaccattctttttaaagggctacttggtgtcccattgtttggttgtacaatcagttatttaactagtccctttgtgttagtccgtttgcgttgctataaaggaatacgtgagattgggtaattcatgaagataaaaggtttattttggctcactgtcctgcaggctgtacaagaagcatggtgctagcatcagctcctggtgaggcctcagaaagtcttcaattatggtggaagacaaggggggagccagcatgtgacgtggcgagagaggaaccaaggggagggggtcccaactccttttaacaaccagatctcacatgaactcagagtgtgaactcgctcattaccgtcaggagggcaccaagacattcacgaggatcctcctccatgacccaaacaccttcagtatcggggattacaattcaacatgagatttgaa

SEQ ID NO: 14985 - DNA, 1032 bp, Homo sapiens
ttagagatattaacaaaatacaatagtttccaaaatattttaattccaacttcatttgttttttgtttttttgttttttatttttgagacagagtctcactctgttgcccagcctggagtgcagtggtgattttggctcactgcaacctctgcctcccaggttcaagccattctcatgcctcagcctcctgagtagctgggattacaggcacccaccaccacgtccggctaattttgtttgtatttttagtagagacggggtttcgccatgttggccaggctggtctcaaactcctgacctcaggtgatctgtctgctgcagcctcccaaagtgctgggattacaggcgtgagccactgtgcctggcctaattccaatgttaaaatcttgaacatttattcgcaaacatactactcatttcaaaaacacctacacattttttcttctaatcctatattctttattttatctgagtttaaaacttagaatttaaactgtagatttaaaagtagcaaggtgagattgatcagtatatttaactatgtgctgaggttgataagtatatttaactatgtgctgaggatgccgtgggaatggatttaaatttgctgtgggctgtttactttttctttattcaatgagccttaccatataaggggcaaactgtggccactgaacaaagaaaaagtaaccagcccacagcaaatttaaatccattcccacggcatcctgagcacagtattgtgttttcacataaatgcccaagacttagttcgtaatgatctttcgctaaaatgtgtatccttgatccaggtggagctgagagaatatacatgaattaaatttaattaattaattattattgaggtagggtctctctgtcacccaggctggagtacagtggtgtgatcttggctcactgccacttctgcctcccaggctcaaacaattctcccacctcatcctccctagtagctaggatttcaggcacccaccacacaccatgcccagctaatttttgtatttttagta

SEQ ID NO: 14986 - DNA, 1019 bp, Homo sapiens
attgcttattggcctacaatacatttctgtgtactgacctttctcagcagcctttattatgtagagtgaagatatgtcgcaaaaatagccaaatagaattattgtttgtacaaagactcatttactactttctaaagccacccaatgcctattatcaaaaacaaaacttccataatgtgttctctagttcagatgaaatggaggccgatatgttcttctgcaggatgctttatttcagttgtccttaaccttgtgatgttctgacagtagttagaatgccaatgaaatgagtggtgattatccgtgagtcacttggaatcatgggtaattttgcatatgtgtgttttcaccttacagccatggctttatgtctgtgctcttataccagggcagggtgggaagctggggaagagttaacatagtcagaaacggcctctgccaattttcagaagatatagattacgtgaccttagagaatgaacatagagtgctcctactttagaaaatgggtataacaaccttcatgcaaggagattaatgaaaaaagatttggcaccaaaaagagtaatagagacagccagctgataattgattttgctagtccaatgtgggacttaacaaaattcttgcacttacattactattagaagcagtatcgtataggaagcccaaggtatcttgaagaagaaatttggtgtgggtagaaaatgccttgataatacaaatattttaagtttgttaagaggtgtcctggaaatgcagaggactaattttggattccattatttgctagcattttattttaattttattaacattgtcttctcttagaaagttgctggtttaaatcatatgagttttattttaaatcttttgtggtgtcatgttacttaaaataatcttatgttgggaaaggtttctgataccttggtgggtatttcagctttttttttttttttgtcagctctgtaaaggatgatttcagacattttaaactgaaagtgaaatctctcacttaa

SEQ ID NO: 14987 - DNA, 1032 bp, Homo sapiens
acctcagtgactgatccattctcagttttcaggtccattgctttcacatttgaaatagtcaaggagcatctttatgactggggctgagcttctgcattcatgtacagccctctgcctgccagcagtgccttgcatttgtgatcctacaaagagcctgtggacttaatggtttactgtatagggaaaggcttgactttgtgtcttctacttaagaagcttgaactttttaccaaatattcgtactccttttcctgaaaatactgatctaggctacagatccatctcttaaccatatttgaaaaattgaaataatatcttctgccataacttgaaattccactctcagatctgttatttctgacagtgagtttgtatttctcaagtagatatgtctgatgcttatttcttttacagcatctggctcagtgcatggctcatatatctgtagagtgagtaaatacagggaatgtttcctatgtgtatggcaagggtcacagactcaggcaggtaacagatgagcaaggcagagggtggagactggtaaactagacaactagataggtcaggtcaatcgggggcagcacctgctcagccatagcagattgtggccatgtggggatataggtctcatattgccagatttcctgggttttcaagaaaaagtgaaaaatctggatttttatgtgagatcttccagtatttcagcatcaggttctttttgtttgtgagtgctttggccctcacagcctgcctgccacatctgacttgtggactgccggcttgaaacctttgatatttagagaagtggttagaccttagagttggttctggtgagatccttcttgttttacagatgaggtttctgagaccgaaagaagggaagtgacttgctcaaagtctcactgttactcagtggcaaaacaagactagaatttgggtttcctggtccataacctgtcactttcttttttcttaactacaatacctcctttatgaagaccttcataaattctaggatggtgaattctcctt

SEQ ID NO: 14988 - DNA, 1856 bp, Homo sapiens
taaataatttttatctttttctttctttctttttcttttttttttttttttttttttttagacaaggtctcactctatcgcccagggctgtgcagtagcatgattgccggctcactgcagcctcaacctcctgggctcaagtgatcctcaccttagcctcccaagtacctgggactacaggcacacgccattacgctggctaatttttgtattttcttttttggtagagacggggcctcaccacattgcccaggctggtctcaaacccctgggctcaagcgatcctcccacctcagccttccgaggtgctgggattacaggcatgagctatcgtgcccagccaaagatatattttcaaaagacacttgtaaaattagggaagtgcaattttaaattttttttttctgaggattctctctattttgtcattgaaagcaaagacaacattttaaaagtggacctacgtaagagggctgggtgtagagctttattaaagagtgctgtgctgtttgctgtttatactttgctcattctctgatggaaaataaattgtttaggtaccccttacatgtccttcagcctctcaccgtttgagtctggtttgggttttgtatactatatgaaacagtgtttgaaataaaggttcctaatgaacattttcctccatgggataccaatcaactgcctgcttttaattgataattgggcattaactcctcagtagtgccatcatcataaaccacagtgcagaccctatagtccaccattgaaaaattaagacaattatgcagtatttgaacatgtctaatctaggagagagtagcacccaaggccgggcacagtggctcatgcctataattctagcactttgggaggctgaggtgggagaattgcttgagcccagcagttcgagaccagcctgggcaacatagtgagaaccccattgctacagaaaaattttaaaaacttagctgggcatggtgacatgtgcctgtagtcctagctactcgagaggcagaggtgggagtatcacttgaacctgggagatcaaggctactgtgatcgtggcactgtgctccagcctgagtgagagagtgagaccctgtctcaaaaaaataaaagaatagtgccctcatataccttagtggaaaaaatgaccagatctttggcaaagtatgattgctaaaataataacccactcagcttacactccatgtgtttccaacagagagggatacgcacttgatagaaacagaaaattataatcaaatagaattcttctgttggcagagcatacatatttatacattcttctgtgtttagctcagtggttagagaacacttcctggaaagactgcagtacacaaatgttttcaatttgagcttgtacatttcatctcattggtccctgagacaaggttcactgccctggaggtgacttggctcagtctttaaacacacactaatgaatttcaggtttgggacagaagaagggctgctctctattggacagtcatgtgaacttgtttcccctgtatgtctaacttaggtatgtaatgtcactctggatagagggttcttctactatgtccggacacagaaaactgattgcccttgctcagagcactccatgcttgcctgtgtttaaaacttaggtttggcagattccttcatttttgtgaaaatagggcaaagatcttctgagtgcaattggatgtactggagggcacttaacctttagcctgtaaagatgggtttgggctaagtctgttttgtttttcctttcagctgtttgaagagaaaattcaaaggaaaattcatctttcatactttttatgctgatagttctagtaata

SEQ ID NO: 14989 - DNA, 1036 bp, Homo sapiens
tggtttgtgagattgaaactgacaaggtaggcttatcttatattcgtaccagcttttcatgggcttcccttagttaacctaatgaaagaaacagggacttaaccattgtttagagataatttttaactagctctaacttcagttgtaaaattattggatttgttcaatttaaaaaaaaaacaactttttacatttaactttttttttttttttttttttttgagacagacttgctctgttgcccaggctggagtgcaatggcctgatctcagctcactgcaacctccacctcctgggttcaagcgattctcctgcctcagcctccctagtatctgggcttacaggcgcatgccacaacgccgggctaatttttgtattttttgtagagacaggtgttgccaggctggtctcaaactcttgacctcaggtgatctgcccgccttggcctcccaaagtgttgggattagaggcatgagccaccgcacctgacctgcatttaactttaaattgtttgctgtgtgtgtactatgtacttcatttagtagctttagtcttgtagtgtgtggtgagggggtggggagggtaaataagctgtttccactttttcctgtatcacttggaaacatattaactgaatattgcctgaatgtttctgagaaaggacagaaagtgaatcttcacagtagcgatgacttgttatcacccttgctctgaaattatggccttagatgtttgtgtgcaaggccttatatattgtgttgcaactcttgttactcactggagatacgctgttgttgttgttgttttgagacgtttcgctctatcacccaggctggagtgcagtggcacgatatcggctccacctgccaggttcaagcgattctcgtgcctcagcctcccaagtagctgggattacatttttgtagtttttagtagagatggggtttcaccatgttggccaggctggtcttgaactcctgacctcaagtgatccgcctgccttggcatcccaatatgctgggactacaggcatgag

SEQ ID NO: 14990 - DNA, 1031 bp, Homo sapiens
gactcttgtcattccagctgcccttagttgagggaataaggggtaaatttatatatagtgtgaacttcaaatgtcaaattctaaaagaaaagtgtattttttaaaaaataaaccttatactctgttctttccatgggtgtttcttagcaggagctgagaaactggaccttttcttatagatatacagattgagcatacctaatctgaaaattcaaaatctgaaatgctccaaaactgaaaatccaaaatctgaaatgcttcaaaactttttgagcactgacagaatgctcaaaggaaatgctcattgtcttttatggggaattcagtgttgtttcttttcacatctgttctctcatatctctaggaagggttggtatttcttttgggaagaaatgagaaacgaatttgtactggacctgataggattagagattaataactttatctgactcttagttaaattttataaccactaaaaagtctatttctttttcctaagcgagaatcgtacccgtagaccaacgagtcacagaagtctatttctttttcactgttacactaataaggcagatagaccgcatgattgaggttagtcaggcaagaccagaagctcagagtagaaaacatgtatggtagaaggctgggaaataaggtagtcctcctgttgcagaagtttgtcttagcactaaccctggatataatgtccagatgggtgaaaaacagaaacaaacatttcatttaaagttgtgagattattacttggccacttcagtgatttatgagtcatcctggatgaagtgctttcttaagcctaagtcaaccctcgatgactattttattttttgagatggagtttcactctgtcgccaggctggagtgcagtggcctgatcttgattcactacaacctccgcctccggagttcaagtgattctcctgcctcagcctgccgagtagctgggactatgggcacatgccaccacgcccagctaatttttgtatttttggtagggacgggctttcaccatgttg

SEQ ID NO: 14991 - DNA, 1029 bp, Homo sapiens
gagatgggaaagtagaagacacatttgagaaattgtcaaaaatcatttctgttgtgaggattttgtatagcaaagaatggtaaagaaggttggatccttatttcagaatgttttgaatgccagggtaggagtttatatttaattcaggaagcaagtcaagtctcaggtcatctctttctttctttttgtcctgagggtttagtctgcgaatctacttttcattagagaaatttgcttttctttggaaagggtttgaaaaatagggagaagggagtgttttcttgatagtgcgctgtggcattgttcagagtagggctctgtgacctgttttactagatgtcatccattctgttgggaaactttccgaagagactggatgacattcaagccaaagatttctctcttgttcataggatgtaggggaaggaccttgactaatgaatcacaaaggctgcagcttatgtttcagtgcattagggccaaattgtacacaaattgaattggactttgaaattctacccagtttcttaagacaaaacatgtaaatatttgtggccctgaaagatgcagttggcccaacagctttgattggaaaggaagcgtaatagctggatctcctttcagcagctaatcaaggtgtcacttaacaatggcctgcggtcttgctgcagcctaatttggtttagatcgagtgccctttgggtcttgtgctgatcagctaacccataagggacctttctgagaccttctcccttcctctattgtcccagcctttgcctccaagggcagagctctgaaatagaagctacttaatgaccagacaataacatttgggcaggtttgagagcagagatgtttatcacatctctttccctcttctgcagctcttgtgtcttgggaaccagtaatgtctttagggtggtaatcctagcactaaataaggttagaatcaggaaaacaagcattttaaacccaatcagtcccccttggaaaaacttcctttttcaaaaacaaaagatctgaaggggg

SEQ ID NO: 14992 - DNA, 1033 bp, Homo sapiens
agccactgggattcatggctttgtatccaactgcatccaggcctgaggctgctgacgtttgacaccagggccagtagagagtgcccttttgtatcttaagccaagaagtgaggcctgggggtgggggaggggggaaggggtgggagccaatactgagtgcctgcagcatctactactctgtcttcactattcagaacttgtaactaaagtatttaaagaaactgattttaaatgcaaattaaagggcagatattctcaaacagggttcctgtatctgttccttttggctactgaggtggtacaagtccccagcactgttgcactgaaattattgaaagccactcaaggtcctgttgcttattttgtgaaatcagaaatcccttatgtggaacttaacactcataatttgacagaaggtagaaccctgactgccagccgggaaagtgttgccaaaaagagtcaacctctgtaaaaatatttgaagagatttattctgagccaagtgtgagtgactgatggcctgtgatacaactcttaggagatcctgagaacatgtgtccagggtcgtctggctacaacttagttttatacatttaatacattttagggagacataagataccagtcagtacatgtaagatgtacagtggtttggtctggagaggcaggacagctcaagacctggggatgttgtcataggcagaatcaaagattttctgattggcaattggttgaaagagttattatctaaagacctggaatcaatagaaaggaatgtctgggttacagtaaggggttgtggagaccaaggttttatgcagatgaagcctccagccagcaggcttcagagaaaatagattgtaaatgcttctcatcagacttaaggagcctgttttaacagtaattccaaaagggaggggagtataatgaggaatggctggctccctcttcccaccatggcccgaactagcgtttcaggttaactttggaatacccttgactgagacgaggggtccatacagatggttggggg

SEQ ID NO: 14993 - DNA, 1084 bp, Homo sapiens
acaaaaacatacatgagagtttacagtggcattattcataatagctccaaagtggaagcagctcaaatgtccatgaattggtgcatgaataaataaaacatggtctatccatacaatggattattatttagccataaaaaggaatgaagaactgatacatgctgtaatatggatgaaccttggaaacattatgctgggtaaaagaagccagccacaagagaccacagagtgtgtgggtccatttagatgaaatgtccagaataggcaaattcatagagacaggaagtagagccagtactgtggttacctaggggtggggagatgggaggagtggggagtgatggccaagggatatgaggtttcttttgggggtgatgaaagtgttctaaaattgtagtgatagttgcacaactctggatataatacaagttggtgaattgtatactttaatggacaaattgtatggtatgtgtgagtttgatctcaataaagtgcttttaaaaatggagaataataatatctgccttacagggttgtggggaggctgaaaaggaataatgtatacaaatcccccagtatgtaacaatgttccagaattagtagctagggttattaaaacccccttttagaccagcggcagtgaagaagccttttttcctttttattgctagtatctatccaggagcaaggagaacaatctgataggatttaatatagaactagggaggatatatggtatagaatagcagtttctaactctgactactgattagaattccccggaaagtctttcaaaaatattgatcctgattcagctggtctgagtggggctggcaggtgttctaacctgtagccattagctgaaaacctggtaatccagttaagaaaccagcccagttctttgaaggagcgaggacatctgtgttcaggtcagaagtcatacacaagcaatgcactttatagtttgcaaacttcttttgtagacgtcatctctgatctgttccaacaaccctatgaggtggtgttagtagtatgagttgttagagagctgacgctcagaagattaagtcacttgccagggtct

SEQ ID NO: 14994 - DNA, 1088 bp, Homo sapiens
gaaaatcagtagaccataggtgtatgggtttacttatggacttttaatatttcattgaactatacatttatccttatggtagtaacatactcttgattaccgtacctttgtattaagttttgaaattgcggattgtaagtcctctaatatagttctttttcaagatctctggccattcagggtcccttgcaattccatatgaatgttaggatcagcttttcccctttcttcaaaaatggctgttgggatgttgatagggagtgcattgaatctataaatcacttcttagagtgttgccatcttaatgatgttttctatgaacatggaatgtctttccaattttttgggcttctttaatttctttcatcatggttttatagttttctgtgtacaagtcttgtacccccttggttaaatttattcctaaatattttattctttttgatgttattgtaaatagaattgttttctcaatttcatttttgggttattcactgctagtgtatagaaatacacctgagttctgtatattgatcttgtatcctgaaaccttgctgcactcatttattagctctaatagtttttgtgtttaggtttgtctgcatgtaatatgttatctgcaaatagagagaattttagttctttctctccaacgtggatgccttttatttctttttcttccctaattgttctggctagaatttctagtacaatgctgaatagaaagagggtgtctttgtcttgtttttgatcataggaagaaagctttctgttttctgtcattgcgtatgatactagctgtgggttttcataaatgtcctttgtcatgttgagaaagtttgcttctattcctagtttgttgtgtgtttttatcatgaaaaggtgttagtcaaatgctttttccacatcaactgaaatgatatttcccccttcagcctgttaacgtggtacattacattgactgactttttgtgtcttgaacctcccttatattcctgagataaatcccactttgtcagagtgtaattgctagtattttattttattttgttttattttatttttttgcgacggagtctcgctctgtc

SEQ ID NO: 14995 - DNA, 1031 bp, Homo sapiens
ctctgttgctttgatagtgttgctgagacgggatgattgtccttggtgttactttttcctgcagttgacaagctggggaacaggttttccattaccctcaaaatcccttttcttgtttcgggtctgaaagacataactttttccttttaatccttagtgaatttacccttcttgaatgttgaactgctgactaaaatatggtcagctttttatataacaaattgcctgtctccatattggccccaagtttcgagttttctaagttaatctctctcattcatgttgctgagttggagaatgggcactgtttgagcacagggcttcaaatcaaaatggacacaattgctgagccttgagcagaacgggaaactgtgtgccaaaaaagacttttcatttcacaagggaaagggtcataggggaagtgtgagaagggaagtgaggctcctattccattatgtgtctgtcttttgtcataagaggccacctgagggtatcccttggcacctacattcttgactgtattgatctgttcacagatatgcctgcctctatagcacccattcagaagtctgccatatagaggcttttttgaatgagcacacatgcttttatagttatattgttatctggaatccagttcataatccatgtattttgatattgagtctgaaatttaaaaatttttgtttgcagcattgatggcccatgtagaagacctgatcattaagactataatctctgctgaactagctattgctactgcctgtaaaacctttgttcctcatcgcagcagttgttttggtaaggagactcaagaagcttaacatgttttgtgaagaggatcttgggaagttggacgggattttagggtagagaggcttagtgattctatagcagtaagaggtatgtgatggactcttctttctaagctcatgtagcatatgaagagcctactaagaggccaatagtgagcttggtcagaagtcccctgaggagtaactagctttctgtgtgggaagcagggattggaa

SEQ ID NO: 14996 - DNA, 1027 bp, Homo sapiens
atatttttttctaattttctcctttcctgtcttcttttgggactctggttacatgttaacttagtttatattttaccacaaatctggctgtgctcatgttttttcagactttttttttcttgctttccttaatttgggatggttttgtatttctgtgtgtctctaaggtcattcatcattttgtctgcagtgcctagtcctctattaattctacccagtgaaattttcatttcagatattttatttttcatcagtttttgtgtgtcctttttctctttttcattatgttcatgatttcctttacatttttgtttacatgttataatatttgtaataaatgttttaaaatacctttttctgttatctgtcattttggggtctgtttctattgactggttttcctcatgtttatgggtcacatttttgtttcttcacatgtacagtaatttttttaattgaatgctagacattgcagatgttatattgttgagtgtttggattttattgccttctttaaacccttttgaatttttttttttttggtcaggcacttaagttacttgtagatcagcttatctttttcaggcttatttttaagcattgttatggtttgtttatagtagctttttgtctagatccaggttagttcctccactaaagagtcttttgaggtgtctgttaaattacctccacgttcaatgagatcttttcattctgtctggtgggaactcaatttgcaacctcatgtgagctctgggaattattcagcttacaccttaccttctccttaatttgttctttatcctgatagttgcactttgctcagccttgtggactttcaccctatacctaagcagatttgtattcacccaaacattcaaggggtccctcatgatgatttttgaatatcttcttctgcacaacttcttctccaggacattgctctgaaaattctagctactccctagaaattagatttctcttgtctcttttcagagacagttgggctctatttgcatttcctctc

SEQ ID NO: 14997 - DNA, 1054 bp, Homo sapiens
tcttgccaaaggataggtttactaaatcttttatctcctctcctttccattcactaatctccagacgatatcatttatactaaacatggtaaagtgtgcacattgtttatttattgatattcccctataaattattaagcctcctttattaagttcttggcacaactaaagcagtaattggagaagctgttagttatcataaagacctttctcactgtactttttctgtaagtttcaagatcatgtctaatataaaaggtctgatggtcaaatcagggcaggaaagcagaggagtcagtgtggggcaggagtgagttcaggagtacagggagtctggttcattgtctgaaggcctgacctacattgcccctaggatataggaagaaggacaaggcatttcagagaaactagtggccagagaagttactaccataatttgctactatatcttccctgtcttattttttttttttttttttttttttgagacaagagtctcgctctgtcgccaggctggagtgcagtgcgctatctgagctcactgcagcctctgacttctgggttcaagcaattctcctgcctcagtttcctgagtagctgggactacaggctcacaccaccacgcccagctaatttttgtatttttagtagagatgggatttcaccatgttggccaggatggtctcgatgtcttgacctcatgatccacccgccttggcctcccaaagtgctgggattacaggtgtgagccaccacgcccagcctcttccctgccttttagttagcatatgcccttcttctcccccttgtagaagcagtaggggacagaaatgataagtcatatatggccggtgagtttttcttccaaagactggtccacactagagggtgcagcctccacagacactgggaattgctcctgacctatggaaaacaactttctttccaagaaaattatttttagtcctttggtgtaaagacacagtcctgagttgttttcacttactgaattctataactaggaatgaaacactatactcttgctaaaaatgac

SEQ ID NO: 14998 - DNA, 1033 bp, Homo sapiens
agttccacaaaaattacttagtggccaaatggcaaggttttgtttttatcctctgcctctgttataagggaattattctgaacatagtcctttaaatacttctctttcttgaaaagcatgttacctttataggaaatgggcccagcaatttctgttaggaagatggcatagtatggtgggaagagaagggactttagagtcagacagacctaggtttgccttattaagtgtgtgaccttgggcaagttgcttagcttttctgaaccataatttccccatctttttttcaatgcacatagttaaacccacctcattaagttgttgtaagattaaactgagttgtgtatgtgaaagtggccagcatggtttttactttttacttttttggtgtaggtttcttggtaactctcagttccctttccagaaaaaagaaagaaagaaagaaacttaaaattgaacttgcttgggatatggtattgctcaccacttagtttagtacctagtttacatcactctggccatcaccctgtgcagtacgctcctgggactggataacagaaatctggcctttctagccgaggatgggaaggcatcagagtggggccaacaagagactcttcctttttctttgaccccttggttggaggtcagcttctttctactcagcaggccctttttctctgctgtctcctgaatgttgaaatttccattgcagctcaatgttccagccagtaaacactcatattttccatctatcctgggggtcgagctttgggagagcttttctctggagcagtttggagcttataattttgtactttatcctgttatataaacaatgctttccagccaaagagcacaatcaaagagaaactactttttgtgggggggactaaaaaaaattcatattcagagtcctgtagaagtgatatttcactccttatgcctctttcttctctttcataaaataaagtttacctcacctttctcctgagtcttaactctcactattccttcccctgaggaaaacgat

SEQ ID NO: 14999 - DNA, 1025 bp, Homo sapiens
agttagtttggcacaggtttaaagcattaaacggtccattccaggcactgtctgtcatcgcttctctttcagtctgcaagctcctccttttggagctgtggggtggttgttttcttaagtctcccttcttctcctatcaggcccaggctgagctctctcttttaaccacctctgttcttagggcagcaggcttgtccatccagttcccagtttcagcgggaattgctgtactggtgggccagtctcctcagcgtggccacctgcctcccgcagctctgcccatcaggaacaccaggtgccttcatcattctcctcagccaagccccatgcccttatcagcacctctcagcctcacttcctgcgttcctctccctgtgcttatttttctgccaggccatcccctagcctcctccctctttcatatcatttcatcctgcattttctttcgttctctgagttctgacctttcatccagaaaggctgtttcatatttcaagactctgctgttcggtacatcttcaccctcctgtcacccagtccccagcatctgaaggcagctccttctcagagaagaataggataaataagtgctgccacattttgggactatcatatggcctgagaagctcccaattttttttattttaaaatatcgaagatcttccatgtaagtgttatgacctaatgtttgaaagcatgtagttaagaggcagaccaatttggattccttctttttttagccactcactagctattttgcctagggcaagttctttgaacttaatattcttatctctaaaatagagaataaatgcctacttcctagggatgttctcaggagcaaatgaaaactaaatggcataagaaaagcacttttactatatataatgcctgccatagagtacgtgcccagtaagtgggaatccatgtaaacatttctatgtcatctacccttacccatacccatacattagaaatgttaaaaatggagacccagagaaatgaagtagagtgtgcaaattctc

SEQ ID NO: 15000 - DNA, 1036 bp, Homo sapiens
gcgacataatacaatccagtctctacaacatatcattcacaatatccaggatacaatatgaaattatttaatgtaggaagaaataggaaaatatgacctatcctcagaataaaagataatcaatgaagaccaatccttagaaggcccagatgatagaattaacagacaaggattttaaagtgactcttataactgtgcacaaggatgtaaaggaaaatatgctttaatgaatgaaaaatacaaaatattgaccaggtgcagtggctcatgcctgtaatcccagcactttgggaggccgaggcgggctgatcacctgaggtcgggagttcaagaccagcctggccaacatggcaaaatcccatctctactaaacatacaaaaattagccgagtgtggtggcacatacctgtaatcccagctacttgggaggctgaggcaggagaattgcttaaacccaggaggcggaagttgcagtaagacaagatcatgccactgtgctccagcctctgaggtacaagagtgacactccatctcaataataatataataataaagacagatttccaaatggaaattgtgaaactgagaaaaacaatatctgaaatacagaatagacattctaacaatattgagtctcccagtgagtcaacatggtatatctttgtacttatgtaggttttgtttaatatctttcattagtgttttataaattcagtgtagtgaccttatgtattttctattagatttattcttaggtatttgatgtattctcatgatattataagttgtattgctttttttttttttttttttgagacagagtctctctctgttgcccaggctggagtgcagtggcacgatctcagcttactgcaacctctgcctcccgggttcaagtgattctcctgcctcagaatccccagtagctgggactacaggcacccgccaccactcctggctaatttttgtatttttagtagagacatggtttcaacatattggccaggctggtctcaaactcctaactttgtgatct

SEQ ID NO: 15001 - DNA, 1049 bp, Homo sapiens
gctagtggccagaagccaaccactctgccacaaaaagtggtaccacctccaagttcttgcgcctccctggttcccaaacccccacccaaccacgaacaagtgctcagaagggcaacatcccagaaagcttccaagtaagtttttttctgttcaatttctactgagttttatcagttctaagctaatagtactctttatttattactcttcaagaccgttcgtactgaagtactggaaacaagaacacctgctgggaaataaaggctaaccctagttctcagcgtgggctacaaattagaatcacccagggaactactgaaacaagcagatggcagggctttaccctgtgggagggacaggccctgcagaatcagatcttttcaatttcatataaaattcaacatcctgcttccccttggtttgttcacttttaggcatttgaaaggggagatacaggattgagatttcatctaagaggataatataacttcattgacattagtcaccaagctctgtgtagcaacagtgtttttaataccttttgtagtctacctgtttacaccaaaaagacatttcctttcctgagtcaaatttttgttaagtcaaaatccttcactgtatctccagccactttttagccagtgaactagaaatagattggtgaagagcgttggttctagcagcccttcttcagtttaaacttggggaacttttagagatgtctggaagaggcacgcattgcctgctgtgtttttgtgtcgcagacatttgtgtatttctcttgctgtcattgaggcttctcattcatttgtccttcggaagatcaatattagttgtgagaagaatcctaaaacatagaaaaagtcattactgttttttcctccttggatggtaaatcaaattctggatttagatagaaaacaatcccttgtggctgttttaattatattgctgccattattcatttatccaacaaatatttattcagtgcccactaagtaccaagcgctgttctgggaagagctggcattgtaatgactgcagaactc

SEQ ID NO: 15002 - DNA, 1047 bp, Homo sapiens
atttttatttattcatttatttatttattttttgagatgggagtttcactcttgtcacccaggctggagtgtgatggcgcaatcttggctcactgcaacctctgcctcctgggttcaggtgattctcctgcctcagcctcccaagtagctggttttacaggcatgagccaccacgcctggctagttttgtatttttagtagagatggggtttcaccatgttggccaggctggtctcaaactcctgacttcaggtcttcctgcctcagcctcccaaagtgctaggattacaggtgtgagccaccgcacctggcttaagcagtttttaataatcattgacagtttatcctcagagaagaacctaaataagaccattaccagagctgagattgtagtaagcttcttactctcaacctttcactacatcaagcagctttccatctcctagacagttgtaccatttccaagaagaacaattaaggactagatattcacatctatcactcttctcatgtttgaactctaacttttgtgtagtgtaaagttaatggcaccttttgtcccatcttttcagtatttctcactgtcaagctcttgatacttctataactccagtttttctaacttcatctttagccacttctttatattctggtgtactatgaccagagaacatcagataatggaactgtatcacacacatatttaactttatacattcagctattcagagagaaattgattgtaatttcaacaaagtggctgattccaattgattttacacttaggataagatgggagaaatatcactccagtcagtcagtttcagttcccgtgggactttcttatagcaagggcatcccactgcactcttattctcacgcttaaagatacatattttaggccaggtgcagtggcttatatctatagtccccgcactttgggaggccaaggcaggcagaccgtgtgaacccaggggtttgagagcagcctgggtgacatggcaaaactctgtctccacaaaaaatacaaaaattagccagacctgg

SEQ ID NO: 15003 - DNA, 1059 bp, Homo sapiens
tctgtctgcaagtaattagtgctgaaaactggaagccagcaaccaaaactgaccaagtaatccaggctgtcatagcacttgtgaacaacccccagcccgagcacccatttcgggctgacctagctgaagagtactctaaggactgtaaaaaattctataagaatgctaaagagtttacaaagaaatatgaggaaaagcgacccatggactaaaatctactgcagttgattccagcaagtatgagcagagaccccaagcagtgcattcaggactctgtggaaaattgacatgtgctaccacctggcattcgcttgtggcacttactaattttccatagttttcttagtccaaagtagtctaggtagcctataaagaaaggattaaaaatttaagatgttctaaaaaaaccatattgttacaagccagtcatctgcttacatttcagattgtttgtacttaatttcaaactgccacattatgatcaagttgcatcagcttccacttaaggcctgcattgtagagtaatgaatgctgagggcctcaaactcccaaagccatttcccggggacccttaaaatataatggtcaagtaacaaaattttgctacaggagagttatataccatccccagtatcactacacccttggatctggttgcttctggaatgcttttttctttacatttccaatccaggacaagccccactttgcccataaacttccttgacctctccttctcctcagcacttcctgagtgtgtacaattctgtttagcttttagacatatattgtaagccttatgcatgcttatcagagcagccttaataatgccccagtgaaaaccaccaagatggcaagaaaactgcaaattttggtggaagtgccccatggctgagggattcttcagcttcacctttggaccctggatgcagcctcttcctggaacaattctgtgtctccatcactgacgcctacttctcacttccattgtggccttttgagtttcagattaagcctgacatccaattacgtggatttcgtacaggcctgatacactga

SEQ ID NO: 15004 - DNA, 1041 bp, Homo sapiens
ctgtgagatcttcggccatccaggataagcatccacatctcagggatggtttcagaattaccttgttttaaataaggagaaagtattcctcagacttcttcctacgacatactctctcgcatttcttccatgcttaaactggcagaattttcatgctaaggtgtggtaattaagtcatctcttgttttacttacaggaagcaacatcacaataagattaaaaccatgggtgtctgattcagacataccagggtttgaattcagatttcagcatttaactggctatgtaaacctggggaagttacttaaccctgtaaagtggcaataataacgcctattgcaaagaattgttctgagtcttgaacacataggaagagtactcagcataaagctagtacatagcttgttgctgcaattaagttatgaataacaacagtgcataaggagtaaagtaataaggcaggtctctctgagttttatggttctaaaacaaagtgttaggtaacacgtgttctgtaaatggcatctatagtaggatggtgctggctgtcaccttcagccacatttgttagcctctgtagctgtcagcaccttccagatgctttaaacaggctttgattatagttagtctttgtgattcttgaagtttgattcattgcttaaatatagttattctaggccagcctgacagagaatatgataataagactgagacattttgctagcctttacctttggtctcattttatggatgaaataagtggagtcatagatgcctgtaagtcagaaggagcaagtgcttaatgtcttttattttagttcagagtccagttctaaagactggattacaaatcatttcattccttaatctcttgcaccaagtcttagatgaaagataaaaaaaatatatataccagtgggatggccagtgatcgaatttaactacttaagatatacacaggaatagtttctcaaagaatagtcattattctagtttagaatttccttgagcagttgttgccttcaaaatggcatatcttga

SEQ ID NO: 15005 - DNA, 1042 bp, Homo sapiens
tttcaggatcactcaggaacagagacttcacctagtggaccattcaggccccttgctatttcttcctcctctcatcctttaggtcaagtccatgttcattaatgcttccgttagaagaaagtcggcaactcaggaggagaaggcaaataagtttcagttttgctgcttagcaactggagtattcagctgaatgtctcaaggcttagggcagggagtcttgtctacgtgactaggtcccatttctggaagttactacctcagggagattaggagtaagcccagcccatgtacattgaaaaagcttccgggaatgagtctggtgcaccactgttgaagaatgactaatttaaaagattctctccagcttccaatttgctgtctataccatatcgtgccttccataaggagaggaagtcaagaagggaccgtctacacagtaaatccaagcagatgtctgggtgccttagggatattagataatcaactggtatcttcctttgaaaaggcttgaggcaaagtgtttggaatctagggtgaaagttgggagacatggattctagtttcagcctcatcactaactagctctgtgatttgggtgaagcccacagctgcagtgcccagcgtccctctctgtgtataaaattgtgctgctgaaacctgcttttcctcttctccagaactcagccgaggtagtgtttgtagatgtgaatatctttgaagagtattgaaaagtgctctgtgtgaggtgatctcgctggaattatgatttgccaggttccccaaacttctaatagccacttttggggaaaaaggcacaggggccctgagtacagaaataaaccggcagcccaaggctatactgatctcagctctgcagacagcctgtcagagggctgggcccaggtcacacaagcctcatcgacagcctcagtttcctcagaagttgggaatgaagtgtctctgaagaggtgctccaggacccataattctttacctcaacctctgtcctcacacagtctgggaggcagaacttccatatcag

SEQ ID NO: 15006 - DNA, 1030 bp, Homo sapiens
attgtgtagggaaggaacgattcggtcataactcctgagggtaattggagacaaatatgtctcttatgtacacaacgaaggcgccagccttccttcctagcctctttaatcccgggattcttcttttatccctgttttcatccaagcacatctacccttggtgacattagctgtgtcattcggacaatgggggtatagagtttaacttcatgaggacaattagaggcattggtccttggggacggcgtgaactgggaagacagcttctgtcctcccacacagacagaaggtggctttgatggctactgggtgctcttcctttaggattccgtttacttagaataggcattggaagcctatagcatccagcaacaccaggctggggatgccctgggcaccctgcagtggtttctctttggtgcctcccactacccattctgtctccttctgccctcataaccttcattgctgagtctcctttatctctctttaagggtcagaaactgcagcctgggagattcccttagagttgttacaccctgttcttccagcttgacctacccattctcccacctcacttcagccgtcattcttcctttttaaaaatggtacagttgatagagtctaaattccatggaaagcagtctatttaaactttgacttactttttaaaatcattttaattattttattttatattattattttttttgagacggagtctcactctgttgctaggctggagtgaaatggcgtgatcttggctcaccgcaacctccaccttccgtgttcaagcgattctcctgtctcagcctctgagtagctgggattacaggtgcccaccaccatacctggctaatttttgtatgtttagtagagatggggtttcaccatgttggacgggctggtctcaaactcctgacctcaaatgatccacctgccttggcctcccaaagtattagaattacaggcgtgagccactgtgcctggctgaaatttttattttttaattgacaaaaaaaaaaaaaat

SEQ ID NO: 15007 - DNA, 1024 bp, Homo sapiens
tcatgttttgtatttgttcaaagcaccaagagacttgcgttttaagtaagaaagcattaaactcaggaaaaaggattttagagttctttggcagaaacttctaaatggaaacacgagaaaacaaattgataatctatagaattatctggacttgtactctcctccaggcttttctccaccctgccttaaacctattcccaactcccttgaaaagacttctgaaattctactttctctacttttttcatcatggaaatactaaatttcaaggagtaactgctaaatgttatagcaaaatcgtctgagcactgaagtttacacatgttataaatacatggaattagaaagttgtactggccaccatcggggcatcatcactttaggatcaaattgttgcacctttaagcttctctaggacatctcgtccagacctgtcctttgtcatgttaagaaagtgaagttcagagattattatataaaataacaggactcaaagagagaaactctggtcctctgacttccaggacactctgctgtcatgccccagtgtccaccaacatcaccatcatcatcatttactaccaaacacttaccatatgccagctacattttctctcatttacttctcaaaacaaatcagtaggaaagttttgaaaaatcaactttactaaggcctggtttgtatacaataaacgatatccttattaaagtatacaatttaggttttcacagatgtatatacctgtgaaacccctgccacaagacagaacattcccatcacccagaagttcctccgtgccccttccagcccatccttcctctctctcccttggcctcagaaaactactaatgtgttgttcatactatagagtagcttgtggtttctagaattttatataaatgacagcataagtatttactcttttgcacctggcttttttttttcactcagtgtaatgattttgagattcatctaagctgttgcatacatcattagcctgtgtattttcattgctgaatagta

SEQ ID NO: 15008 - DNA, 1050 bp, Homo sapiens
ttttcactctttttatcccttgttttctctgcctgtctctttctgttgaattttctctgtgtctgtctctcctttgcatgctctctttttccaggtacaacatctgtgcctccacagtcggaagtcataataaagacaccaggcttggaactgacatttccatcctctggcgtcacttgactagagtgatcaaaagtcgaaatcacgaattgcctgaaagtggcaagggccttctcagctgttgttgaaatgatttgcacctctttgaaaactaagattgaattcagtccatgaaagcagaaatgaaagatgtcttcaccagtctacctttgggatttctccttctttccgtgtttacagttgctttgggaattccaggactgtctcaccccaccaggccttttttcttgcaccatccctcccttctcccccacccctgaccgtttaaaacaaaatgtctcaaccagtcagtgatactcacttggagaaggaaatgtttctttaggatgttaggttgacccatgagaacatggacaatttttggtcacttaagcaagttgccacaattaagggatggactggtttcccagttctctgtttgcatgattttgttggactggtggaagaaatggcctcgtgtctcctcgtatgttgtctggagagttcagagatggaaaatcttgagacagcaagaaaagcatgattgtagaatcagcatccctgattacattagacctggcaaatggacgcctggatcccagggagtcaggctatgtcattagatggaagatgcccttgagatgcaggctgagggccctgatgattgcactgcggggctaatgcacatagagatctgggtcatgaggagtggcactcactgcggcatccgctttgtgacactacatgttctcagttcctctgtctctgaccatgccaggctcacttgtcagttcctcttctttcctctaataagccctttgttacatttatttctttacatttctccttggagatccactgcagtggcttctaacctgttgcacgcgtcag

SEQ ID NO: 15009 - DNA, 1800 bp, Homo sapiens
ttccaggtggtagttggtaccagaatgggcgcaaacttagtctcttctccattctgacttcaaacctgggtcactacaatttcttggatcacgaaaactgcattcttccttaaatggtgtcactaagttgtctttctgtttctttctgccatggtcattgtcagcagtgaccccaggccaaagaacagtttttcattcattctcaatacctcgatgagaccatgtgctactctgtgtttccacaactctagtgtgattttgaagttgtatgtttttctgttcctgtctagtgagacagtctctaatctttctggatctcatcattaggtaattcaatgacaagtttaattggggaaaagagagaaggatctagtcccccgaatttgttttgggtcctgtcccagttgtcttctggttagtaggtttttgtgcttaagaatatgttgacttcaggcatttaacaagggacaaaacatctatttttagtgacttaaggaagtggtaggaacagaatctaagtgtagccagatgaaaggtgacttattttgtttagacaggcagaactgtggactaccatgatctgtttcatcaaattattccaaaacaacagatcctttttcaggctttctttttctttttcttttctttctttctttttttcctaaacttccttttggcagatgtggcctcatggatgagctggtacacgacttagcctcagccttggagcagacatctgagcagaataagcttggtgaactgtgggaggagatggcgctgagcccccgacagcagaggcggcagcttcggaaacgccgaggtcggaagcgtcgttctgacttcactcacctggcagagcatacctgctgctacagcgaggcctctgagtcaagtctggatgaggccactaaggactgtcgagaagtggctccggtgaccaattttagtgactctgatgacacaatggtagccaaacgacacccagctctcaatgccattgtcaagagtaagcaacattcttggcatgaatctgactcctttactgaaaatgcaccttgtcgaccactcaggcgcaggcggaaggtgaagcgagtgacatcagaggtggctgctagccttcagcagaagctgaaggtgtcagattggagctatgagagaggctgcaggttcaagtctgctaagaagcagcgtctgtcccgctggaaggagaatactccctggacctcatcaggccacggattgtgtgaatcagcagaaaataggactttcctaagcaaaacaggaaggaaagaaaggatggagtgtgaaacagatgaacaaaaacagggctctgatgagaacatgtcagaatggtgagatctcccttactaagtcaaagattttcctggttaatttttcccaaagtgcacatccatggtcttagtgggttctaccttctttcaaaccagccactctagtattgactttgaagccttccttgaatcaatcagtagtttagctttttaaggtaccattcatgagtctatttccctctgtcaggaaggctatatgtaatagaaacacagttgtttctaaaaactgtttaaaacgcgtacctcaaatgcaaaactaataattttattttaaaaaacaatttgctgcttattatgccatacagtttatacataaatattgttgtttagaactcaggtctcagcagaggctggtgtgtgtgtgtgagagagaatatgctagcgccaggtatacggagtttataaatgttccattaagttgcctgtcctcattaagaatcatggcttt

SEQ ID NO: 15010 - DNA, 1059 bp, Homo sapiens
tctttatgtgtgaagctttgtgatttttttggaggattgcattatcttggtgattagttgtaaaatagatgaacactgacaggtgaaaagttgtaggcttcctgtttgttgtgggtttttttgttttttttttttaacaacttagtagcttactgagttgatatacacgatccacattttagacttggaatcttcattatgaatttgctgtttcaaaatgaactagagtggtagaagacataactggtgtatatgtatgagatgattttagatggcatatagatgcccaatttttaagttatgtattatagtgtacattggaaaagatgtaattatggtatcaagcctgttatttcacggaaatatagtaaggacaaagctgagcaaaaataattgatatgaggaaaaataataagtaaacagtagtacaggttgtaggcagataaggaaagtcatgaaggtggtatgtgagagactgcagtttggggaacactaagctagagcactaatcatgtttgcatcagaggatccaaaggcagaaggggacctgtggcagtcacctgatccagatccgttatttgcaaatgacgaactggagatctgtaagattcaaactatttgcccaaagtgatacagctaatagaaccaagattggaacctctgtggcagatagaacagttgcttagtttgtattctcataaaacaagtttgaagttatcattccgggttcttccagtctttgtatgtcagagggtattaagttctaaactttttagagaggactgttatgttgtgggaaaagtccaaagaaagctagcaaacataaagtgagggatctcctttgatcctcacagccaccttttgaagtcaaatagatgttttgcagatgagaaactgaaattatactctgaaagcaatatttcatttagccctcataataaccctgtaaaataggtagggcaggcctggcacagtggctcatgcttgtaatcccagcactttgggaggctgaggcaggtggatcacctgaggtcaggggttcgagaccagcctggccaa

SEQ ID NO: 15011 - DNA, 1085 bp, Homo sapiens
gtgtgctggcgggtgcctgtagtcccagctgctcaggagcctgaggcaggagaatggcgtgaacccgggaggcggagcttgcagtgagctgagatcgcgccactgcactccagcctgggggacagagcgagaccccgtctcagaaaagaaaaaaaaaaaaaaaaaaaaagaatgttgaaccagagtgagaccttgtttctacaaaattttttttttttaaatcatttgtgtctggtgatgtacacctgtagtctcagctacttgggaggctgaggtgggaggatcacttgagctcaggaggtcaaggttgtagtgagctgtgatgatgccactgcactctagcctggatgacagagtgagaccctgtctcaaaaaaaaaaaaaaaaaaaaagaaaagaatgtggaaaattgtggaatgatataaactattagtagtaaggcctttccttcagtagcatgatgtttattcatcattaattcattcagcgtttgctggaaccctactatgagccagctctttgtttagatactgccctcaaggagcttacattctcatgggaaagtcaggtatggaagttgacaactacaataaaggtttgaaaaagcacagaggaggggcccctaatgtcaaggctcagggagatctttttagaggtggttgtgctcaagctgtcatagaagacaacaggattttaatccataggaaaacagtcctttagctttttgtcttaataccaaataaaataatgtctgtgtatactgtttgggaaaatgatttgagtagcatgatatcatgtcagaatgctgaaagtggattactttccctcctctctttacctctgctacctagagctgtgctgtgctgagatcagtattcgtacttttgtcaggtttcctgtttcctttaaaagccttatcctgtggctggactaggcatcagcttcttgtttctttgtgtatctcattatccataccactgtcttcactcttttgcctggcagtgtttgtggctgaacttggaaacctgaggaagtctctactatgcttctggtatgctcagctctagggtaatattgcttattgtt

SEQ ID NO: 15012 - DNA, 1107 bp, Homo sapiens
gagtgatttttgaaggtgaactattccttaaactagcttgccattcgcagacagactgttttctctccttaggagtgactctaaagatctttgttccaaatctaacgcagtcacttcagttattttttgccaacattggttctattaaacatgcatgtatttctcaaagtatttttttttccctaaaagtacattcctgccccaaggacatagtgatctgcccggtttcctaagtaacactgcagttttaacaactcacctgatctttcagttacctgcagtaaaaaagaaaatagaaatgttgtgtttatgcttggatagaaagaatcctctttccattaattgttaatttcagcattcaccttcacacttgtaataacaatttaatgactttttctgagataagaattttttttaaattcttatttaaaaataaaaattttttgcttttagtgctcattcttccaactctgccctggcaaataccaccacagtggggaaactatgacactcttaggggaagtactgatcccacacttacactatgaaagaagcgtataccccaggtttcgctggcctgagtgaagattgtccctgaggccctgatcagatgaaacagaacaggcatagcctgtcttttctctaattgcatatatactggggaacagtatttttatctaaatttatattcatttaatcattctattattctttaggttgaatacttagatctctattattgactaggttggctctgggaatttggtagatttttcaactcagtaattttcgaagtaggtaggtgcttatcagaattacccagggaaaaatttcaaaataaatatgttactgattctgctcccactcctccccagcctactgaattaggatcttgatagggacatgtgtatttagtaaaagctccttatataattcggataaccatttgccactccagttgagaatgaagttttaacttggtggagactttaacttatacttagccttttatacaatgtgcctaattgaaagatcacttcccttaacgtattacatggtttgcaacccaagaacaaccatatactacacttgaaaaagagttctgaa

SEQ ID NO: 15013 - DNA, 1070 bp, Homo sapiens
gatggaattttccaaaccactggctttgtattataaatctcagcctgtagcattctttgcattcctaaagaatttcttaggattttagtcaaattcttatattttcctatttataaattgaattgactcttaagcttttgctatttagagacatgaaagtgtgtgtgtgtgtgtgtgtgcacgctcatgcttgcgtgcacgcatgcatgcacccttttcaactgtgcaagttattttggggactttctgagtcaaaaaatttgtccattcaacagctgccttgttgccttgctaaccaggttttcttaggtttgtctgaggttccagttttaagactactaagggtcttaatcctcagctgggactactgattaggagtttatctggtataattttatatgttatttactttggctagttttttaaaattgtggtaaaatgtacataatataaaatttactattttaatcacttttaagtgttcaagtggccatttgatttttagaacttttattcattcatagcagttttaatcaacagctaatgaggatcgcctgtgtgccttgagccaaggttggtagatcattggaaaattatcaaagaagtgtaaataaagtttctgttctcaagatccctgttcttaatctcaaagagattaagccttcttgtttcattagagaagcaagatatatgcacaccagttaaacattgcttcatggtagatgaggccccaaatgttcaaggaacactttgtgtaaaggtgagactcattttggtctttaatcagaggcaggatctgtctagtttgagagggacaaaatcttcacatacgtaaagatttttattttacttcttaatttgcatacagtacaatacattcttggggaacagtggtgaactaaaatagcataccacgtagttcagtgttaatcccattgtctttcacagaatcgtttgcttttaaaataagctgagtattcagatgaaggaacatattgtcacataattaatatttttatttttttacctgtaaaataaaaagcataattaatatttttaaaagtcacaga

SEQ ID NO: 15014 - DNA, 1035 bp, Homo sapiens
aactaccatatgatccagcagttctgtttctgtgcatatacccaaaagaatgaaaagcagagactcaaaatagatttttgcatacctttgtttacagcagcattattcacagtcgtcaaggtggaaacaaatcacatgtccattgctggatgaatggatgaacacaatttgccgtatatatacaatggaatattatgtagcttgaaagcctttcttattcagaatgaaactctgccatgtgctacaaattggatgaagacatttgctaagtcaaataagttagacacaaaaggagaaatattgtgtgattccacttttataagctactagaatagtcaacttcatacaaacagaaaggaacatagtggttgccaggggctaggggaagagggaaatggggggagttattgtttaatgggtacagagtttccatttgagatgatgaaaaagtcctggtgataaatagtggtgacagttatacaacagtgtgaatgtacttaatgcgactgaactgtacagttaaaaatggataagatagcaaattttatgtatattttactataataaaaaatagcaaaaaagtttttctagggtagtgcttttttcactgcagtttggtgaccatgtaggtacagttttttgaaatttattaccagttaaatatgagtgagtatatgtgcctgagtttgttgtgagtgtgtgtgtatgagagagaaaaagagagagatttgagttgtcaaatgtatttcctgctgctgtggtgacgttccaaaatgtttgaaagctgttgccctcaagaaactcttgtatatagagtaacagctttcaagatatttttacattagcccacaataagaaattcatgtttgaatatgtgcgttggttgtacatgtaaatctgaaataaatcttgggtacatgccgatactttctatttttttcattgagtaaaaaaagtaatggccatgacccactaaattgattttgtgatccacaatttgaaaattactgttttaggttacgtttctgggactgg

SEQ ID NO: 15015 - DNA, 1530 bp, Homo sapiens
tgaatggggcagcacctccttcccccaaagtgcgattgcccctgtttcccatacgaagtgtaatgacgggttgcttttaaaattatagtccttatcaatggaaactccagatttctttatcaaagggaggtgggtgggcatgaatctagttggaaaaggggacttgaagctaagtttacatggcactttaagactgagaacatatcaattgttcataatcaggaatatggtagagggagagcaggtgtagatgatgggacgggaaagtgctgaaaccagcccagcagacctgtgagtcgcctctggttctcacgcagcagtgtgtgtgtgctcacagggatgttccacccctggttctcatgcagtagtgtgggagagtgctgaagccggcccagcatgcctcttagttgcctctggttctcatgcagcagtgtgtgtgcttacaggagtggagatgatgggatgggagagtgctgaagctggcccagcatgcctctgagtcacccctggctctcatgcagcagtgtgtgtgcttacagggacttcccaggctgcacttcccttccctgtgggctgcacccgtagaagtatagaaaatgtaatgtctgttgaatataaaatcgtaccactgaattgttctagtgatgaggttagattttgttgtcatgtgcattgtcaccatagtgacccgtggcatatatttttaacatacttggttgggtttgagagaaatctgtggacgtaattttttgtttgtgtcaagctctatgactcatgcagtgattggtcccatgatcatggcctattagtgaaaacctccaaaggtcaggtggccaaggtgttcccacattttttctatataacttgtttcctaatagtctgcctttctacctatgattaaaaataatttttatatacaacattatttacatttcaaacatctctacgaagtcatgccattttaaggagatgaaaacagccacagagttgagtgacttgctccaaatcacataactaagccaggactagaatcccagactttcagattttctctgccctgggttataatctcttgtttttcagtgatagacctgagtcagtctgagatgcttatttatgaaacagtataccatgaatatttattatctttcttgggcatgcttttctacacattttgaatactttcaacagggattacccaagaatgcaacatctacctgtaataaatggggagaaaattagttgcctgagagaacagaatattaagcacacaaatactttccaacacagggttgtaaattgtgctcctcattttaaggtgctgtacgtgcatgtttaaggaattattaatcagtgtattctgcttgctttctgtattaaccagttccagaggatagccttagaaatgagtgtattttgaatcttaaagtttctttatatgcggcacagtgtataatgtcgtaagttaagaaaaatctgttatctttcaaagaagttacgtagtttcaaaaatgaggttttgtaatcagt

SEQ ID NO: 15016 - DNA, 1060 bp, Homo sapiens
gcagctgtggatgcagtctagttggaggcatggcttggaggacgtcatggttcatgcgatggttggagggatggtaaaagcagttagctcttgtcagctgcttccctctgctagtgcttgagctgccaattttatttgtcagtatttcctgatctcccactcctgttgtgaaaggtcacagagttactgtcactggcaacaatttcgccccttagaagaaaactggtacagagggaaagggtgaggaaaatggtgagttccatcactcagaactaaatgcaagtggtagagagatgctttctcctgtgttaacgtctccaaaagatgaacatcaaatgcccggaaacagcaacatcaaaaagaaggaagatgagaagtattgttgaagagtatggacctacagggtttttaacaagtccagcaaaacaaactatggccaaaagaagaaatttttctgtcactgcgagtagacatcataaatgcttggtaaaattgccagatttagggaataaaaaatttttaaagtacagtgttgaagaatggggcatgtcatgaagacattcagcaaagaagcaatcttggcaaggtggagaagtgggaagcaatggggagagaaagggagatgcccagagcaggaattctcaatgtgtggtccctaggccaacagcatcagcacatcttgccctcaccagacctactgaatccgaaactcccagcgcaaggcccagcagtcttcaacaagccctccaggggtctttggtgcatgctcaagtttgagaaccataggctttgccacggttaaaaagatgttttaatggactggtctcctcctaagctctgaggtgctctcatattccctccataagtaaagagattttttttgtataattctttgcagaaactgttaatgtctttatttctcatattttttttttcccctacaagctcctgaaagatctttttgaagaattgacaaaggatgctatcaagggctatgtttaggtggatggaaataaccttttgaaaatggataaagcctgggtgtggtgactcacgccca

SEQ ID NO: 15017 - DNA, 1026 bp, Homo sapiens
tactccttccttcaaacaaaagacctttcctcaaccctttgaaagcctgagtaccactaaggtatactgcccttatctgcactctgtccattctgcagtctaccgaggcagtggtttttaaccctggctgcatgttagggtcacctgggaagttttaaaaagtcctaattcctggactggaccacagaccagttaaatcagcatggggaggtggggatgggtttcagtctttaaaaagaaatgtagctgaggctgagaaccaccactctaaaacctggctgctacccttgctaccattaaaactgttcttgctggattcacccaccagtgacttctactattaaaatttagcccataggttgatttttatgacactgatgctatataaccacttccttctttggaatgctccctttcctgaccctactttcctgatttttctgccacttctttgctctttctcagtttctgtggagttgtttggtaggtcagtctagcacagactggatgccggtctctgccgccacctccgttatttcagtgaacacctgtatgccagtgagttcctttgccataccaccttaatgcaccaacttaaaagcacagattagagtggagcattcacatttattactgcaggcttctaggaaagcatattaaaggtctctggtccttctctcacctcccttgttcctcctccaagcccagtgaggtaggaggaattgctaattagattagtgagattctaaggtgggtcactcctgtttacttatgagttgctatttatgaaaagatggcctggactgtgttccctcttctgctttctcctcttccgggtcttggactggtaagggggcctgtgcccaaaaggggctcctccacctaatgctgtctttaatctgtggctttctgctgctggttaattttttaatttggcttcctcaagcctttttggccttgaacttcatgttgatttttatcaaagaactttttattggggcatcagcactagccctatgaatacag

SEQ ID NO: 15018 - DNA, 1034 bp, Homo sapiens
ctgtgtattagagcgtacagaaaacataagtttcagaacggaaaaaaggaacaacagatggcatttgctgataaaaatgcaataaacttagaatttgaggataggtggtcagaaaaaaaaatgcaataaattaaagccagaaaacactgctcatctgcaatccaaaatgtttttaagctcttcaactattcttgggttgattaggaaatgcaaagtattaaaaaaacatttcatatctaaaatataaacttgttcctctgagatacaaataaaacagtgctcagaggaaaattcattgccctaaaatttatgtattaaaaaataagataaatgtcatataactcaaaatattaggaaaaggaatcttttaaaggcaggctaaaagaatcaagaaaaattaattagaaaaatgaggaaacaaagctaatttttaaaatatgtagtaaaatatgtaacattttagctaacattacaagagaagacaaacacaaaataagaattaccaagtattgaataggtaagagtcataaaatattctttgctcaactgtatgcaaacaatttaaaaacttggattaaatggataattttccaggaaggtatagtttgccaaaaaatgacatcaaaagaaatctaatataacaattgtcatagaagaaatgaagtaagtatttcaattagcatgacagactaaatacttttaaagacccaatgaaaacaaagaaatgcatttggagaattaacagaaactttttgtaacaccaattttttattttacattttaaagcatggaatggaatttattgtaaagacgtgtattttatagaatccaagcaaaagctcaccagccagagataaagtgaggccagctcagggaatgtgagcagtggcgatttattccctctggtgttccatgttagcctgacacagagccccctcttcacattctcaggggctcttgatccaaaaccttttttaaaaaaaataattttagacttaacagaaaatctgcaaaaatagatttcctgtgtgccc

SEQ ID NO: 15019 - DNA, 2973 bp, Homo sapiens
ctgcctgcgttggcctcccaaagggctgggattacaggcatgagccattgtgcccaatccttacccttcttgaaaggacactacacattttccactttcaggggtcagggagtttgggctctggtacttactctatgaacagttgtctatgccattcattgtgctatgtgtgtcctgtgtctggatctgtctgtgcgatttctgtgctggtgtgtttatgcatgaacaagaataagtgaaagtatccagccgagctactttactgagttatgattaaattacatgcaataagctgcgggtaggacttttttttaaagcagtgtttctcaaactcaagcatgttttagaatctccttaaaagtttgttaaaacacagattgctgggcctcaccctagagctgctgatttcataggtccaggtgggactgagaatttgcatttctaacagggttctaggtggtgtgctgctgttggtctcagtgtcgctgttgctgtcagtcttggtatcatggagaaccactgttctaaagaaacttcctttcctttcccttaaaccatcctaggttggacaaccagttgtggtccatttgggagctcccatctcattaaaaaatgagaacatcctgagccagacaaagatgctctttgtacttttagtttcattctgaacccaagccagaaatctacctaagcaactcacgtgggagtcatgaggaagcaaatatttagactttacgagcatgcgcattctatactgaccagtgttgaatttttccacgattttcatttgggcaaagtactatgtgttacaatcaaccaggtggtacttctcagatgcctgataatgttctgaaaattagagagataaacattatcctgtgtgacaaatacaggtatgtcagtacaggctggctgaagatctgatttgctgggtgaaagctcctttcccaactctttcacctgaaactaaaagttcttgctagtgagcatccattttggccagagtgtggctacatcaccaacccaaaagggtttagggaggacagggaacaagatttcatagctgcataataccaggcattcccagaagtgctttgccacctttgctggtatgtcttctgtggctttacatgtgccaggtaagctgacagcagaacatcagtatccacttgttgtggttttaaaatatgttcacatatacagttgaaagcattccttctgagaactggaacaagacaaggatgcccgctttcaccacttctattcaacatagtgctggaagtcctagccagagcaatcagacaagagaaagaaataaagggcatccaaattggaaaacaggaagtcaaattgttgctgtcagccaatgatgtgatcatatacctagaaaaccctaaagactcatccaaaaagctcttagatctgataaatgaattcagtgaagtctcaggatacaaaatcaatgtacacaaatcagtagcactgctatacaccaacaatgaccaagctgagaatcaaattaagaactcaatctcttttatgacagctgcaaaaaattaaaatacttaggaatatatatatatttttttaatttttaatatatattgtgccactgcactccagcctgagtgagagaacgagactctgttgagacactgctggagtgcagtggcacaatctcggctcactgcaacctccacctcctggattcaagtgattttcatgcctcagcctcctgagtagctgaactacaggcatgcgccaccacacctggctaatttttgtatttttagtagagaccaggtttcaccatgttgcccaggctggtctcaaactcctgacctcaagtgatctgcctgcctcagcctcccaaagtgttgggattataggcgtgagccaccgtgcccagcccctgacttaggaatatacttaaccaaggaagtgaaagatctctacaaggaaaactatgacacactgaaatcatagatgatataaacaaatggaaacacttcccatgctcatggatgagaagaatcaatattgtgaaaatgactacactgcccaaagcaatctatggattcgatacagttctcatcaaaataatatcattcttcacagaactagataaaacaattctaaaattcatatggaacaaaaatgatcctgcatagccaaagtaatactaagcaaaaagaacaaatctggaggcaacatactacctgatctcaaattacactacaaggctatagttaccaaaacagcatgatactggtataaaaataggcatatagaccaatggaacagaatagagagccgagaaataaagccaaatacttatatccaacggatctttgacaaagcatacaaaaacataaattggggaaaggacaccctattcaataaatggtgctgggaaaactggaaagccacatgtagaagaatgaaactggatccccatctctcaccttatagaaaaatcaactcagcatggatcaaagacttaaatctaagatctgagacaataaaaattctagataataacatcagaaaaactcttttggacattggtttaggcaaaaaattcatggctaaccccccaaaagcaagtgcaacaaaaataaaaataaataaatggacctaactaaactaaaaagcttatgcacagcaaaagaaataattagcagtgtaaatgaacaacccacagagtgggagaaaatattcacaaactatggatccaacaaaggactagtatctggaatctacaaggaactcaaatcaccaaaaaaccccccaaatcatcccatcaaaaagtgggcaaaggacatgaatacatttctcaaaagaagatatataaacagccaacaactgtatgaaaaaatgctcaacatcactcttcattaggcagatgcgaattaaaaccacaatgagataccaccttactcctacaagaatggccataattaaaaagtcaaa

SEQ ID NO: 15020 - DNA, 1043 bp, Homo sapiens
tcttttggtgagtttatgtacgcagagcaaggggctggattgatgggtcataggctaggcatttgttcagttttggtatgcatattgccaaatggtttttcaggtgttgcctttttattcatctttggatttctacacacacactcacatttcttaccctcttgtctctttttaccctaagaaaatactttgcacatagtgagtacctgacaaaggatgtaacaaagagtgtacatatatacacacgtatacatgtttgtaaatgcatgcgtgtatgtatacacatatataaataaatccccgtgttgtgtataatagctcaaatataacaacaaccctagcaagtcaacaatcaaacaggctatgctggggctgaaaggtgtgaagttggtgggggaatggctggggacttccattcccatctgagatttggctcatctacaggtgaatttcagttgcctttggtctgaattctggaagttgctccaacttacgtcttgtggtagttgacaaaatagaagcaagcctttgtaagaaaagggtgttactgaagaaagaggtcatccttcttcatggagaatgggggagagatgagcctgttagagtgcttggtgcagagaacaagacttttggagagaggatcgtccagtacaactgccaggctaagggtcttagatgcaatattgattttcttagatcatttagttttcaacaaactcccttttcctgcacactttttcctcattcaacctttagaaaggacttgggctgcgcatgatacgggcacagctcttctgtgaactgtctcacaagactggaacaactttcagaatttctataaaagaaaacattacagtattggggaattttttttaatcacaggaggactctaaaatgtgtactgccattttctttaatcttgattgacttcatgggaaaatttgatgccactaagaaatatataatttcccacagatgttatatctctgctattaaatgttgatgtcccagaaccccgtgtgctcgtggaagggtctagaatc

SEQ ID NO: 15021 - DNA, 1043 bp, Homo sapiens
ggcaatgttagcagagtggcagcccatgctttggcttagtatggcattctgcatcaatgcatgtgcacgcacatgctcacatgtgtgcacactcttacagggaagttaatagagatctacagccctcgttaccatttgctttcataaataaatatattaaattgggaagccagatttatttctggcaacagcttgcaggcgacacctccccctcttattcacagttcctgaagcgagcccagcctctcccaccccacccccaggcgtgactttctctcttaaaattctatttttaatttgttgtgatgaatgagtgacacctctgacagccgattcgcggagattaatagaaacgacacaatatttacgtcggcgctacgaacaattatcctgccatctatctctgagattatcttcctgattgaaaactactcatccgtgtaatcggaattatttggaattagaagggaatttatagcccccctagagcacgctctctcccctcgagtctacacctcggtctccatctttctcttgtctctcctctgggcctctggctttctcttccatcctggtgatgggcagagaaaaatctttttctcctggagggggccactggtcactcaggacagtgggcatctctttagggtggcctgggactccatgatatggatctagaagtagtggtttgtgggaaggaggatcttcgtggtgtcataagaattaggggtcagcgaggccagctcctgagctcaagatagatgaatatgatctgaagaaaagggtttaatacaaaggtggagaagaaaggtgactttggaaagcacttggtgtcagacggtgacaactgtaagaaatctaaaggagcaggatgggattgcaatgatggtgttaaggttgctctatttctgttatgactgtcttagttggctcaggctgccataacaaatactatagactagggggcttaaatacatttctctacagtgctggaggctgggagtcggagatcagagtgctaacttcgttggattctggggagg

SEQ ID NO: 15022 - DNA, 1029 bp, Homo sapiens
gaatgataaaaaaaaccttgatttcctataataactctaagtagttgtgatgtattttcctttttatataactctgggtttgattggcctatatttcatttttatacaactctaggtttgattggctagcatttatatttgtgagggatatggacctatatttttccttttctataatttccttatcatattttatatctgattatgctgaccagattatattccccacaaataacaagctgggaagtgttctctctttttccattctctggaagtttgggtacaataggtgccatttttttccctaaatgtttggaagcattcgccaatgaagccatctgagatgtaaattacagatttaaatattttaatatataaagataactattcatattttctgttttttcatatgtccattttaagatttttaaagaaatttgttcatttcattaatatttttaactatacccacacaaagttatgatagtctcttatcttttttttaagtttgtaggctctgcaaccgtgtttctcttttcattcctgtttattagtcttttctgagaaccgattttcagcttgttgttttcctcttatatacatttattttctatttaaataatttctactctaatatccattatttccttttcttccctttcaatatattgaatatatcaatatatattcaatataattgaatataatattcaatataattgaatataatattcaatataattgaatataatattcaatataattgaatattatattcaatgtaattgaatattatattcaatattcttttagacttatccatatataggcccttttcatttttcataattatttcctgtatttttatgttcacatatgggatcatttttgtcttgcctgagaagagctatctttagtgttccttttaatgtgggtccagccacaatggaatatttatttttgtttctctgaaaatgtaattacgttacttttacttttgaagtatattttcactgagtattccaggtt

SEQ ID NO: 15023 - DNA, 1035 bp, Homo sapiens
tgggaggtcccttagtccccctgagtcggggaccaggaccatcagcttctgggggactctatcaatgcccccaatccacacacaagtgccgcaggcagcctttaaaaatgtgcatatgtgcctatgtgtaggtgccaccgttcatctaaggccagggcccttcttgccccacccccgccccacacacctcccagggctcacacccacctccactgtcctcttgtccttccactgcccttgagtcccatgcaccagctatgcggcaacaccctgttttcctgaatgagggccaggctgggctgcatccctgtgtcctggctcacacagacccttcatgactctgctagattctccccttctcagagaagcctcctcatgcctcctcttgcagacatcatctcccctgctctggtccacgcatgcactctgtgccccgtctgcagtagcccctgagtcccagttatgcactgctgtgtctgtcttccctccaggactgagatctcttgaggcaggaactatgttgcaaatattcaaaggaatgcccccaagagctgtgtgtgtttgatctctggtgcacagagtagttgctcaatacggttttgtggagtccagttcaaaagagagcaggggctgaaaaaccaggttgtgaagggagctgaatgtcagcatggttatgggagtgggagggtaagagaagggaaggggcttggcagccagtattttatggtatttaggaaaaagcaattgggtacccgtttggccaccacacaccagtaactccagtgtcaaattggatcacattctgggaaaggggtcactcgagaacttgtcttcccagggcccaggagagaacaaggagaagtgggaggttcccagccctagaataaataaataatcgagtcaatctcaggtttaactccctttgaccttatgtccccaacactgctaccaggcagtcccagggccagcaggttctctctgtgtgccagttccccattcccgtccctctgcagggagctgggaggttccgtgaat

SEQ ID NO: 15024 - DNA, 1031 bp, Homo sapiens
gaggcagacaaaatagccaagatcgtgaacacatttagtgtattaaacaggcaagtgccgtagagaactagtaaaggaaggaagccagggcgatctccaccgcccttcactatccctgcaggaggtgagggagagagccagccctgtacaatcccagagaagagattcaagcagagggtacatgtagcaagtgcaaaggccctgaggtaggaacggactaggggtgttcaaggcacagccaggccagtggctggcgtggcgtggatgaggagaagcatagaaggagatgcagagagagtgaatctaggcatggacaacttgggatgctgctgattaaaggtgccagtgagagacagaagtcacttgcagtggccgagactctcctggggctgaggcatcctgtcccatgatgtgggaaggcagatctgacatctaacttggcagaggtagaggactttccccttggagctgccgtgggtgttgcaggatgcaatagaggtgttaggtaggaaggtaggaagcattcgtggtggtaggtgctcctgtttgttcaactcctgcctccagatcaagggaatttcagaaaaagacgggtccactcatacatcgtgacttcctctcaccttgtatggtgctgtaggtggaatccatagaaccttctagaaaatgagcaatgggtaggtgtgtgtgggcgggggctggatggggaagggcgggtgcttgactgttcacctgaagcttcatcagcaagctttcaccttggaaataatctttctctttgctccagcaaagggcttctcaaaactgtggttcccacagttgtcctaggaaggaggctttggtcgattaccaacttttctaggaactcatgagatcctggtccttgttctgagggggactgtgctgagagcacaccctctatgaacactgcctcctttgcccaatcctactcctactgccacggcctcaggtaggagtccctgacacggtgtagggttttgtgtggacacaagctccggggctgcagctgt

SEQ ID NO: 15025 - DNA, 1724 bp, Homo sapiens
cccccaaactccattgtatcattcttatgcctttgcatcctcatagcttagatcccacatatcagtgagaacatatgatgtttggttttccattcctgagttacttcgcttggaataatagtctccaggctgggcgtggtggctcatgcctgcaatcccagcactttgggaggctgagacaggtggatcacctgaggtcaggagttcaagaccagcctggccaacatggcaaaaccctgtctctactaaaaattcaaaaaattagccaggcatggtggtgggcacctgtagtcccacttacttgggaagctgaggcaggagaatggtgtgaacctaggaggcggaagttgcagtgagctgagacggtgccactgcactccagcctgggtgacagagactccatctcaaaaaaaaaaaaaaagaataatagtgtccaatctcatccaggtcactgcaaatgatgttaattcattcctttttatggctgagtagtattccatcatatatatactacagttcctttatctactcgttgattgatgggcatttgggttggttccatgattttgctattgtgctactataaacatgaatgtgcaagtatctttttcaaataatgacttctaagacttgaaactataaaaattctagcggatactttggaaaaacccttctagacattcgcttaggtaaagatttcatgacgaaaaacccaaaagcaaatgcaatagaaacaaagataaatagctgggacctaactaaactaaagagcttttgcacagtaaaaggaacagtcagcagagtaaacagacaacccacagagtgggagaaaatcttcacaatctattcatctgacaaaggactaatatccagaatctacaacgaactcaaacaaaccagtaagaaaaaaacaaacaatcccatcaaaaaagtgggctaaggacatgaatagacaattctcaaaagaagatacacaaatggccaacaaacatgaaaaaatgctcaacatcactaaagatcagggaaatgcaaatcaaaaccacaatgcgatactataccttactcctgcaagaatggccgtaatcaaaaaatcaaaaaacagtagatgttggcatggatgctgtgatcaggaacacttccacactgctggtgggaatgtacactagtacagccactatggaaaacagtgtggagattcgtgaaagaactaaaagtagaaccaccaatttgatccagcagtcccactactgggtatccacccagaggaaaagtgttgtgcttttcaacacttgccctggctgctctgtagaggaggagttgcagagtagcttgaataagatcagagagacccaattaataaagccaagacttgaattcagaccttccgggctctgtctcacgtttgttttttaggtaggtactgtgtgccaggctgtgtgtcttgctttcccagggctgctgtcacaaattgccacacaccaggtagcttcaaacaacagaaatggattcttttgcagttctggaggccagaagtccaaaatcaaggtgctggcagggccatttgaggaaggatctgtccatgcctctctcctggtatccggtggttgccggaaacgcttggtgtttcttggcctgtagacatatcattagggcccgctttaatctcacatgacctcatcttgattacacaggcaaagatcctatttgtaaataagcccgcattc

SEQ ID NO: 15026 - DNA, 1036 bp, Homo sapiens
tggcggttggacattcccccccacccccctttaactgcgagaaggcaggccttagggctctaacacccagtactcctactgctcaggaggtggggacctcgcgcgctgagcgtctcattccatgaagtctctctgtctcaccccctccccccaccccagcttgattctgtcactttaagtccagcccctgagagatagccaataggagccaaactatacatcagtctcccagccttaaagctacagtagggttagtgggctccaagtctcttgtgccccagcctcctccacggcttcgcatcccctctgcccgctctctccggagcgtgcggatgagtggagagctgggctgtgcgcgcacggctctctgcctccctctcccccgccgcggccgcctcctcccactctgcgttctcgcgctcactgtgccctgcccgggctcgcaccttgcccgtgcccttcactcgctcttccgcgtgatttccccgccgtctttctctaccaactgggaatgctaaaacgggactgatggacgtgtccgaactctgcatcccggaccccctcggctaccacaaccagtaggtgccctgcttctcggtctgtctgtccttctgcccgtctggcagtctctgtcctggggatcgcagttccttttctgcacattcttgtgtaaaagtggaagggacttcgggggggcacttgggggacgaaggaggggaaaagccgcacacttctgggtttctttctagggcataaaccctcctctaactttttcccgcacccccttttacaaatccacactttcaggcaagagtggcgctttctcatgcactttctccctttctctctcctctctgatcttgctccggggtgagaaaatatttgagtttttgtggaatggagcaagaagggaggcagaagcccagaacaggtgcagggatgtggttgcaaggatgtcctgtcccgtcagagaaagcctttcccgcgggcgctttgttttattatttccatcctggggaccaaaaatgatcccggc

SEQ ID NO: 15027 - DNA, 1008 bp, Homo sapiens
tctttgattatgcttaccaggaaagcaaggagtgagatggaggctttaacagctgggtaattcatcgagttgacggcagccctgactggagtttgaggagaaatatgggcaaaaaggcaatgtcagggaagcagcagaaggaagtcagggagctgaggtcctgggggtctgggaaaggtttgagatagaaatcatttataaactaagcctgacagaggtttagatccccaaccctttccggtttttttttgcaaagaattagcttgtccctccatggggcacaggaaaagccaaaaatatacctgctgtctccaccgaggaattgagcacccctgtcagatgtcatttctcaaagcccaggacccactgggcagcagcccaggcattgatgagctggcctcttatacatatatgtgccgcctagggagggtctgcatgtgctgtggcgcagaggggcatcatttcaaggacgagcttgtggaggtctggggctggtgtctggggagacatctttctgacctctaccccatggctttgtgacacagctttagagccatgggtagtaaagtaacagagcaggggactggattctttggtttggtagaaggatagtaggacaaagccattcattatagtgccggcatttcccagggaacatacagtaagtgggttcgtgtatgctctgctcactgttttgacccctgtggattggctgacattcccagacttgagaaaacccaagggcacagggactagagttgagggaggaggaactctctggtcctcccttttgcttctaacacatagagagcatttgttaatgctgtagaatcattctcactttcccaggtgagaaatgaacacacacagagagaaacatacgtaccttcctaccttgctctccttcattttcattttcctgtagccaatcctgtaggtgactccattacccattctaatcaatattttatgtacatatataatcacccagagtgggaggcagcgtgc

SEQ ID NO: 15028 - DNA, 1048 bp, Homo sapiens
ggtaacatcttaaaaaactacagtacaatatcacaaccaggatattgacattgatacagtcaattgacattgatatggtcaagatgcagaaaatctttaagagtgaagtgggtttttttttttattaattttttttttagatggagtctcactctgttgcccaggctggagtgaaatggtgtgatctcaactcaagatctccgtctgcacagggtcatgtattccagggattatcaatttttttctattcatggagcactcagaaatattaaaattttgacctgtacacattaagggattaaacggtgttaatggtggttaaaacaaaggatctgtatttattgcagtatttggaaatatgtgacactttacatttgagcattattaatgcttttttgcattcagaaaattatcaataagatgataaaatctaataatcctagacagtaattgtaagttaattagtattttaatgtgtttcctgagtctacttttagatattttactaatgtaaggacacaaacaataaggcaactctcatttcaagttcaagtcttcttgtttatttccagttagtgtttgtaagtcttaagcatcctaattttaaaagtaattgcccattgtatcagtcagtgaaaattgctttctgctgcaagttacggagaacctgatagctagcagcgtaagcatggataaatgaagttggtttttccaccttacaagaagcctggagatgcgcagctgctgtattgcacaaagttctcagccatggcggcaggggcgctccagctctttctttcttctctggtgttctttggtgtcctcagacagccatgtcatggctgcaaggtcgttgccacacctgtaggcttcaccttccaggctggggcaagagaaaggcaaaagagctgcactgaacatggctgtcccttttctcagaaaagcaaaaccgttccagaagtcctgccatggacttaacctgacatcccattgccgtggtggcacgcacctgtggtcccagctactcgagaggctgaggcatgagaat

SEQ ID NO: 15029 - DNA, 1045 bp, Homo sapiens
gcccactttgtgcagggagttggccgcaggcggggaatgtgcgcgtcggcgcgcgccccctccccgctcccggccagctgcgagtcttggctcccggacttgtctcgtcgcgtcggagaaatcgccccccagcgccgctctcccgcccgggggtcttggttccgagctcgcgcggccgggagtcgcctcggtcttccttggggcgcgcgcagatgtgagcgtgcgagagttgtgtaggggattttgttccctccgaaactgagacccagggcgcccagtgggcacccgtgccttgactctgtcctttctgcagccgctggtccgagctgtctggcctcagtttccctccgacttttctccgctctgccagccctcactgctgcccgtcattgttctcgcagttagatgggggtgctttgtgacggctgccaagttggggtgtgttctctttattccgtttttcaaacagaacaaggcctccaaggctgaccccagacaacccaccccctcggaccctaattcaccttattgcactgattttttttatcaagtcgtattttattgtacaggagccacgccctgatttcttaaaggcgccttgcactctggccatgtgttatctctgcagccggtgtgtgggaggcctcttgtgagccagttgttttcccgcctccaccacccccctcgaagatttagggatgccaggggggaagaaggtggctgggggtggcagcagcggtgccactccaacgtccgctgcggccaccgccccctctggggtcaggcgtttggagaccagcgaaggaacctcagcccagagagatgaggagccagaagaggaaggggaagaggacctgcgagacggaggcgtccccttctttgtcaaccggggtgggctacctgtggatgaggccacctgggaaaggatgtggaaacacgtggccaagatccaccccgatggagagaaggtggcgcaacggatccgtggggccacagacctgcccaaggtgagacacacgggtcaggggggtgatagcacagtcta

SEQ ID NO: 15030 - DNA, 1050 bp, Homo sapiens
acacagactttggggtcaggttgacctggacttgaatcgtggctgggctgctgactcactgtgtgacccccaaggaagttccttaacatctctgagcctgggagtcctcctctgcaaagggggatagtggcagtgtgtagagttgttaggacaatgggccgagccggtgccgtgagacgcagcacagtgctggacatggtgtctgctacacgcttctatccattcatgtccttctacccatttgttcgagaactttcactgagtaactgttgtgtgcccggcttgatgctgggccctgaagaacatgacagacaagggccctgtgcttgggaggtttgcattctagtggaggagacaaaataagcaagtaaggaaaaagaagcagtaaacactggtcatggtgagagtgccgtggaggaggtggacggtggcgcaggctcagcttcagtcctgagcagcagccaactttggcaggcaggggaaaaggccggtgtgagaaactcaggtgggaggccccgggggctggagaggtgagcaggtggggcagaggtgtaggaagtgggagtgggcctggggctggctgggggcacctcccaggcctcagtagtacacgtgattgtatttgaagggccacaggcagggttgcatgtggatatggggagaggacagggtgagggtaagagaagagtgaagccgcgtctgtggcctgtgtgtgtgccaaggtgcgggatggagggcgagggagtgaggcaggggagggaaggcttctcttccgtccttgggccactgggctctggaaagccctgcagtgtggcaccagccctgctggacttcagagcggtggccacaaatccctggaagccccgtgcctattcgaggttccctttattgagctccagctggataccaggctcaatgctagatggcaggaataccaggaggagacgccaggcgtatggagatgagcaggactggtgtctgcaccccaaggctggcggtgcgtggaccccgtggctcccggtcccagtccctcccggtgtgctggccccg

SEQ ID NO: 15031 - DNA, 1055 bp, Homo sapiens
ccgcggctggcggcgctcacgttggctgcagggcgctcgcgcggcgcctcggcccgggtcgcatcccttcccgctcgtgctcacgctcgcccggaatgtggggttgtgattgttactctacgttccggaggcgcgtctcggcgctcctgctccggctgcggctcgcgctgtccccggcttggccgcgcgggatgccgcccgggcggagcgctgacgtcaccgccatgctctgcaccagttcttccccctcccctttacacttcctctgtggagcccacttgttgctcaggcaaggcgcatgcgcggcaggacgcccagattcctcccagccggcccctcctccgcgcctccgccctcccctcccccctcgccgtgtgtgtacaacagctgaggcccggcgagctaatgctggaagtccagagctgggggtggaaattaaacagacgatgacctttcctttccctgccgggcattcccaagtaaaaacgcatttaagaaccactagcgtcgtttccgatccctgctccccaccccacccccaagcctcggcagtgaatttaaatgtcctgtttcaggatttttcgccgtgaatttcgtataaggtattaaccatttcatctgcggttgaaccttatcccccccggcatggatgttaaattcatcgccaccactgatgccgaagcacctgcaaaattagctgttttccaatcttccagaaattgtcttttctatttgtttttgtgccctgatctaggaacccgggcttcaacgatagagctaaatgaattcagagtgcgctacccttccccccagccgcactttaaaaattttggctgaacgtctgaagaagatacgagcaccccgaggcctttaaggaaaacaggcaactggctgcgcacagctgcagttcagggcagggagggggaggggccggagaggccaaacaggtgagtgttttttctagagtttgatttttaaaaggtggaggcagcatttaataatactgatacatttttgtaaagcacagccgcagttttcaaagttctttctcaggc

SEQ ID NO: 15032 - DNA, 1035 bp, Homo sapiens
tccgtttgactgctggttcatagctctgtttctgctttgcaggacggagagagatgcttcaaattggtccacggataagctgaaaacactgttcctggcagtgcaggttcaaaatgaagaaggcaagtgtgaggtgacggaagtgagtaagcttgatggagaggcatccattaacaatcgcaaagggaaacttatcttcttttatgaatggagcgtcaaactaaactggacaggtaagtctaagctgggctgtcagagagattaactgtgttttgtttaacctgttaagtagctggagagaacagttttgaggagttacagaccttgaagggagaaggcagatgttgctgctttggagtcctatgtaaagcagtatcgagtcctggaatttctttgccattgtgggatgctaaatggatttcctgtgtctgggtctcataagtcccatccatgaagtggccgggccactgcatctttgggccttggtctttgttgggacacctacgatgatatttcttcagactagctacatgtatcttgtgagtgatttaaaaggaggaaggagaggatttttttggtcttgatctttgtgcactgtcttcagtgtgaatcttaacagattaaaccactgcgctaatgaagcttgtgtgtgacagtaatttggggctgttttatctatcttctagttttatgtcccttgtgtatgacattaggaaaaaattgaggtcatgcgtatgaccgttttggacagtcctgactgtcgggagcctgaatgtaaaaaggcactaaagctaagggagtatgagatagctactgtctgtgtatggggcaaagcatgaaatttgtgctttgataaacatttccgaagtgaacagtcatatcataaagaagggtgcaagtagatctatctgtccatgatttttgttaatttgtttttaaagtacactcgaagcatagtagtgtggaaggaatcttcggtgtcatcttgctcagacctcctttttttttttttagacagagttttgctcgtcaccc

SEQ ID NO: 15033 - DNA, 1050 bp, Homo sapiens
ccgcccacctcggcctcccaaagtgctgggattacaggcgtgagccacagcgcctggccagcagtctgcttttcaggtcaggcaagctggggctgaaatcttggcttacccaccatgtgatcctgggccaaactgatttactattttattttaaattttagttttaatgagacagggccttgctatgttgcagggtggtgttgaactcctggcctcaagcaatcctcttgcctcagcttgccaaaatgctggcattacaggcctgagccactgcccctggtctgatttacaatttttaattgagggttagggagtcataataccaacaaagatggtaaaaggaatttgaggagaaaacgaaagaacaagggacaaataaaaactgcctgggttattcattattcatactgactccctaataaagtgattttcagtttgaatgtttttgcagacattgcctttcctcccttacagtgcttatttttttaaggtccaggttcacactagaaggccaaaacttccgcaaacatctgatgatgaaaagaaagatttttgagactgcagcctattaataaagttaacataactgagaattttgtctaaatgtttttatttgaaacaaatagttgcaccaagcaagaggttactttgcccactccaaattaaaacagagcacaataggggcaaaatttatttggcaggacagttccagtatgtgaacatcttcctcctcactgtggttggggtaactttactcatatgcagctgttcttacacaaaacattaaccccaaactactagtgtcacataaaagtaagtggtcttgactttgtatgtggggcagcatgttctataaatgctgaaaggtgggagaagcacaaacacaacccactctttaaaaaaaactaaataattcaaagtagaattttctatcccccccatttctccagtaataaaaagtagtgctgggatctggcacccagatttggtttttatcctgaccatttacaaagtgttcccccatatgacttgcatcattagggttatggg

SEQ ID NO: 15034 - DNA, 1105 bp, Homo sapiens
tttgagatggagtcttgctctgtcatctagactgaagtgcaatggtgcgatcttggctcactgcaacctctgacccccgggtttaagcgattcccctgcctcagcctcccgagtagctgggattacaggtgcctgccacctcatccggctacaggggaatcaactaattttttgtatttttagtagagacagggtttcaccatgttggtcaggctggtctcgaactcctgaccttgtgatccacctgccttggcctcccaaagtgagccgccgtgcctggcctacctcttgtttttaataaggacaactgtcattggatttagggtccacctgggcaatccaggatgatctcatcttaaaaattcttttttttttttttttgagacagtctggctctgttgcctaggctggagtagagtggtacaatctcttctgcctcctgggttcaagtgattctcctgcctcagcctcccaagtagttgggattacaggcatgcatcatcatgcctggctaatttttgtatttttttgtagagacagggtttcgctgtgctggccaggctggtcttcaactcctgggctcaagtgatctgcctgcctcagcctaccaaagtgctgagattataggcgtgagccaccatgcccagcttcatcttaaaaattcttaattatatctgcaaagacccttttttctgaataaggttacagtcacagattccaggggtagaacatggacatattgttttgggggccaccattcaacccactacaggaacttagaattaatgccaaatggtgcagctcctcaggctgtgcctgtaaccactctactccccggctcactaatctggactggatgagctcccagggttcctccaggccagtggtccatacagcatggggttctgtgttgtatcagggcatcagagccatctgtcaagcctcgagacatcagtgtttttttctctacctctctcccatcccctcagccctctgcaatttttcctgaaaccctttgggctgttcatcttggactcagaaaattcccatgtattaacatgttgacaaagttaggctgcaggtgctgtgaggacagactcatact

SEQ ID NO: 15035 - DNA, 1088 bp, Homo sapiens
agcagctattttctaccaaattaaaatccactcagctctcttcctgtccctgaataaaactactctcaaagctcttgcctgttacagcaagactttttaatagacttttccctgtagaaccgtgagacatatgtccaattagccgaataacttcacttaaatatacaaataaactgttgactgataacagcaagacatatgtgaagctaatttaaggcaaggtggttcaggaactggggtgctgtccctcccacagccccaatctgtctttaagcttctcttccctccaatctattattattatttttgagacagggtgtcactcttgtcgctcagggtggagtgcagtggtgcaatcatggctcactgcagcctggacttcccaggctcaggtggttctcccacttcagcctcccaggtacctgggaatacaggcacgtgctgccatgcctggctaattttttgtatttgtagtaaagatggggtttcaccatgttgcctaggctggtctcgaactcctgggctcaagctatccacctgccttggcctaccaagctgctgggattacactcgtgagccactgcacctgctcccgctccagttttttgcttatggaaaagatctttaccccctaacccccaacatgttatgggatgaagggggatgtctctctgctgtgcctggccacagtgcagactatctaagccactattcattcagccaattgttcagtgatatttattgaatgcctactatgttccaggcactgtgtggggtgctgggtgtacaatggtctgttcttgggaggacaagaggtaattcacaatgatgggactcaaaagcacatccgctccaggaggataggggacttgtttgtattgcttgctgctgtgtctgcagcactaagaacagtgcttgccacacacagagtggtctcagtgtacacttttcaggaaatcactgtgggtctaagtaaacaaggtcatttcagctcttgctgagtgccctaaaggagataaaatgtagtcatgggataaagaggggctgagggagagtctgggaagggctctctcgcatgatgtttttca

SEQ ID NO: 15036 - DNA, 1035 bp, Homo sapiens
tgttgagactgggtcttgctctgtcacctaggctggagtgcagtggcacaatctcagctccttgcaacctccatctcccgggttcaaacagttttcctgccccagcctcctgagtagctgggactacaggcacatgcatcaccacacccggctcatttttgtatttttagtagagatgaggtttcaccatgttgaccaggttggtctcgagttcctggcctcaagtgatctgcccacctcggcctctcaaagtgctgggattacaggcatgagccaccgcacctggccaaaatgttcctttttaaattgctttatctttctagattcttggtggacacagacacaaaatcatcccctgctcactccctctgcagtatccctcagagttgcctgtcagaaatacctgcttctctttcttttccatggtatgctctggaatcatttgggtttgaagtgctcctggaatttgcaatttcataatgaaaagtcccacagtactaataaccaggtgtgagatggtgctggatctgtaactacctgtggctctggggcagcttttgctatcgtacttcacactccagaagttcattttggtttgggtgtgtgatgcagctctggaggcttggctgtggttccccaagaaccagctgccacatggggcctctcttggccattttgcttagttgctcctctgaccagaacatcactatagtatctccttccgaccatctctgctcccctaagccagtgtatcttctcccacctaccctgaacctcgttcttagactggacttcaatagccagctggtgccacccccgtcttctcacagctgcctctcctataggcttagaaagcagggcctagtcaaagcctagacccaaagctatgctatggtcctctccccatcttaatccagccatgcaggaccctgggtaacagttccctttgggtgaccctgagggggacccagggaagccttgagaagcagtcggagtccatgactgtcctggaagccaggcctggtgtgatggggc

SEQ ID NO: 15037 - DNA, 1024 bp, Homo sapiens
agtctctctgtggggcaaagtggctcacgcctgtaatcccagcactttgggaggctgaggtgggtggatgacctgagatcaggagttggaaactagcctggccaacatagtgaaaccccgtctttactaaaaatacaaaaaattagccaggtgtggtggcaggcacccgtaatcccagctactcgggaggctgaggcaggagaatcacttgaacccaagaggcgtaggttgcagtaagtccagatcgtgccattgaaaaaaaaaaaaaaaaagaaacaaagaaaagaaaagaaaaagaaaaaaatttctagtctctctgatctccatttaacatgttcagtctacaagtattttggtggtacctaaacttattcaggcagtatgtctgtggtctataaatgtacataccccacctttgctgtagttgatgcctctgctgctgaaatttgtttcttttctaagtgttgcatccctctttgaaacagcaggggctcacctggcaaaacagtcctgtaagcagtagtggagaaacttggctgctcactgttcctgttttgagtaaattacccttcttaattgaacattatatgatttggcttcccaaatttgtgttcttcttttcaaaaatctaacagtaatagagtgtatttagttaggttcaaaatcatattttttaaaaagaaatgcaggaaaaaattcaaaggatgtttaatgagaatatgatagactttgaaatggaagatatcaccaggaaattctccatttcttaggactatataagtgacactgacttcacacagtggttttaaggttgagtgtactgttacaggaatatgtaagctgcttaaaacatttcacaactcatggtcagacaatgttcctttgagaggaaaattcactggcgtttctcaaaaacctgactgcttaaaatccaagtgacccaatgctggccttgcttatttctagggaaagttgccttagcaacctactagcattaagttgcttaaaggaatgtgtgtttaac

SEQ ID NO: 15038 - DNA, 1034 bp, Homo sapiens
gctaacatatgactaaaataggaactggcagctgggggtgatgagagaaatgaaggcagtcagctacacactgactgccggggagcatcctgcacctcagataagggagcttccgcaatgaatgcctgggcctttggctttgtttcaagtcttttgatctagcggagtccataggatcatttttcccgtgggccagacctctggagaagcaattggcattgttagtttgcactgttagttctgaagctagtttggtaacaaaaagttattgtagtaagtgcacttgtgtgtgtatgtgaggggtgtggatagatgatcatgttcaagtctgtagtagaaaatttctaattattgagtctagagaactaagaatacttataggaggtaattaatccttacccgacatgtggaaaatgtcttataacccttctgtttaatttaacaaaaatatagtctactgttcagatggttaccactcggagcaactcaaactatttccctacagattttcctgtagagaatgaatgagaaatttttttgtttgtttaaggcctgaaattttactaccaaagtcaaattttgagtattgattgttgagtcctgaggatggttatattatcatgacaaatcttgcttattgtttttaattagacaaaattttcaaataactgtgagttattacatatctcttttattatagtgttctatagattgtattttgtttcattacccacactacacacacaaaccacatatacacatgcacaacacacacacattctttctatacttcatgtgaatgctttgagacaatcctatttaacattgacaatgaacaggacagctggtctctcaataaaatctaagataccacagtagtatctgcaaataatatataaattagaaatatttggaatgtttagtttatttgctaaagctcttcagaactataaattacaatattaatgaacttatttttaattcccatcactttcatttttatagaatccagaaataatgcatgtaacttgcca

SEQ ID NO: 15039 - DNA, 1035 bp, Homo sapiens
aatgcttcctgcttaatccctgatggatgggggagagggtgaaaggaataaaagcagtccagtatcttaaaagctgttcataggctcatagaaaaaaatcaatctctctctccatatgtgttatcattggccttgctagtgttgctgaagggtttgttgtgtttctgttaggaatttcaaagatttctaaattgatgttaaccacttgccttgagccaatatagaatctacaagtttgctgccagcaatgagcaggctctttaatggtcatttttaaagccacagctatgtaaccaaaccggagattcttgctgtgcgcctatcttttggtgtctttctttagttccaaattatgggttgcttcctatatgttttcaaaacagattaagcctttctttaatagcattgctccctcctgaaaactattattatcattggaaactgttatttagtaacgatatgtgttattatttcaggacagggtacagtatagcatttataagtatgggccttggagtcaactggctagagttgggatcttggtttcatcacctgtgagtctaaagaccttgaaatgtcctaagcattgaaatatttggtgcctctccccacatgtaattcaaaatacagtaacactgaaccataaaataagtgtaagaatttctaagagtttttatttttctcctctgatgatttctgtaatgctttcaaaatatattagattctttcttcccaaattctcattttgtactttctctgttttgttgttctttaagaagatgttcattcttctccctgagactgtttcctagtctagacaaccagggtaatgataatacctggttaatgtgaagattaagtgagttgaccacatgtataatgctgggacaattaagtcaatcctcaataaatgttagctgtgaggattaccaatcatttggctagcattttaaattaggacatatttttgagtacagatttcttcattttgaagatgaaataccctatcaattagacaaggtagatattttttat

SEQ ID NO: 15040 - DNA, 1705 bp, Homo sapiens
ggccttagcatattgctgttctgataaattgcaataaattttaaaaagctcttactttgagtttgcttgggaaaaaaatctcatacttgagagttttataagtagaaagagttgggaggaattttagttgggtttcattcttctaaactctatactggtatgttttttcattttgatacttttcagagcagtataaatggtgtcaaagtgggaactcgaaataaagtgaactattgatattcttcaactcattaacacacctctatgtcattttaaggagttttatatgttgctttcttcattaatatccatccattttaaaaaatttattaaatctgaaggacaacttccccaggactggagcattaccaatatgcttatatttcatactgagggaataatttagttgtgggaccataatccatcctcctaaaaacaaattaatagagataggaatttatctctcatgattttgttaaccagaaaatagaatattatgcccaatgaagatttataggaaatgatacgtttggtgactagaaatgatacgtttggtgactagtagttcatttttacaagtatgcaatgaatccaagtctcttaactgaaatttaatttcagctaatttaattatcagacctggtttttaaatttagttttctgagtcacctcactgagtttttttggccatatttaattcttttcattctcattattttacttcgtagctttaaacattaatgcagtaggtatccgtaatttattctggtcatcacctgatttgagtgtttctttctgtcatcctcaattatatacccaagaagaccataatacttcttatcattgaaccaagatttcttcttcctcactatgaaggaatagagacttgattgttcaagttatcaaagattttcagctagacagtggaagagataaccataatgaaatgttacttgctaacgtcagtactgaggttttgttgtctattttttcctccccttcaattgctcaaggaagcctgttatgatgcctggtccattcagaccaggtaaggcaaacaaggaaaacgtatgagaataataatgtttcctccacccaacccactaggccggcagttaaccatcttcaacactcaggcgcaaatagccattggtggaaaggacaaaggacgcctcttccaaggccaactctctgggctctattatgatggtttgaaagtactgaacatggcggctgagaacaaccccaatattaaaatcaatggaagtgttcggctggttggagaagtcccatcaattttgggaacaacacagacgacctccatgccaccagaaatgtctactactgtcatggaaaccactactacaatggcgactaccacaacccgtaagaatcgctctacagccagcattcaggtaggcctttttccaagtattaattgcgtctgtatttttatctttgcaacattgttatcatggtcattgctttatgtagctaaagagtttgaattactatgtaagaaggatgctggcagatactcatagtaatgagacccaggagaagagaaaggtgaagtcattgctaaagaagtcataaaagtctgtggcactcctgggttgttattcttattgtatttatcactgaaatggtaaagctgttattcaaaacgagcaatggactacactttcagtatgaaatactctct

SEQ ID NO: 15041 - DNA, 1024 bp, Homo sapiens
catctgccaggccccagaattgtaagtccactgacagcctgcatcatgcgcctggaaaagccacaggcactcaatgcccacctgtgaaagcagctgaggggactgtacctggcaaagccacaggggtggagctgcccaagacctggtagctcaccccttgcatcagcatgtcctggatgtgagacatggagtcaaaggagattattttggaactttaagatttaatgagtgccctgctgggtttcagacttgcatgggacctgtggtccctttgttttggccaatgtctctcatttggaacaagaacatttccccgatgcctgttccctcattgtatcttgaaagtaactaacttgtttttgattttacaggctcataagtggaagggacttgccttgtcttagatgagaatttggacttggacttttaagttaatgctggaataagttaagactttgggggattgttgggaaggcatgattagttgtgaaatgtgaaaaggtatgagatttgagaggggctgaggtggaatgatatggtttggctctgtgtcagctcatctcgaattgtaatccccaacatgttgagggagggacctgataggagatgatgggatcatgggggcagtttccctcatgctgttctcatgatagtgagttctcatgacatctcatggtttaaaaagtgtttggcagtacctctcaaccacctccatataagatgtgccttgcttccccttctgctatgattgtaagtttcctgaggcttccccagccatgtggaactgtgagtcaattaaacctttatttctttataaattacccagtcttatgtagttccttatagcagtgtgaaaacagactaatacactatttttatgtctaaatgaactgagatcagatattaaagccaatctcacggggttaacaagaattcttgacagaaatttagttatgattaagcattaatgaggctttactttgacccacttccttggaactgaaagtcaggtaacgttagatac

SEQ ID NO: 15042 - DNA, 1034 bp, Homo sapiens
cttccttagcgaatttcacatctactggtgtttttggttttctttgattccttctactgtggctctttgaagtgattcaaaattaaacagtagctactttttcagggaaattcatcatgttgtgttcaggattccagaagagttaatgatgcagaaaaagttctgtaaaacatctttctaaaagaagtccttctcttgcaagcctcccacttactggcctcctgtaccatttgcagtgaattggaactccgttatttatttatttttcaaataccacctctaacttaatttaatgtaggatgtgttcctgcaaaagtgtgcagtgccatgtgccttgagtcacccaaacaaagcagtgtcattgttacatccggatctgttaatcagggaaggtcaaagaaaatattcttatataatttggaaagtcaaaaggacacgttgatgattctcaaacactggtcagttattctgctgatacttactaaggacatactttttctggcagtttaatggttaaagacctcagccatttttgaagcattcacaaagtaactctctggagctactaaccattagatgctcattagaactgagcagtttttccccccactttgttcccaggttacttttaagggaatgtgcaagaaacttggaaaaaggtcttctgttcccttcagttcacatgtcatactgttatatttcagttctctttattagagctttcaagacacagataaaagaatcttccatctgaaccccttaagaacctgagggcttttggatttcaacccactgaaaaaatatcaggtcccaaagtttatagatgatattaggcctcagaacaattgaaaccaccttcagcagggagcaaaagaacagtggctcctaaaattggttcacaaatatactgtccattgaagtcaacagaggtcatatggctgaatggaaaacattagacgcatatcagtcctgaaataggttcacatgctggtgtcactcttagccccagctgcctctacatgtcacgttcatca

SEQ ID NO: 15043 - DNA, 1340 bp, Homo sapiens
atcacataatatataatgtaatatatacatataattaatcaaattggacctgagagaagcaggcactagagtgtattttgtaagctgttaacatcttagtaagtagcttctgaaccaacattcaacccagcataaaacaaaaagaccttgttttgctactttaggaaatgtaagagagattaaaattctttgggaaatggttttaaaaagtagttttgtactcagataggtaaagaacaagtccagtggtgctgacagcaatggaatttaaaacttgattctaataatctctgagtcccgaaggaatgccacgcagacatccgtttgagtcacgagcttgtaactgaggatttgacaaagattgagtcctcactgtgtgccaggcaccatgctaaattttgtgctaggcacttgggatactctttcagacaagactttgtccctgctcacagagaaatctgataggttggcctatagtcactcttttctaaacttgacctatctacctgaattaaccgaaggagctggttagaaatacagattcctgggccaagaagaagaacctaaagtccaacttcctgtaaccatcaacacatttaaccctgtaagtttagagtttattgtaaccttctcatgccctttgctatactcagtgtgcaaatcatgaagactaaggtggatcctgttttggtggagattctgatgtgttaagtctgtgatgaaacctgggaatgtgagttcttgaaagctcccattattggaaatcactgagctagatagtttttagaattttttttctgaccggagaatcagtgctttttatagttgtctgacttgtagtcacttgtgactttctgaaagtttttctgtgtattttgccacatagaaaatattgctcaatttaactccatctgctagaaaagtaccttcagagaggctagatatcagggctggcttctctcttggtagcggcagtctcctgtctgttctccccaccatcagtgtcccctaaaccattgtactgtttttggtgtccccagaattaattttctaaaaaaaaaaaataaagaaatcacatcatattcctttagaaacctatatctttggataaagcccatcaaaacttgttatcatgccacgcaagatccgtgacaatctagatctcaaaccactcctcagacctcattgttcagcacccatcccctgtaccctcatgccaaacatggtgaggcatggccctcttgatactttgcctttcccatgctgtttaccatttacctagaacattatcgcatactctccatttggcaaactcttcctttaagaggcacgtggatgac

SEQ ID NO: 15044 - DNA, 1050 bp, Homo sapiens
actctccattttttccccttacccttttaccagcactgctaaatggattgatttgagattcacctctttttccctgtggaggtgataatggacaacggaatgaccagagggaagataatagcataaagtgtgtggcctctgagagggcctgggaaaaatggagaattgactgtgttattaataggtcagcttcactggttttcaaaatctatgtaattgctcaggcggtaagcttttattgggtgaaaaaatgatgagagatgggctcggaaaggcttgttccacattgatgaatggaaaataagcacagtatgtgcttgcaaatctttacactattgaattagatttttgaccatccctcgctttttgcactttctgtggttgcactcatctctacatgtatgaaagttgtgttttttgaattctagggttgtaattaagacccttcagttatttgtccatggtatttctctgtaaatattattaatactgtcgaaattatgtgatccattccttaattccttcacttccctttaagtagctagactgtggcttctgtcacttctgtgttcttttgtcaccatctgctcattatctgtcaagaggggactgtgaattatttctgccctgggccagtctaatggaatccttggtggggctgtttagggaagtaggtactacttaggtgtggtagcagttaggtgaatggctccacaggcagccagctccattaccacatgaaagcaccagcagcatttggcttcctggtgaattctgtggtgtttcttctgtctatggaagtgcaaatttagctgaattgggtagaaccgaaacgcttgccctctgcaatttgctcctgaaaaatgatcaggccctataaaggaaaccttaacataccaatgtctctgctgctagaaatggcttccttgtttgtctggactacatgcatccgtcaagaatcagcctatggcatggtgtccctcttccttccctccaagtgctgaactcacttgggttttccactggacttcagtgtcactgtgttttaga

SEQ ID NO: 15045 - DNA, 1049 bp, Homo sapiens
atggacacattccctcatttcttttctgtccttaagctttcttaccaattgaaactggtctcaagataagttgaagactctttcccgctacagggaatatgactaataccaatgcttagtgttagttttctgacagtttttacactttaaagctatgagtaaaaccttggactaaatgcaggcatctgagaaagtaagtaacaatgccgtggaaggaaaggcatcacttgtttacacacctggtcaccttctttagtccatgggactcactcatgtttccaagagaatatttcatttccacacagacatagacatttctgacagttaaatccaaagtaactcaaatgctacataacatttttacattgttttgtgtgtttcttgggtgtgtggcatttggcatcaagaagacccgtgtttcaatgcaatctctgccacattttggctgtgaagaccaaatgcaggttatttgacttttgggaaactcagtctcctcctctgagaattgaggtttgtaataccaactcatgaactcattctaaggatcagatgagataatagatcagaaagagtaggtgggtctataatgttagttacttgaagctggttcccaaatctcctcctaacccacctttctttctttcttttttttttttttgaatctagactcaagatatattaaagactatgctcatggacatcaattctttcctgtcctttagggcagtattcaggccacacggttcaataacgggaaagaatgtcgtcacatgattgcatcatgttcttcaaaatgaaatctattgaacagtataaacaacaaagaacatcatttgtcagaatgacctgggggaaatagtccagtgaaactaagcaaagggaactttataccgtgagggaaaatcaatggattgtaacagaaccctgcaagaagagacatagctttcaagttccagagacctagaggtgactgagaagcaggatgtaccagaaactgggcttcttgttctacttatctagcgcccttttcacagtgttgtatatgtaaa

SEQ ID NO: 15046 - DNA, 1029 bp, Homo sapiens
gaggtggtgtttgggcttcaaatccagttcctgcttttttgttgttgttgttgttctttttctctttgttttcatgaacttcttcagggactcaatggcctgatcctgcactcttcgccccacaattaatgaggccacttcactatggagcccaaccttggctgctctctctccctatttctgggatctttacctttcttctctcacctacttaacttttggaaacccagttttactacgtgtaacctggagatgccattacggacttcagaagttaacatatgtggtatgtaaatcatctagcacagtgcctggtgtatatcagccgcctctctctgcctctcactcattccgtctgtctcctcttttccctcgtctcccttctcttaaggatttgcctgccaatctatcttttattttagaaatcccaacggtggtactgatggatcagtaaaccctttcatgatacatagtagcagtttcctagtgactgcaactcttcactgaaacaaagacttcacaggtggtggatttttaggctttgtgacaaactcgtgagggctctttggggacaaaggaggacattttagccactccagattaccatttttgcctttgagcattgttctttaatttctcctagaaagaaaagaggaatctgcctgaagcagctctgccatccgccgacacccttggcagttgaacactgattgtcaagcccaccgtgggcaatgcaggtttccttttgccagcctggcatggagtgaaggggaagtttgtgctcctctggttgcctcagctgaccaggaaaccgtaccaggagcagcagggagggcagagtctagtggagtcctctgtgctgggactgtgggaccaggacagggcaaggacagcaggaaggaaagaccaactcatgcagcaaacaccacccacactggatgcattcaactcagtccttagagataaatgttagagacaaaggcaccattaggaaccaggacactggacgtgtactttagagttctcata

SEQ ID NO: 15047 - DNA, 1050 bp, Homo sapiens
aagtgtctcatgatgtggtgtgtcaaagctctcagtggctcttgtttctcactacggtgacctaaaccatttgtcaagagataccattgttttgcattcagtgaaatagaaaggtgaacatgtgtgtatgtgttttggaaggatgggatagtgccagtttactagcaatttcctgtaatctgcaaccagtcttacctatgcaaccccaaatattttggggtccagagccttgagaacgatcactattattatctgacagctgcataggggtgagacaaaccataaaatgttgagaacccccagcctagacagctatggcctcactgttgtgtctggcattcactgctacaaacaacacaaatcatgtactttatatcttgaagttgtcactcagccctgtgttttctcatttctgtgtctttacttagatcataaacctaggatttccttttctctgcttatctaagtcctactcctctttcaaggccaatcttaagtggcttatcttccatgaagaattcccagactgttttaactcacggtggttccctttttctgggagctcatagtcattatcagttataccactttgggctattcatcaggagctgccgtgtgtacttttatgttcttttgtagttgttatttaactgtcattttcattaacttctcaagcaggtatgcgttatctcctcaacccagacatggggagcaggacagtatatccagtaattttttgtactgtctgcataattattcacgtcccgtattcatggcaggggttgttattaagcatgtgttggctaactgattataagacagttatgtgcagacagtaggcctcgctattcttttatagctcatttttcctgcatgttgctaggcacagagtaagttttgtgctttagtccctgtaagtatatggtgactggctgacccactgggtccacagaaacacacattcatgcttctcattcaatacatttcgtgtgtgccttgtgccctgcttgtggaagatagttcaaacatgttaattgacttactcttcat

SEQ ID NO: 15048 - DNA, 2050 bp, Homo sapiens
acacatcacactcacacatcacacatatcacatacatcacactcacacatctctctctctctctctcacatacacacacatctttgggagcaaaaagtaattgagttttatttttaggtcagtgcaattagatttttctttactcgcttttaatattatattagctttctctgataaaatgaagaagcagtttacgcctgttgaggtaatttctgaatcagatgtgggtttctttatgctccaccatgattggccagttgctttgtaatgaaggagtttgcacttcagctaagcctggaaaaatgtctcagctccttctactgggtgtgccaaccctttcagctgttcaagacacaggatgtgaggaggaattgtttaacggtgacagcatggagtaaattctgacatcaggtgtcaggggttctattcttggttttgtttctggactgctaatttagggtgagaatgattttcccctcagcgtcctcatctgggtagtgaagtagtccaggacagtatttttgcagccattatttgggtttacatgatctccttttgacattctcaagtaaaccctgctttaagttttaagacttttataccacatctaaaggctcagtggagtgagttgagccatcagagaaatctggcttgttgtgtcttcctcatttcttttgattagtctgagttgccagatcattttcaaatggctgtgcatcaaggctcacctgggagcttgtaaacatagtggtgcttggcccgtaagaggccggatccacaggggaaggtcccagtagttcagattttcagagttcttcccaggaaaccgtgaagcatactagtgataagggcatctgggctgcaccattaaccagctcaaaaatagttcattcagaatttccccatgactatttcattattttgttattagggttgatagttttaatacataaaaatagaggataaatgataatattttatatataaataaaaaacatatatgtataatagtatatttaatacataagaatagaagataaataataaataaaaataggtatatttgaatttctgataatgcatattcttgcatgcatatgtcccacgcaatattcgaatcttgttttatcttgtttggcaatgcttcatgccatagagccaggaaaatctcaattctttcacaaaaactaatgcagagaggtcacaaaggaccttgagacagagggtttgtagaggctttggtactgcccattaaaatgtattgagtccttttgagaaccattatactggaaatttggagacgccttttcaatttttggttccttttcttctctttctgttgcattttgccagtgcagcattcacttttatttcttaaataaattgaagattttttttttagagtgttaaggaatttaaccacatggctcctattaagccatcattgcatacagaaatttgttacaatctttctcatgtggatactgccaccttctcctaaactgcagagtatcttgatgtgaggtgtgtaagaaatctaagacctcctcactggccaatttgttgtcttcacaaatagttattctttcaaatagaatatttcttactgtagttaaattgtacttctttaggctcctttggaaaaaatttacccaggacataccaaacaaggtaggaaaccaaggcattggccattgttcaagagcaaaccaggtcagcaccaacaaagtcgggattcatttctattgaaactgatctctgggtaccacccacagttattacaaactgactcagcaaaaaaggcctgtggccattcgaaaagcaaatatttttgctttggcttttatttaataagttttcaaatgtgattttctaggcccctaataggcacacttatcttgtgaatatggcagatactagcacagagcctgcaatgggggttgtgattgtcaaggatctgctgcttctgggtgctttggggtggaatgtgggtggatggagtaagggcttctgtgactgagaaccacattcctctctgtctgcaggtgag

SEQ ID NO: 15049 - DNA, 1246 bp, Homo sapiens
catcttctgcctactgggttcaagtgaatctcctgcctcagcttccaaagtaactgggattacaggcacctggcaccacacccagctagtttttgtatttttagtagagacagggtttcaccatgttggccaggctggtctcgaactcctgacctcagatgatccacctgccttggcctcccaaattgctgggattacgggccttcttgctttctaaacatagcaccttcctgactgtagggactttatctgtcttgctcacctgtgcgtcacacgggcctcctgcttcatcagacacagtggccactcaacaattgcctgatgaataaatgcatgagaaatactagttttaaagaaaggtctgatacacttcacttggtttggaatgtttaccaaaaacctttgcttttctagagagggttgcgggctaatccaaaagaattggtttataattatgaaattttaaaaagcgtcagagaaccaacaaggaaagatttttgaggaaatggaggctcatcaggaaagcacaacatgtgaagttgttgcccactcacatgtctttttccttgacctgtttctagaatgtgttgtctcagacagctgacctgtcttggagatgtagtactttataagatgaaccaagtatgatcctcccaaggaccagggcctacagtccagtcaagcttgggagtgtagctaagggaggaatgaataacccactgtcatttcaagcgtaggattctctcatcactctcactgttttaaatcttctttatcatcacagattttacattattcccttatgtatgaatgttatttttattgaccattgaagattggaacttttttctggaaaaacatcacatggttgagtcaaggatgaaaagtcaaaactaccttttcatgtgaggggagagagagagagagcgcgcgtgcgcgaaagcgtgtgtgtgtgtgtgtgtgtgtgtgtgtgtgtgtgtgtgtgtgtgtattgggaccacctttcagctgtgttgcctccctctggtggccattatatgcacaaggcctgggtgacatggactgagtcagaatgtaacttacttttcaaaaaaaaaaaaaaaaaaaaaaagactaagtcattgtgtgcacctgagtttttaaaattattattggtgggaactctttaaaaaaagaaaaaaaaaaacacagttaagtggttgaaattgattagcactacaaaaatatgagctttttgcctttgggg

SEQ ID NO: 15050 - DNA, 1030 bp, Homo sapiens
actctacctccacaacaaccaaattaataatgctggatttcctgcagaactgcacaatgtacagtcggtgcacacggtctacctgtatggcaaccaactggacgaattccccatgaaccttcccaagaatgtcagagttctccatttgcaggaaaacaatattcagaccatttcacgggctgctcttgcccagctcttgaagcttgaagagctgcacctggatgacaactccatatccacagtgggggtggaagacggggccttccgggaggctattagcctcaaattgttgtttttgtctaagaatcacctgagcagtgtgcctgttgggcttcctgtggacttgcaagagctgagagtggatgaaaatcgaattgctgtcatatccgacatggccttccagaatctcacgagcttggagcgtcttattgtggacgggaacctcctgaccaacaagggtatcgccgagggcaccttcagccatctcaccaagctcaaggaattttcaattgtacgtaattcgctgtcccaccctcctcccgatctcccaggtacgcatctgatcaggctctatttgcaggacaaccagataaaccacattcctttgacagccttctcaaatctgcgtaagctggaacggctggatatatccaacaaccaactgcggatgctgactcaaggggtttttgataatctctccaacctgaagcagctcactgctcggaataacccttggttttgtgactgcagtattaaatgggtcacagaatggctcaaatatatcccttcatctctcaacgtgcggggtttcatgtgccaaggtcctgaacaagtccgggggatggccgtcagggaattaaatatgaatcttttgtcctgtcccaccacgacccccggcctgcctctcttcaccccagccccaagtacagcttctccgaccactcagcctcccaccctctctattccaaaccctagcagaagctacacgcctccaactcctaccacatcgaaacttcccacgattcctgac

SEQ ID NO: 15051 - DNA, 1058 bp, Homo sapiens
tttttcatgtttgttggccacatcagtgtcttcttttgaaaagtgtctgttcatatccttcgcccactttttgatagggttggttttttcttgtaaatttaagttccttgtggattctggatattagccctttgtcagatggatagattgcaaaatttttctcccattttgtgggttgtttgtccactctgatgacggtttcttttgctgtgcagaagctctttagtttaattagatcccatttgtcaattttggcttttgttgccattgcttttggtgttttagtcatgaagtctgtgcacatgcctatgtcctgaatggtattgcctaggttttcttctagggtttttatggttttaggtcttacatttaagtctttaatccatcttgagttaatttttgtataaggtgtaaggaaggggtccagtttcagttttctgcatatggctagccagttttcccaacactgtttgttaaatagggactcctttccccattgcttatttttctcagatttgtcaaagatcagatggttgtagatgtgtggcgttacttctgagacctctgttctattccattggtctatatatgtgttttggtaccagtatcatgctgttttggttactgtagccttgcagtatagtttgaagtcaggtagtgtgatgcctccagctttgttcttttggcttaggattgtcttggatatacgggccctttttttggttccatatgaaatttaaaatagtttttttctaattctgtgaagaaagtcaatggtagtttgatggggatagcactgagtctataaattactttggacagtgtggccattttcacaatattgattcttcctatccatgagcatgtaatggttttccatttgtttgtgtcctctcttatttccttgagcagtggtttgtagttctctttgaagaggtccttcacatcccttttaagttctattcttaggtattttattctctttgtagcaattgtgaatgggagttcactcatgatttggctgtctgtctgttgttggtgtatagaaatgcttgtga

SEQ ID NO: 15052 - DNA, 1092 bp, Homo sapiens
actcttttagaccttctcttccaccttctaaacaagctaacaagaatctgattttgaaggctatatctgaagctcaagaatccgtaacaaaaacaactaactactctacaggtaatttaaatgtattatgtttacacttggtaagacatttctgtaattcttgagtaaggtgaaaatgattgctccttaaattgtaaaataaaggtgcctgtcagatgtcaagaccaagatgaggttcccatatagaaaaatggctttaaaaggaaattgacaagtttgagaaacttcgccaactgttattggactgtagtttttcaagcaccatataatgccttttatatctttccaatgtgtgtaaaatatatagtacgtaaatattttgaagagaattttgatgaagtaggactttcatattagtagcattagattcaacattagatatgaatttacgatgtgtaaaggggagtacaattggacaatgataggtatctgaagttatagaaatttgttaaacagtagtatataaacaaggttggtttcttcccttttggcggaactcattagtagaatataaggcagagaattgactcatttgtgatgttcctgctccaattctagtggaagtactgaataattttatgagagaatataaaagtattacgttttcaaaacaggagatgaatcagctgtaagctggtcttacggaaagctgattctgaaatgcaaacaactgatgggtgtcattttgtgttgtcaaattctgtactctctggccgacctgttgtagccaatgtgtaaacttgtgttaagaagctgatggtaatgagctactctaaaaagatttaagttttgctgtggatttggtgggtgtacttacagcattgccctgcttatccactctctcgcttttttttgtgaccccccttcctaaaatgaggtaaactgtagccatcagtttttttatttgttttctttttttgaggcgaagtcttgctctgttgcccaggctggagtgcagtggtgtgatcttggcttactgcaatctctgcctcctgggtccaagcgattctcctgcctcagcctcccaagtag

SEQ ID NO: 15053 - DNA, 1594 bp, Homo sapiens
tgtgatgatgtgcacctatagtcatggctactctggagaattgcttgagcccaggagttcgaggttacagtgagctgtgattgtgccagcctgggtgacagaccaagaccctgtctctaaaaataaaaaaaaaattttaaagactatataaatattacaaggccaaatttacattctgtttcttgtacagttttgtgtgggaactctctagagtttttttaatttttcccccttttttgtttcccttaggttcttcttttttcccttctttcattgcctacctgtactgtagcctaaaagtcttatcactctgtgctttgaaatctttgggtttcccactttttcttaggtaccttcctcctggagcctctctcctccttttctgacctcactgcttgctctaggcctgctcaaggccatcatcccgaggcgccctcctcccctgagtcggctctgcaattcctgaattccattttgtcttctcagtgcatttctccgttttgtaatcacgtcacaaagaaactccttaagaaagtatagaaggtaaattttctgagttcttggaaatctgaagctatccttgtacttgtttgatactttgactaggtacagaattataggttgaagtcattttcttcagaactttgaaggcatagtttcattatcttgaggcttcagtgttgatgctgagaacttggttgcccatcttattccattgtgtaatacctgggatttttttctccgggaacttttttttttctatgttcctggtgtctgaaatttcactgtggtatgtctagatgctagttaggtacattaggtacccttttaatttgaaaattcattctcttccgtgtgggaaatactcttgcattatttgttttaaaatttgctgtccttgttttcattgttctctggtggaaattctgttagttggatgataagcccttactttaatctgtcagttgtatattttttctctcttgatttttgacttgatcttgttggtctactcttgaatacttgcttgacttgatctttagtctccttactgaacattttaaaaatgtaggcaagcatattttttaatttccacaaactttttcttgttctatttttcatagtatcttactttgtggatacagaatcatctcaactgtctgaagatcctaattaaagggattttttttttcttttcaaggaattcactcttgtcttctaattaatggagtcagagtcagattttatgctttttttcttgctctttcgattatggaatttttttcaaaaacatctgcagatagtggttcctagtttaaggaaaggtagtgcagaggcttacctagaattgtgctgtgggctgagcttttctgcaggcaggtttagctttcaatgaagcagacaaggagctgcaattggccttgcagttgtagaggaatttcttgggggagcaggttggtatgcttacactcctactggttgtctattaaaaatattaaaattttgtcttttaaatgtctgtctctggcagtaccattcacaagccttcttctctgccttacatccttcttggtttttactcattgctgcaatc

SEQ ID NO: 15054 - DNA, 1310 bp, Homo sapiens
atttatgtgtttgttctgtatggctgttactgagtgcccagagcagtgtctggcatatagtagcaggagctcagtcagtgtttgttgtctgagtaaatgtcactcctgccttgcatctaacctgcagttttcacaggggctcatttgtggttttgcctgctgtgccttacagccagtatttgtccatatattttctattacccagagattgttgacatctcatctgctgcaccttgtaacccccatctctaaaccagtgatctccatcatatttttgacctgaaaatttttgtacagtagccatttttaagtatgtataccaatatatgtattttacttacgtacacatgctgtattgatatgaatattagaaaacataagaatagaaatctgccgggcttggtggctcacgcctgtaatcccagcaatttgagaggctgagacgggcagatcattaggtcaggagttcgagaccagcctggccaacatggtgaaccgccgtctctactaaaaatacaaaaattagccgggtgtggtgatgggtgcctgtaatcccagctacttgggaagctgaggcaggagaattgcttgaacctgggaggcggaggttgcagtgagccaagattgcgccactccactgtagcctgagcgacagggtgagactccatctcggaaaataaaataaaaaaagaacagaaacccaaagatcatagggtagagatgtagatattaagttctttaattcacttttatggactcttcagaaggagagattataattgtatatgcttgatacattgtgttggactggaagcactgtgaaagattcttagtcaaggggagattttacattcaaagaaaatggaaaatccccctgctttgctcggagggaagaactgcacttaaaagtttgatgtgtattggtgtcgtcttctaggcatttcttatatctgtgaacatgtgcaccctttgtatataaagtggaattacatgtttacttacgcacacacacacatgtacatataaagcaggaattatactacccagagttctctgtgacatttttgttccacttaatgtatcatgggagagtccttgagtgtggacctaggagccagactaccgaaggtgcagaccctgcagtttactagttgatttaacctttctgtaccctagtttcctaatctataaatgaagaataacggtagcatttacttcagagttcttggtaggagtaaatgttaaaatacataagctttctctgctgatgaatatttacactggagtcttaggaagggtccttgcttatt

SEQ ID NO: 15055 - DNA, 1020 bp, Homo sapiens
gtagtgatctttggcagcatttaaagtgaaaagaaataaggatctaagaattcagccctaatccactaaaaaaaggaattctaactgacaagtttttacaaatggagttgggctcattcattttggaaataaacctatggagtggcacacatctaaacaaattttcccaatagaaaaaaggctataaaaattttattccaagagtgattaaattgtataatgttgtatatgtgaatttaacacttttgtttacatgttaaacaaatgtgtatatattagactacattaaatatgcaattctttcttccagttaaatactgttgctccctaaaacccttacattgtacaccattgggaatgattgttcatcatactacttttccattagtgaggctacagttatgttttaaatgtgcgattacagagatggcatctgaacataaactgatggctcgaaaatgaaaatggaaatgtagcagccatatactgctaactttggatctgttcctgaattcaaaactactaggagaaaagtgtcctttataaaaaaggaccttattaatgcctaaaaaacatcatattctctaggaaagcttgtgtctgtttccttagggaaaatgtttgccttttaaaaactgtgatcctttaggatgatcatgactttccctttccttatggaaatgcaagaataaaatatttcattaaacaatgaaccttgaaaataaaatataaacattaagaaaccattttgctaaaaagataatgaaaattatccaaattgggtttttgagttcttctgtaaagagtgctctaccctaaattttcccagcaggtctgccgaaatcacacacttcccaatacagggggacttggcctttaccatcaagtattcgatccttccttgaaatggcattatctggcagtgtatggattacggattatacccagtgcatatagcaaatattttgaacagatcagtctttcactattttgatgattctgggcatttctccctgttac

SEQ ID NO: 15056 - DNA, 1709 bp, Homo sapiens
gtttttttttaatttttttacaaataagttagttttttgagtctatattctactcatctaattgtgttaaattcatacataacattcaaaacagtttgttctaaatttttaaataatccagtaaacctcaaccagaaaagtgcaagccaaaagccaatcatctaaccaaatgtattttcactttgggaacctaaatatgttgtagaggcagccatctttattcccattaaaatgaacgcatgatgttattcttttttttgtttttaaaaaaatgttcatagaatgcattccaattacttgagctcacaaaaggatctttgctttccaacatctataaaaccacacacttgtcacctgtcatatttcacccagtaggtgatgtgttcagggaaattaggatccgtgttttaatcttctcatgtttccttatcagaacctagcctgctggtatttaattagggggtgctcaatgaatatatatactgaatgcatcttgagttctttacgtggggactttctggacctcctgtagctctcacctgttcctttcgcagtcccttggccttcactgagcctgcttgacagccatatattcctagtatactgagcctaatgcccccaaatttcccttgctgctacttcctctaggctctagagtcactaatatgctgcagcttcaagagttgccttcttttcaaatcctccacagcacaccaagctttattgttttctgcctctattctgtagtaaaggaaaggtagaaatttcaaataaaacaatttcatatgtttaataagaaattgaatggtgtacatgtttacattgaatttttcaaggtaaagcaaagctgataaaatatttgccagtttagatttcttaattagcttttccctttttttcattatctagcaggttttctactgactagatcacaaagcaaccagtgttgtttcgttattggaatcggataaattgatcttagttcagttcaaccaacatttcttgaatacctactgtctacaaaaaccatagatattatggaaaattccaaagtgaacaagatataaaagtttgctagagtgtttttcaaatatggttaagtgtgtaataatagaggcataaagagaagtctctgagaaagacaagagtgtgtaataggtttagaactggaaaatcagggaaggctttataataaaggacttgaccttgaaggaggaaggcagaaagaacaatgtggttgtagctttattcatttgttttcaaattattattttagtaaaattttctctaaagatctatctttttatttataaaaaggagtgatagaagactaccaggtaattaccccacttctatttactatgtaattgatacattggttgtttcttgattaataatgatggcttcttgtattagtttttgacatggccctttaaattaaaataatgtgttaagaggtaaacatgtttaatataaaatgaaataacaacaatgaaggatggctatttctataagctgtgtagtatttctaatgctattttaatatatgttttatttatccatgggttttaggcagcttggatcttaaaagcaagagcgctaacagaaatggtatacatagatgaaattgatgtagatcaggaaggaattgcagaaatgatgctggatgaaaatgctatagctcaagttccacgtaagtattgggtttt

SEQ ID NO: 15057 - DNA, 1011 bp, Homo sapiens
tgaccttataaacagatgaaattattaaagattggagaactactaatactttaaaatccaccctcagtttctgtgggaaaatgtgtataaatatacaagtgataagaactatgcttggttcatagagtatgtagatctccaataaatgggaagatacaggttattgagaatactgcataacatgcttgtgttaaagttatagtttttatgctaatggtgttgttgatctgtttatttccttagtccatatagtatattataggtttactaacatgcatatttctgttatttttgtggtgtgtccttttccccatcattaacgttttatgatcaaagatttcaaacatacaaaagtagagggaatcgtcttcatagcctcttaacagagaattttaaagttatatgcgtatgacttctcaaattgttttgatttttgcatacttatatgcaaatgagcaataatggaacaactttggtcaaatcaaatgcagttcattctacagtgtctgattgcatgttttctcattttcctattagttccaggaaaaaggctttatatccatacattaagcatttaggaaaataaaaatgttttccttaattgtgttttctttttttcttcttttttttttgagacagagtctcactctgtcacccaggctggaatgcagtggtattatcacggctcactgtagccttgacttcccaggctcaggcgatcctcccatctcagcctcccaagtagctgggactataggcgtgtgccaccatgcccagctgatttttttttttttaattatctgtacagacatgctctccctatgtttcccaggctggtcttgaatttctggccttaagtgatcctcctgcctcagcttcccaaagtgctgggattacaggtgtgagccaccatagccatccccttaattgtgttttctatgtgtcaaccactagctatacactaggagaactaataaaaaatatgatactttttcctgcctctacaagcca

SEQ ID NO: 15058 - DNA, 1035 bp, Homo sapiens
aataagaattaatacctttagaataataaaactttgagctgggagagggaagctttgagaccatcaggcccaactccccttttcacatgaggaagctgaggccaagacagtggctgtaatttgcatcaggagctagtgagtaacagaccagggactagaaccaagtctgctgatttctagttctgttctcttggtaatcaaatctttttatttacactgatgcctcacatctgtaaaacacttcatagttaagagatactttgttcctacattataccatttcacttaagtctcacagaaccttggaggtagtggctatcgttagtccttttcccagatgaaaaaaattgagcctcacaaagataaagtgatttgtccaaattcacgtaaccagtaagtggcagaacaagaatttgagctccctttctgacgccaattctcttgctgtttccacaattccatattgtttctgtaggacctgagtatttttatattctcttaatgtttcaatgtattttaaagcaaattaactgagagatcagaagagtcgtaatgaattttatgaatatttatatagcaactagtaaataagatctgaaacttgttgctgatattgaaatgcatatagaacatttggaaaaatagaaacaaatgaacaattctatttttaagtataaatatcttttattattaaaatagggtagacttcagttactatgagcacacttcaatatttataagcttcagttgtcattcaagtactctgagaaaaaagaagactataaatgggacaaaaagcatgtttattgttctgccgttgaaattaagactactttccatttagatatttcacataaaactctaaagtgttttttcctgctgctagatggagaaagtgttttctgctaaaaggtaattttagaccattatatcattaaactcttatgaatgtaattcctggagacagtcttgaaatcttgagctgccaagcaaaaccttcagaaatgcttgataattaaaggaaagcaaaactct

SEQ ID NO: 15059 - DNA, 1030 bp, Homo sapiens
tccaccatccttgtatgtgacttcagttttcagagtcacctcgtggcccagtatggcagctagagctccagcttactcatctattccaggtagcaggaaggggaaaggaggaaaaggacaaaaaggcccacattctagctatgcccatctaagcagccttcctggaagtcccacacaacacctgcatctatttcattgagcagagctcagctgcatgctaaccagctgtaaaagaggctagaaatgtcttttagcttagcacaccttttcctgaattagccttttgttagggaaggaggagagaatggctgtctggaggcaacaagcagtttctgccttggctcctcctcgcagtagtatccttgggtgtcacattggcattttctgttcttcctcccttttcttaaagaccttgaaatcaaactgtcaccccattagagtgttggcaaagtgcagactgcagttcctttgtatctgttatgagttaaattatctcacccccaaaaaagatctgttggaatcctaagcctcagtacctcagaatgtgatcttatttggagatagagcccttacaaaggtaatcaagataaaatgaaggcattaggatggacattaatccagtatgactagtgtccttataaaaagagaaatttgggtgcagagacagagataagaccatgtaaagacacagaacgccatttacaagccaagctcctagaagctgggagagaggcttggaacagatgtgcctcacagcctcaggaaccaatcctgccagcaccttgatcttggacttctcgcctccagacctgtgagacaatatattgctgttgtctaagcctcccagtttgtggtgctttgttttggaggccctggcacactaatacagtatccactggactctcagtaactaaagggacgaaagtgtcctccttctccctgcatccccttattgccaaatgcatcttgggaaggctattacgagccttagaaggatgaggagtgacctaaatggtaagtttaagtaaca

SEQ ID NO: 15060 - DNA, 1053 bp, Homo sapiens
tcatattcacaattctggcttatcctcaaggaaaggggatatacaggcatgtgcaccaggggccatctttcgattctgctttccacagacttcactgatggagttccgctcttattgcccaggctgaagtgcaatgtcacgatctcggctcactgcaacctctgcctcctgggttcaagcaattctcctgcctcagcctcctgagtagctgggattacaggcatgcgccaccagaccacggctaattttgtatttttagtagagatggagtttctccatgttggtcaggctggtcttgaactcccgacctcagatgatccgcccacctcggccccccaaagtgctgggattataggcatgaactactgcacctggcccactgatatttctttcctggttcgatttacccatcttattctccaattttggctggaattaattttttactgtttccaaaattggggtttgttttttgtagttaagcaaaagtacccttgtacacactcaaaagactgaacctctggctccaaagctctttgagaagttctgtactttcttggagccaaaagaggcagctgtactggagtaagggaccaaccccgcagcatgactgctttggagaaccatatttacttgggtatgtagagttgttaaaaataatagtcctataaaagattcatagaatcacaaaagatctgatttcctaatcttaaaaaatctcatccccttaggaaatgtatttcgtatggttcctattgggtctacgtaatatcttattgcctgttatgtctctacccatcataagtagaggatgttgacttcctgatcatttggactttgtttcatccagttgacatttcacaaatgtgaaaactggctacagaaggtcaggaattggaatcttataaaaatgctagccttaatatagtttttaatcttcccttttattattttaaatataaatcatagttttcatttcctctctttcattatgtgttgtgattgaggttctgactgaaaacatttttcatagatcctgggtcacgttttagt

SEQ ID NO: 15061 - DNA, 1022 bp, Homo sapiens
ctggaaaagctgcagacactcaatgccggcccctgaaagcagccaagaaggggggctatgccctgcaaagctacaggggcagagcctgtccaaggtcatggaagcctacctcttggatcagcgtgacctggatgtgagacatggagtcaaaggagatcatttcggagctttaagatttgactgccctgacagattttggacttgcatggggcctgtagcccctttgttttggccaatttctcccatttagaatggctgtgtttacccaatgcctgtacccacattgtatttaggaagtaactgacttgctgttgattttacagggtcataggcagaagggacgtactgtgtctcagatgagtcttcagactgtagacttttgaattaatgccgaaatgagttaagactttgggaggctgttgggaaggcatgattggttttgaaatgtgagaacatgagatttgggaggggtaaggggtagaatgatatggtttggctctgtgtcctcacccaaatgtcatcttgaactgtagcttccataattcccatgtgtcatgggagggacctggtgggaggtaattgaatcatgggagtgggttttcccaagcagttctcttgatagtgaataggtctcacgagatctgatggttttataaagggcagttccctgcacacgctctcttgcctgccgccatgtaagatgtgcctttgctcctcctttgccttctgctatgatcgtgaggcctcccccgccatgtgcaactgtgagcccattaaacatcctttcctttgtaaattatccagcctcgggtatgtctttattagcagcatgagaacagactgatacaagtagatacagttaaaaatacttgatatggtttggctgtgtccccacccaaatctcattttgaattgtagctcccataattcccacatgttgtgagggagacacagtgggagataattaaatcttaggggcagtttcccccatactgttctcatggtactgaataagtctcagg

SEQ ID NO: 15062 - DNA, 1047 bp, Homo sapiens
ccctgggggctggaccatatgcagggcatatggtcattgaggatggccgtcggctctctgcatgatctttcatagggaagtcattccgagccatcacagatctctgctagggacctctgaggcagctgagaaatagctgtaatgtccctagatgggaacagccatcaggaagtctttcctagtcctatctgtagtttaattgaaaagggtcaacttgagctttattaagtctctcttgctcaagaagagctccaggctgacttctactagaaagtaaaaggggaattgggtgtggttagggagatggaacgggtgcggggaactcaagcaggacaggtgtcatcttcagtatgtctttgctgctaatagaaatcaagcacattgtctctaagaagagtaattgagatttttacttatttttgttgaaagcaagatattgtcatgttgccaattagtaaatatgctaataatttcagtaaagcctttcattcatactgtttttcataggaatctgtggagcttcctctcacccatcctgaatattatgaagagatgggtataaagcctcctaagggggtcattctctatggtccacctggcacaggtatgctctgtttttgacactttccaggcacccagctggtctcttgagcagcagcattggctagttataattactgaactaataagagaggacaccacaattccttagtttaaaacagggctgctcaaccttgtctgcatgttggaatcaccttgggagctttaaaaatactgatggaaaaaaaaaaaaaaagcctgagcaacttggtgaaaccctgtctctataaaaaattagctgggcgtggccgggcgcagtggctcacgcctgtaatcccagtactttgggaggcagaggcgggtggatcatgaggtcaggagttcgagaccagcctggccaatgtggtgaaaccccgtctctactaaaaatacaaaaattagccgggtgtggtgacgtgcgcctgtagtcccggctactcgggaggctgaggcaggagaatggcatga

SEQ ID NO: 15063 - DNA, 1047 bp, Homo sapiens
gatgtctctgttggcaagtaaaatctatcttcttttttaaaaattgaaagatcttaaaattttaagataagaacttactttgacaattttcaagccttcaaaaaagttgcaacaatagcacagtgatttgccaagagttaacattttacctgtttgctttttctctttctatacacaaaactttcttttcacccgaaccatttgaagtaaataacctgatggccatcaccaaacaaacttctgtgccaggattgtgttttttgccacatcttgtttttgccacagtaattactggccaaaagaaaaagaaaacaataacagtaacccacataatatgtttgtttgctgtccttctctatctatttccttcatttctctttcctttctaaacagatcaggcctaaaacaataacagtaacccatgtaacatgggttattgttttcttttactttgggccagtaattactgagaaattaaatatattggaataaatgctatactctgtagtattattccatagtatagatactgccacttacagtatctaaccagaatacatgttcttttatgactataagtaaatgaaatagacatatactgtcaattgcctctaagtttcagggcataattttgtttatttcctaggaatattattctctttaacaaaagtggtgttgtacaagccacatagcttgttagaacctgagccaaaactagaacccacagccctgacccttgggtcagtcttagttacagtaactcccagtttaagccacttcacatcctttcagaaaataggatgcttaaaacattttttttaaaaatcaaatctttcccaaataagcaatttgtgtttagtctaggtgtctcatgctttatttcagaacagatttttttttttttttttttgaggtagagtttcgctcgttgctcaggctagagtgcagtggcgcgatctcggctcactgtaacctctgcctcccgggttcaagcaattctcctgcctcagcctcccgagtagctaggattacaggtgcctgccaccg

SEQ ID NO: 15064 - DNA, 1023 bp, Homo sapiens
atcattagcaataacaattgctgaatgttcacaggatggcaatggttatatcagtgcagcagaactacgtcacgtcatgacaaacttaggagaaaaactaacagatgaagaagtagatgaaatgatcagagaagcagatattgatggagacggacaagtcaactatgaaggtaaaactaaattctctgagctcagtgtttcatagtcttacctttagatctgtaagcaagccaactgcttcactagacagcctttgactttattttatgtacagtaaagatgttgtgttcattaaagctgttttcaaagataaccaaaagttactattatatttgtcttttcagaattcgtacagatgatgactgcaaaatgaagacctactttcaactcctttttcccccctctagaagaatcaaattgaatcttttacttacctcttgcaaaaaaaagaaaaaagaaaaaagttcatttattcattctgtttctatatagcaaaactgaatgtcaaaagtaccttctgtccacacacacaaaatctgcatgtattggttggtggtcctgtcccctaaagatcaagctacacatcagttttacaatataaatacttgtactaccttaatgataaggactccttaaagttccatttgctaatgattaatacactgtttgggctggccagtttttcatgcatgcagcttgacgattgagcacagtcaggcctttgtattaaaaatgaaaaatgaaaaaacaaattcaaaacctattcaaatgggttctagttcaatttgtttagtataaattgtcatagctggtttactgaaaacaaacacatttaaaattggtttacctcaggatgacgtgcagaaaaatgggtgaaggataaaccgttgagacgtggccccactggtaggatggtcctcttgtacttcgtgtgctccgacccatggtgacgatgacacaccctggtggcatgcccgtgtatgttggtttagcgttgtctgcattgttctagagtgaaacagg

SEQ ID NO: 15065 - DNA, 1322 bp, Homo sapiens
ggggtggtcaaagagcctgattgctgacccagtctcaggcctgtggtcgatgacctctcggtagtttcaaagggggctggagggggatatttgacttgttttttcgaaatgtagccttctaaccctcaagtctttagaagctgggtggactcttagtggtcctgcagcgtatcctaaaagactacctttgaaacaggattcttgtatggccaggatcctgtctgggaaccagaaaccctacaccctccccctccagggaatgctgagttccagttttgagcagaggtgaggcagaatccactgtagccttccgccctggtatttggggggatgaccagcccaggcgttgggtgttagtctgcatgagtttgtgagaggaaatagctgggtgtcctggcagtgcccttgaagttggttaggaccttcctgtaaactcttgcccctacttctaactactctataaatatatacatatatttatatataaagtgattagttgaactggcatcctgctttagcctgagacttgccataagaaactgctgagtacttggcaaaccctttcatagttttgttctccatctgtttggggtaggtgttgagcgaggcaaatggatctcgatatttcagatgggcttttgatgcactgttgccaaggaaggctttttctgattttttgacaaatgaatttttgcacactttcattggtgtctttcggcaacttacacacattgaaaatgagctattgtacatatttttatattctctttataaatgcatgtctgattgtacttgtaacaatattgtaatgaacggctgtgcagtaggcccagcgctgctgtgtctcgtcagaggaatagcttaccacgaacccctcagcatactgggaatctcttcctgaacaacgaatgtaaatttggtcaagtctactcttccgttcattcaattattttaagcatttgaattatttattgtatatcctaaatatatttctcctttggcagtgactagatttccactaatgtgtcttaatctatccctccagctggcagttactgtttttttaatcccctgaagttgtcctgtaggagacagaaattctttgctgtctgtatcccttggagtaagaaggtagtggcatgggtggagtgtgtgttctttctccaaatctattatgatgtttattaaacacttctgtagcaaagatggtggtagttcttttgttactgaagttgcccttcaccatggctatttgaaaaggagatgtacttggacgtttctgtaaatcttgagataaactgtttggagatttaaccacctct

SEQ ID NO: 15066 - DNA, 1043 bp, Homo sapiens
gtctctactgaaaacgcaaaaattagttgggcgtggtggtgggtgcctgtagtcccagctactcaggaggctgaggcagaagaatcgcttgaacccaggaggcagaggttgcagtcagccaagatcgcgccactgcactccagcctggtaacagagtgagactccatctcaaaaaaaaaaaaaagaacaaaatgtaaacattccaaactcttatactgtgaacataattatacacctaacaaaaatggggaagtgaggggaaagggcagttggaagatttctaagcatgtaaatttactcatctttaatggctggaaaataatccagtctaaaaaatgaactccagccaggcgttggggctcatgcctacaatcccagcactttaggaggcccaggcaggaggatcgcttgagcccacgagttcaagatcagcctgggcaacctggggaaaccccttatctactaaaaatacaaaaaactaaccaggcatagtggcatgcacctgtaatcccagctactcgggaggctgaggcacgagaatctcttgaatgtgggagttggaggttgcagtgagctgagatcacaccactgcactccagcgtgagcaacagaatgagactctgtctcaaaaaaaaaaaaaagaactccatgaactgcagctttttaaaacagacacgattctaatttcttgatgatttttgtgttcgttttttcttatctttaaggggattattttaggaatttttgtggtttacaaacatttagctgaagttcagcaattatttctattttacttaatttctgttttctgtaaaattaaacttaattttacttaaaaataatttgcagaataaaattccattgttatctattgatctttttgctctgcatgcccaaattcagatgacatataccaaatattgatggctgtttccagaaagtgagatttgagacaccaaaaaaaaaaacaaaaaacaaaacttcctcatggtgctttctaaagctttttagaaaagctcattctatataaaactaacagtcat

SEQ ID NO: 15067 - DNA, 1032 bp, Homo sapiens
cttatgaaaggtggatattcagtttaccttagtttgttgatggccttgagtagtggtaagaaattattaggtaactcggtggccttctctcctacttgcatagttagccaggaaaagctcatttattttagggagctaaaatctgaaatgttgctgtggagttgaactttgctaatgaatattttcataacttctgcttaatagcacacagttccaggttctaaatcccatttttaaaaaatgtatatattttattttatttattttttagatacaaagtctcactttgttgcccagtctagggtacactctagggtctcactctgtgcccagtctagtggcgcactcatagctcacagtaacctcggactcctgggctcaagcaattctctcatcttggccttctgagtagctaggactacaggtacatgccaccagccagttttcttatattttttttttgtagagacagggtctcactacattgcctaggctggtctcaaactcctgaactctagcagtcttcctgcctcggcttcccaaagtgctgggatcacaggcgtgagccaccgtgcctggcctgtagatgtgttcatgttatattttcctgaaatatatgtagtaggcatcccaatttgcatttcatcagatatatgttgaagcgtgcatcaggttctatttagggagttgcaaacatatgccacctatgtttttcagttgctcacattccaatgcaagggttcttaatgttaaactccctgaaaagtttgtgaatttctacgtgtatatgtactcttgttttttgtttgagtgtgttgagagttggtgggggagggggagggtccataggtttttatcagattctcaaggggatctatttaaggaccactggtctaattaatgggagagaaagacatgtaaactaatcattgtaatacagtgaaatcagtgccatcacaaagcaagataaaagaggaagagattcaccttgaaggatgagttcattaattcctaaacatttatttattgagg

SEQ ID NO: 15068 - DNA, 1082 bp, Homo sapiens
gtcaagtgatgtcttcagccctactatgaaattaagaatagagagacagcctctgttgttggattcccttctagtacaaccctcaaaattgggaggaggaataagaatatttttttcttctgtgctaaagctaatgctcttcaaagtaatgtcaaagcagaaagcagcagcattaggcaagaaccactttcgttactgattgtagaacctatggcatccattacatttgctctgaggaaggagggacagggaaaatgggattggggaggaaacgtcttttgaagtaagcaaatgactgggatctagaaaatgaatttttggttcagtcctgcccatggcacgctagttgaccccattatgcaagtgggtgagtgaagagcctaacattaccaaacgtctctgttatgatgaggcatgactaacaaaactgattgtgaaacagaaaatgtgaagggctttgttaaataatgttaaataatggggtaaaatttagaataacaacttggaatgtgatttacagtcttgaaatgatctgtcaaaggacttcagggaataatagaaaatctcttagagataatgtagtattttactttattcagtacagttgtatgtctggtgttttacttgaagttattctttcccctttgaccttatctaaggttcctggacatcagtcagtttttatgaatgaaccaaggctgtcagacttcaagcaagttctcttacgggaggggattcaagctgaatttgtaggaggtgtacttgtttgcaacaatcaagtagcagtccgcagagtaagtgtgttttcaataagggctgaattgaacacatacgtctgatgttttgtcattttgaaattctgtaattcttgtttggtattttcacaaaactgaagatcagtaatttatattcatgatcatgacctcaaaggcttacagaagtcttattgacttgaaggcttatgaaagactcttgaagaaatgatatataattttattgtaaattttaattatttgaatcttctgacatttatgtctatgtaaaattcatgacttcaatattatatccatatgctgtgaatc

SEQ ID NO: 15069 - DNA, 1026 bp, Homo sapiens
tgtatttttagtagagacggggtttctccatgttggttaggctggcctcaaactcccgacctcaggtgatccgcccgcctgggcctcccaaagtgctgggattacaggcgtgagccactgctcctggcccaagatctgatggttttgtaagggaattttccccctttgcttggcacttcttcctgctgccatgtgaagaaggatgtgtttgcttccccttccaccatgattgtaagtttcatgaggcctccccagcctgtgggactgtgagtcaattaaacgtgtttactttataaattacccagtctcaggcaattctttatagcagtgtgagaacagactaatatgaataccaatactgaaaaattgtttcttgcctcaccttgtcctatgaacaggaattaaattttaaagtattgccttaagatggctgtgctaaataataatcattgcaagagcaatacttttacctgtttctagatgacaatattactaaaatttctcaaatgaagactttgttttagcttcaattacttcagaaaatataaattttaaagatgactatgagataaatcatgaactcagtggaattttcagatgagatggggcgcgttcagggtggtatgactgtagacggaattttcagatctttgttatttagaagcaagtataggtataacgtggactatcaactgatatctgcaaataatttggttaaaatgaaatttgattgtagtatttgttgctgtaggattataaatgtcaaatatcattgtaaacatttctatatttttagaaatatcttgggtggcctgaaacagaagtgaggaaatcaattttttaaggtgagccatttggcttttttaaaaaattgagattcaacttacataccataaagttcactcttctaaagtgtacaattcattggtgttagtatatttacagagttgtacaactattaccactatataatcccagaacactttcatcactccaaaaagaaacaccatacccactaccagtcac

SEQ ID NO: 15070 - DNA, 1051 bp, Homo sapiens
tgagatggagtctcactctgtcgcccaggctggagtgcagtggcgcgatctccgcctcccgggttcacgccattctcctgccttacccacccaagtagctgggactacaggcacctgccaccatgcccggctattttttttgtattttcagtagagacggggtttcactgtattagtcaggatggtcttgatctcctgacctcgtgatctgcccgcctcgacttcccaaagtgctgggattacaggtgtgagccaccatgcctggcctgtagcagctacttttatagttttgggaccacagtgaagattagaatggacaaacgcttgccgttatgtagtttacagtctcatggagaggaaacagcaagtaggcaaagtatctgatgtgctagaatagaatttctggctcattatttacatttttaatagaatagaattaatgtgcacacaaatcacttggggaatcttgtgaaaatgcagattctgattcagtagatctggggtggggcctgagattctgcacttctaacaagctcccaggtgagactgattattttggctcccagagcacacttggagtaccagggccctaaaaaatgttagatgctggctaggcatggtggctcatgcctgtaatcccagcactttgggaggccgaggtgggcggattgaatgaggccaagagttcgagaccagcccggccaacatggcgaaaccccatctctactaaaaatacaaaaattggccacggatggtggtgcacatctgtgatctcagctacttgagaggctgaggcaggagaatcgcttgaacccaggaggcagaggttggagtgagctgagatggggccattgcactccaacctgtgtgacagagaaagactctatctcaacaaaacaaaacaaacaacaacaacaacaacacaaatgttagatgcaatggggccaggggccctagagtacttgttggggtggggtggttgaaatatcatctaggctgtcctgcagaggcctcaattcgctgagaggtggtatgtgagccaagatgtgaa

SEQ ID NO: 15071 - DNA, 1034 bp, Homo sapiens
tttcacaggtgaagaaactgaggcacagagaggctgagttgcccagggtcatacaggaggaagggacagagctaggatttacacaatggcctctgaccccagaccccagatgtgcttaggggacaacactaccacccaaccaaaggactctttgctcttcttttcttgggagctcgtaagggaattggtttcctccgtctgggatgctagtcttctagtgtgtgtgcagggtgctaaataatttgtgtgtgtgttgagtaaactgtgttgaattgggttgaattaagggcctttggaatctcacatgctgtcttcagggcttggatggtaccacccagccttctcttctgttattatagcaaaacccggaacaggcaatcggaagatttcgggaagcttttagagcttttctccccatccacccccatcttcttcagttttaaatagctcttgagagggctctaccggtggggaggagagaggtctttgtggtccttttaagctcagaaggcggcactgcagaaatggaactctcttaacactccgccttcctgtcctttcctcttagcgtctcggcacgttggtgacagcagtgcaggaaatggggatgctgtgggctcatttacatgtgcagttccatacacagttctcgtctgttccaggcccccagagacacacagcactttgtagtgaaaatgattttgttcttaccttggtctcggaagccaccagagaaattgcacattcggttgactgtctcataagtcaaggtcagaattttaaaggagcttccttttcagtcactctgtgtgcgcagaggtatcagttctcagacaaattagaacaaaacctggctgagcgtccttattttttcatataacaggtctttttcacttatcataatattcattcctttaagtgtacaattcagtggcttttaatatagtcacaaaattgtggaatcgtcatcaacatcagtttctgaacatttccaacaccccaaaaggcacccctcacccataactgcccttccc

SEQ ID NO: 15072 - DNA, 1022 bp, Homo sapiens
aattctcctgcctcagccttccgagtagctgggattacaggtgcctgccaccactcttggctagtttttgtatttttagtagagacgggggtttcaccatgttggccaggctggtcttgaactcctgtcctcaggtgatccacccatcctggcctcccaaagtgctgggattacaggcgtgagccaccgtgcctagccatactatcttgttttaatttcttattttagattttctatcacttacaagcttagttctaatgaacacagagagctttctatctctgtcacatagcaccagattatatgcccgaagtactcagctgctttgcagggcgacctgcaagtccccatttcctagtggaggcaagaaggaggaagagaggggagagagaagaggcagctttgcatccactaaggctcttgtttcaaggactagattgcaaacatttttttttcatattaagtgtttatgagttttagattttgccagaagctttgaactgtttattctgactctcaaatccttgtgctttgacagggctaggtttgctgctcaaggcagccatgcctcttcccccagcctcagttctgtgctttaggctgagaactcgcctaggttaaccctccccatgccagtgttctccagctcctcctgagagttggtgtccccgccacaccagcacaagaaaggcctggagaccgggtgcagtggctcatgcctgtaatcccagtgctttgggaggctgaggtgggaggatctcttgaggccaggaattcaagaccagactgggcaacacagcaagaccccgtctctacaaaaaattttataaatgagctgggcatggtggtgtgcacttgtagtcacagctactcgggaggctgaggcagggggatctctcgagccctggagttcaaggttacagtgagctgtgatcacaccactgcacttcggcctgggtgacagagtgagatcctgtctgtatccaaaaaactaaacgaaaataaagacccggggcccagtt

SEQ ID NO: 15073 - DNA, 1057 bp, Homo sapiens
actatatttaaaaaagaattgctgggccgggcacggttgctcatgcctgtaatcccagcactttgggagaccaaggcaggtggatcaccaggtcaggagatggagaccatcctggttaacatggtgaaaccccgtcccagctactcaggaggctgaggcaggagaatggcgtgaacccggaaggcggagcttgcagtgagccaagattacgccactgcactccagcctgggtgacagagcgagactccgtctcaaaaaaaaaaaaaaaaaaaagaattaccaaacttctgatgcatttttttacaatacttcttgttttactgtcgatgaagagtcaaactctgtaaaatattttaagagatttattctgaaccaaatatgagtgaccatggcccatgacccagccctcaggaggtcctgagaacatgtgcccaaggtggttggggtgcagcttggttttatagattttagggaggcatgagacatcagtcaaatacaattaaggaatacatgaatacattggtttgtttcagaaaggtgggacaacttgaaaactgttgggggtggggagcagtgttccaggctataggtaaatttaaacattttatggttgacaattgattgagtttttgtctaaggacctgggatcaatagaaaggaaatgttcataaaagattgtgaaaaaccaaggttcttttgaagtctcatagtggctgcccttagaaacaatcgaaaacaaatgtttcctattgagaccctttaaaaggtgctagactttctgccagttttggtagacaacatataacagtaagtgtacatacaaataaacacatctagacgtgtatacacacacataaatgaaaatccagtagctcggaaccttagccatgagatagcaatacaagcttactggttttactttaccccaatagataagccaatgaaggctatgaaccaaaatttcgggtaaagcagtttggttgttaaaggccagacctccccagactccaaagagtgctggagccaaacagtaccaaaggagggcatcacacattaa

SEQ ID NO: 15074 - DNA, 1035 bp, Homo sapiens
tcccttaacctccctgagcctctgtgtcctctgtaaaacagaggtactgatgcctgccctcaaggtgcctgtgatttagtaagaatatcacttaaagcctccaaaacacctagccccacacctgacacatagtagatgctcagcaaacacccacgtcctgtgtgtgctttcctctggacggaagaggtgcagtggtgaattggatgggatgtggagaagcagagacgcatgagacccttgcaccccaggtcatggaggaagaagagtccatggtgtggcctcgaaggatgtatagaatctaagtagatgtaggtgctggggatgaggggctattccctctatgcgtaaactcagaggtgggaaatgagtggggcacacccactagaggaagataagcgtgatcatttgggagccagcaggagtcccccgagtgtggggaagggactgtggagggcggatgttgggggggcaagccggaaaggcagagcaaggccagaccaggggaggccctggatgctggggttcgagtctggggtgtgactgcagctgcaactgcagcagactgagtaaagtgacaaggtggcaggaggctgtcctggcagtcagggggtgggcacagatgagctgagcagcctctgctggctattgtgatacacacggcgacggaggaaccattggaaaccccactgacaggccaccacgtaactgaagtaaactgaggcaacttgggatgaatgttgccacccttcaaaattagagctggggttagtggtggtggggcagggcctgagatgggagtgcagcactgagggcccatccagtccggccatcagaagacctcaggatgcagcagaatcacacaacaatgacagaagatgccaacgtcagctggccggtccccagaccatttgacagtggagaagcccaaggccactcccgagacctgagaaagggcccagaacctgtgccacagcctgccctgtccaactcttccataaacacaagtgtcccagctccatcgaagcacttcccaag

SEQ ID NO: 15075 - DNA, 1044 bp, Homo sapiens
cagtgacaatcagttcttagacaggggtgacccccagggactctcggccccttgctcataagccctgggtcaggacctccatcagtgggaagttaatgatatgagtaagaagccctgtgctccccaataggatgaaggcagaggtgtggtttggtccaccccatgctcagtttcccttcccctttcctccttcccaccacatcctcccacccacttagcctcagccacccatccaccaagaatttcctgaggggcagccagtccagatatcagctctgagggagccctgacttcccctctgagacatcagcttcaaaggagggaaccatcctcccaggccctgagggttccccttgggctttgtggttcttgagatgagcagaccctctttgtatctgttcgcattttttttgcatgttccagtctctggggtgatagtttgatgagatagttccatgagttgttgacagctcaggggagcgtgttaaagccatgacgtttgctgtcatatataactttggctagtggcactgggacctctgtatctaccttttttttttctctgtagttaaaaatgtcctgtaatgggaacaagttgtcttctaggaagtccaggaattcaagagaagccaaggtttcttcagcaatggttatctgctgcccagtgtagccatatatccatccatctattcatctgtccatccatatagccatccatccacccattcacctacccatccatccatgcatccactcatccacctacccacccatctacccatccacccacccatctacccatccacccacctatccatctatccatctatacgtccacccacccatccgtcatccatccatgcatccatctactcatccaaccacctacccacccacgtattcacccacccacccatccacatattcagctacccatccacatttccatctacctatccacctatccatccatctacccaccaatccatcattcatccatccattaacccatccacccatccattcacccatccatctatgcac

SEQ ID NO: 15076 - DNA, 1040 bp, Homo sapiens
gaaagccactctgttgtggggtcctcgcttcccttccacgtctcccggaagcggtagcagggccccggcgggtcggggaggaggtttactcagcttgggccccctccgggccagccgccgagggggcgcggcccaggacggcggctaggccgtagtgcagcctctccggagtcctcaggtgaggcggaggcgagggcccactggacgagacgggggtgttaacggtcctaggagcgggggcgcagtcccttcagtggagaccctggtctctccgttttctttcgggtcgcgctcatcttcgccctgttaggggctgaggagggtaactggagagactccttgggcttcagccgacgtcgtttactgccctcctctgtcttcctttctcctgacccctgcctggcctggccgttcttcccgcacggaacgagatgggtggggagcagagtgggggtctctgctcgcttacctgagattccccaaactgacagaccccagggctctacggactgggcctgaccgactgacctccagcctccctccctctgtgctgacgcctggccttcgaagcaggccctgccgcagccctttgcagacccatccccatcccacgcactctctgcccctgggcagtgtctggggaattgacgggtgcctctgaagtccttcgtgtctttgagatgtttgcccagggcccatctaagtatttaattaggtaatcgacattaattgcaacattagtagcagttgcatggtatgttttaaagcccaattaattttgaaatgggaggcaagatataaagaattaatgagcgtgttttgattttttattactttttttgtagagacagggtcttgccatgttgcccaggctggtctcaaactcctggcctcaagtggtcctccccgctcggcctcccagtgtgttgggattacaggcgtgagccacagtgcctggcctgtatggtgttctgtatgttacagagcatttcatctccattttcatttgattttttataaactccgaaatacataggcat

SEQ ID NO: 15077 - DNA, 1002 bp, Homo sapiens
agtcttgtttggccaggtgtgatggctcactcctgcaatcccagcactttgggaggctgaggcaggagaattcctggaggccaggagttcaagaccggcctgggcaacatagcaagaccgtatctcaaataaataaacacaaattttttttaatctttttttttttttttttttttttagacggagtctggctctgtcacccaggctggagtgcggtggcgcgatctcggctcactgcaagctccgcctcccgggttcacgccattcttctgcctcagcctccctagtagctgggactacaggcacctgccaccatgcctggctaattttttttgtatttttagtagagacggggtttcaccatattagccaggatggtctcgacctcctgacctcgtgatccgcccgcctcagcctcccaaagtgctgggattacaggcgtgagccaccgcacccagctggaaaaaaaaaatcttattcataacaagctttcaactttaccatgattgtggggctaaagtccaaggacattatacagcaaggctctgttgtgttttttatccttagggatttaagaaaatctgtggactttctttgatggagataatggaattttttttagtgggttattttctgtatagtagatgatattcaatatacaaactaatctctgctttgcttaaacatatttcttcttttataatagtctaaggaaaaattgattaacagcttgaaagaaggctctggttttgaaggcctagatagcagcactgccagtagcatggagctggaagaacttcggcatgagaaagagatgcagagggaggaaatacagaagctgatgggccagatacatcagctcagatccgaattacaggtaagattcatggtggttcagcttagtagacaccatttaccctcaggtgttaacagtttgagaggtggggaaacagcattactaaagcgataggtttctcgcttctcttcgcttcgcttcgcttc

SEQ ID NO: 15078 - DNA, 1033 bp, Homo sapiens
cttttgtttttttgtagaaatgaggtctcactatgttccccaggctggtctcaaactcctaggctcaagtaatcctcccctctcagccttccagagtgctgagattacaggagtgagccactgtgcctggcgagtcttatcacttaagacatactttttataaggctattgctgccatagattccttagttggatcttgaggcacagtcaattgagaaccttctggaaaagattcactatactagatgccattaagaacatttgtgattcatgggaggaggccagaatatcaacattaacaggagtgtggaagaagctgattccagccctcaaggatggctttgaggagttcaagacttcattgaaagaagtaattgcacatgtggtagaaatagcgagagaactagaattagaaatggagcctgaagatgtggctaaattgctgcaatctcataataaaacttaaacagatgaggagttgcttcttaccgatgagctaagaaagtgatttcttaagatggaatccacttttggtgaagatgctgtgaacattgttgaaatgacaacaaagaatttagaatactacattaacttagttgatgaagcactggcagggtgttaaaggattgactccagttttgaaagatgttctgatgtgagtaaaatgctatcaaacatcattacatgctactgggaaatctttcgtgaagggaagaacccatcgatgtgacaaactttgttgttatcttattttaagaaattgccacatccaccccagccctcagcagccaccattctgatcagtcagcagccatcaacatcaaggcaagactctccaccaacaaaaagattaggactcactgaaggctcaaatgatggttagcatgtttatttaaagcaagcttgggccgggcatggtggttcacgcctgtaagcccaccactttgggaggccgaggcaggtggatcatctgaggtcaggagttcgagactagcctgaccaacatggtgaaaccccgtctctactaaaaata

SEQ ID NO: 15079 - DNA, 1014 bp, Homo sapiens
agacattgagtcagtatagagttttgagaaatcaatgaatgccacaatttacctatgaaaatgtagtagtgtgatttctgtattgtatgactttcattttatgtaagaattttgtgaacactttctctttcagcttaccaataaaactttaagcaatagcagtcagtctgagttagaaaatcgactccatcagctaacagagactctcatccagaaacagaccatgctggagagtctcagcacagaaaagaactccctggtctttcaactggagcgcctcgaacagcagatgaactccgcctctggaagtagtagtaatgggtcttcgattaatatgtctggaattgacaatggtgaaggtaatcaaaaaaggaatctcaaaagaacatttcattcaaacatgcttttgaaaagttatagaaggactatttttatttgaaagaaacttcatccagtgaaggactcaattttctgatatgagacctgggccacgtactgtttagtattgttagtgaaccggataatggactaattaatattcctcaccagtattagacttggggaaagtagtctgaggattgataattatattgtaatgtctgagacacttaacaagatgatgctgacaaggcgaggaattcagtagagaggagctttcaggacacttgaaacaagatttgctttaataatcttccagtaaatagttacgggtattagagctaatacatagttcacataaccatatctaaagaaatctatagattcccaacatatgtaattaaaaaataatgtgtaagatagtataagcatcaacagatcagatttttaatcttggaacttcgtaaagtctacaaattgtcattcagcaaatttctcagttctttggctttaaattatttcttttaataaaaaaaattgtttaagagacgctgggtgccaggtatggggatggcactgtaatttaaaaagggtgatcaggaagacctcgttgaaaagtgtcacttcttttttttt

SEQ ID NO: 15080 - DNA, 1048 bp, Homo sapiens
agccatgagctaaaagcttcaagaaatggcagggagtgatgggaggattgaggctgatttttgcaccttctgttacttggctgagaccaaggcgcctcttcctggggaggtggctgagctctttctagcaggccctgaaatctccagaactttggtcccagctgcctaagcaccccagtccctgcccccgtggcagccattgtcagatgttcctgccagccctgagagctcaacacaactcaggaggcccaggcatgctctgcccagtgctgcagggggcccagccacaaggctgggcagaggagacaggtgacttctgatgcggggacctggggaggcttcctgcagaaggtgccacgtgcagagccctgaggatggggccttcacctctgacctatggcctaggatgagtagggggcttcagaagagggaaagaatagcaaagttgaatttgagatgggggtatcagagagtacccactcccataggtttgtgtttgtttgtttgttgttgttgttgttgtttttgtctccaggcagggctgctgtagcagctgtggtcggaggaggtgagtctctatgggaaggaactcaagcccccatcccccgcctccccccagccctgagcctctgggagaaactggctttgaccaaacccaggattctccaagacatagctgggtagcggtggagtgggcagagtgatggggaccttagagcagcaggaagcaaagcaaagccattaaaggcacagggctttggaggcagccagagctggggctactctcagcttccaccaagtacaaaccatgcaaccccggatgagtcattggagcagtcacagcccgggattcctccccgtctaaagcagggcccatggtatccttggggacttttgaagggagtatgtcagctgagctgtgtctcattcctcaaaagtatttgacaaatgctggtagcccatccactgagtcagaagcttttgacctgctataaagcagtgtcctccaatgcaatggccaaaactaaagaaaatcataatgtttctc

SEQ ID NO: 15081 - DNA, 1044 bp, Homo sapiens
caagttcagttttctttaaagttgaacaagaatttaaatttgcttatgaagcagtctgaaagcatggttctaggtttttatgattttctacttgtgttttaaaagttttgttcttccatactttagtagcaattttctttgacaacttatgtttattgaatttagtttttctaaaacttttaacttaatttgatagaaacaaatatatgtgttcatatatttaggtaatatttaattaaattatgtaattgcaacagcaagtgaaatttgaaataaactagtttgagaacatacttagctgactcttaattacaactcaattagtgagagtggaattctgtgggctttccagagagtagcctattagcgacgagctttcagcttgcagttgcaagggagtagagagtattgcttaatcaggtcttttaacatcttgtcacatctcaaacacctttgtttgagagagatacataccatctcctttccaagtgtgctctgtgatgatcttgcttcattcttgatattcctctcctgtctctctgttgtatttgttcccatggtctggtttgttctttgtttgcctttatagatttaaaaaagtaatgaatttggaatatcagttaaagaagtactttcataagcttatattttattttttaacgcgaactttgaatgtatgcagaaatgtgcacaaatcataatacagcttgttgaattttcacaagtgaacacacccatgtacccagtatccagattaaagcatagaacattatcatgttagcttagtagcttcctttgtattcctgtcccagtgccctgtacttcctgcaaagggtagctactctactgacttctaacactatacattgatttacctgattttgcactttatatagtaggaagcactctgtgtaccttttgtgtatagctgcttttgctcaatattttaaaaaagagatttatccatattgttgcatggagcaacagattgttcattctcattgctgtatactattccattatgtgaatataccacaatttatt

SEQ ID NO: 15082 - DNA, 1035 bp, Homo sapiens
atgatgaaccaacctctcattcttggaataaatcctacctgttcattatgtattagtctttttatatgtttctagactctatttgctaatattttgtggaggattttgtcatttatattaatgagaggattaatcttcagttttcttataatgtcttattttgattgtattttatgaagatgaccctacaatcaaaatgccttgtattctgttacactgcttagtttcttcattattactacataaatagcatatggacctagtctttggacaacatattgaaatcttgacagggatatgtctatcttgcctaatatatatatatgtgtgtatacacacacacacacttatataaacatttatatcttgatatagtacctaaattatttgctgttgaattacatatgttgtaattaataattatatttccttagacatttgtatagttgaaatttgctaagagagtagatcttaagtattctcaccacaaaaagtcagtatgtgaggtgatggacatgttgattagctttactgtagtaatcattttacaatgtatacatatagcaaaatatcataatcactttgtagcctgtaaatacataatttattttttctcaatttacaattaaaaagggttaaaaaatcccatcacattgtatatcttgaatatgcagcatttttgtcagttatgcctcaataaaactcaaaaaattattttagaataactagaggactgataattcatatattgttgaatgataagtatgtctaaaacaattaccataagagaaatcagggagaaaattgactttttttctcttagagaagaaaatatacatatgtaaaatttatttaaatgaatagttatttaggaacccatgagagagattataggatcaatagtttttaaaaatttgctcttgctttgtggagatgacattttgaccctgatagtaactagctggttgacctaagttccataatctctgtagatgttggtttcttcattgtcacaatgtgaaggagatgtatttt

SEQ ID NO: 15083 - DNA, 1078 bp, Homo sapiens
ggccacaagccaaggaatgatagcaaccaccaaaagctgaaagaagcaaaaagcagattctaccccagagcctctagatggaatgtggccttgccaacactttgattttgaccaggtgatactgactttgaaattctggcctccagacctgtgagagaagaaatagctgttgttttaagccactcagtttgtggtaatttgttacagcagccacaggaaactaatgaaagtaacttcccatttcagatataatacaaccccctaccgtgtccttaaatcacccccatctacctttgtgacctcatcatctgccagtcttttccctttctttcataagggcagaatatttgtcagtctagtttctcactatacccccggaacctagaatagtgcctggcagataataggcactcaaaaaaattttgtaaatgagtgttcattgaacttaacatttagagacaatataaatatctacctgaaagaccaagggaacattggcctgatccactgatggcattcttggatgagaagtaggaacagaatttgtttggaaatttgacacgtacatgtagaatggtatataacgctgatttatgttcgagagagactttttgggggtttggagaggatttgggaaatatataataaagaaaggataaaagggacataatcaatgtgaaatgtgatttccttttatttcggtgcatgcccatagtctcagctgctcaggaggctggggcccaggagtttgaggctgcagtgaatagttactgactgcactccagctagggcggcatagcaagaccttgcctctaaaaaacaaaaaaaaaacagaaaaaaaaagaaagaaataataggaaaaaataataatttctcctaatatgattatttattatagaattttatgtctcctgtatatgggtagatttttttaacatcttattctagagtttttacagaaagcattcactttataaatacatttgtaaatagaaagcttaactttacttttttaaaagtcctatttcaagtagcatagttaagtgaacaaacaacacagattgagcattcctaatcc

SEQ ID NO: 15084 - DNA, 1047 bp, Homo sapiens
aataattcctataatgtaaggttgatagaagataatcatcagggtcagaattaagaggtcttgtggtttaggaagcataaaattatgtaacttattgtttatttcactcagaaaataaaagtattaatgaaaggaattagagatgaacagattgatacaaactgttctatggtttacagcttaaaaaataaaggtacatttaatgctatgcattttgagaataatgtcttttatgctttttctttttacatatatatctatttgtatttaaggacaaaatagattgacattactaattacttcactattaataattaaagttctgtgaaacatttactgagtatatagtttttctgggtatatatagttatattagctggtatgcattatagacctaaaaatattgcctttcagtaaattcctagtggacaccagtgttttcacatatgcttcctagtcattcagtcatttgttatttttaccctatctgcaataaaaacgaacagaaacttctgaaattactttaaatgtgtagttaagcttgtaagtgagtaaggaatgatactagggctcaaaaacaaagcaatccgtttcacttccatttaggatatagaaagctgcaagagaacatcactcttattctaataacagtaggttatccacaaaatccacacagtcataacttcttgagcacatcagagttggtcaccaggcagccaagtgagctgaattctcaagagtaacaaacccctcttaggatagatgggacacaggaacattgacttggcagagcataggaggaagaggtgcccaccacataaagtagttagcagtatcagctaagattttaacacatttttaaagggtgaatgtgcactcgcacagtttatgtgtttaggataacttgtagcttagacacagaggagctttgcatccatttgcaagctcttttccatacgtttccactgtttgatctgtgagaaagactaggggacaaggcaggagattggagagcatctcccttggtgataaaggtgtggtggtgat

SEQ ID NO: 15085 - DNA, 1093 bp, Homo sapiens
cagcctgggtgacagagcaagactctgtctcaaaacaaaaacaaaaacaaaaacaaaaactcgacacatatatagtgaagacttctacaatgttaagatttcccccgctcggttggaaaccctgaatttgtgtgtatgtatttgtgtaaggtaagttacattttttattggtctgcgtttttctgtcatgcctgtgtacttgggaaatctgaaactgagtgtcttaggaacttcttaaagcaaatgtgagggaacattaaaaagtatatttaaaatatagaataggtccattttctaccttaaagagtagtatattaaatacaattattatgctgttgttgctttgcagtgtatgtggtgggaagaaggcaggagttttttatctgcatgctatatgaatccttcaataataatgtacctttttattactgggtttggccatattgatttcagtgagtattgtgctctcacagacttatttttccagatttcatctcttaaaagtgggaaattggactggatgctactttattcctctttctactatttttccacaaacaaatctgactaattgaacacaaacaaggtgacttaagaatgtcagatagagttagtcctctgtctttggccctctagggcctagaattgcctgtcccttcataagtgtcaattagtactcttggaatgaatacaggaatgaattttattttattaatatgcagtctaaatactgacttttcatcagtccaggttatggaatgatgaaaagtcagtatttagactgcatattaatattattacctattcacattactctgaattatattaaacaactaatcaataaatgaattttaggtttttttaaacattagatagcagacagacagaaatccaattaggcatttagttaacatagttcacactgtaaatcagctctattcaggattctctgaatatagtcttttctgtttctgtgacagaaaataactgcctaaggaagatcagggatatttacgattttccttttcaccctgggacaaagttcatgcttatattctgtttaacccccatgggtagctgtagtgcatgctgt

SEQ ID NO: 15086 - DNA, 1045 bp, Homo sapiens
cgccctcactccttatggctctaaggggttgggtctgttctcaggttctgcgtgtgtccctgattcctgaagctacctggatgctccctgagagcaggagctgcttctgaaagaccatggatcccccccaccccactccccatcaagcagccagcagagtgccaggggcatagcaggtgctcatttaacaaaaatagacaagacccgttgccagagacagcttttgctcaagtgctggagttctcaacccagctgtctatgagaataaccttcccaggagcatttgaaaaatgctcatgcccaggctcctcactttgtattaatgatgcagttggtctgagctggagcctggcaccaggcattttcaaagctgctcatggacactgcattgttaaggttcaccaccagctccgaattgtggctgcactatgtgggcacatgcccggtctttctgggcctgttcagtcatttgcaaatagccttgcagaaatgtacatggtgggtccagtgtgtgcctggcacccagagccactctggctaatgctgattcaaagtcgcaagacgattttgccctgttttggtggatagctcccctgtggagatgactgctcagggaaactggcagatttccagaagagggaagaggagcagccattgctgattggatcatccaagctgggttagcgtctggcttcgagcactggtttaaggtgagcattaaggtcccgtgggatgttgagagtgtttgaggagaaagaacacatctccttggtctagatctcctttcaatgaaaaatgccattttgtcagaaattcccctcttttgggatcaggcagtgcatttgatgttaacgagctctcattgaacacacgctatgtgctgcatttgtgcaagggcttggggaccccctaaatgaattagacaaattagacagtcatgccctgttggagcccagtggcttttgggtccccgttccccaggcaccttaacccaggacagccacactagcaggaggagggcggggagggagagattcacacgtga

SEQ ID NO: 15087 - DNA, 1029 bp, Homo sapiens
attgtttcccattgaatccatacaacagtaatcaggtgggcattgttactccattttgtagacaggaaagctgaggctcagaaacaatagagtggggccatttagagcatggccttggcgaacatgagagaatcccagctctctcacaccctgaggaaaggggagatgtttctcccgctcgctgattccactttgcccatttataaaatgtgatgatagtgtcttcctctcttctgttgttgcaagcattacaattattgatggacataaagtgcttagaacattacttggcccctgggaagcagtcagcaatgctaggggctctgctgactgctttaaatgtgaccacagtcactcagcaagcagaaagagatgatgacatcagcacgattgtccctgtgcagaaagaccaagctcaaagcccagagaccccttgagatcaccagcgacaaacattccacacagatcacaaatgagcattgttctgctcgcagagttcttgctcagttacctgtggaattattctccccactttacagatgaaaaaaattgacattcataaaaagccctcttttccttaaggattgcaaacaaaagcctctttcagccagtgttcccgttacctattgctgtgttacaagccagtctaaaacttagtggcttgaaacagaaggtcgttattatctcatggggttctgtgggttgactggactcagctggtggttctcactttaggtctcctgggtactgggggcagatggtggctggggctggagccactgggctggcagctgggctgggctggccggcacagccagggctgtagggcttctctgcccatttctctccacctggctcgctggggcttcctcacagcaggtggcctcaggggagttggatactggcatggcagccagcttcccaagagggagtgttccaagacacaggaaatggaagctgctgggctgtaaggctggcccaggaacttgcatgagctctcacccaaggggagggaacatggacccctgc

SEQ ID NO: 15088 - DNA, 1029 bp, Homo sapiens
tcccataaatattcttgtgctttgttctgggatgcagttcagatgcttgagaacagtttgatttttgcaagtactgtttttaagatttgttaggcaggatcaagccaaatttaatctaagagtaattattccccatcacaaaggcaatgctgttctgagtattctacctgctcagtgtctcataaatgatgagattttcaagatgggtgatggaaacaggcactatttctggccctatatgggttccaggcactattttctataattttttgggtgattctttccctgcctcaggcagtttctgtacaaacatgcattcatctgtcctttgttgaatgtttgagtggtccctctctcaaaccccagggttctctctgtgggcggctgtcttctctccatactctgccatgtggtctccagctgcctcactctcctcagactctcacttccattcttcaactcagagagtccattgagccctgcctgagtttactgctccatggcctggaaactttccataggcagtaaaccggagcacctgtatggctcatcttgccaatttcccatctctcgagggtcactgtccttcattgtctgatgtccggtgtcttgaaaatcattttcatgtattttatctggtttttcagttgtttcagttgggagggtaaatctattccctattactccattttggctggatgtggaattttcataaggctgtgcttttaacagctatatttccaccgttcctccttttctcccgttgtgggaaaaggaatgttgacacttgaatctaaatctagaccattacccctacctcccagctatgggcccctgatccagccagcatttctctttctccctgtctcccaaatgccacaaaatgtgagtaacatacatacatactctacaggtcaagtgagcctggggaataacaagtgaggatgccaaatcatgcatggaccagcctaactcctttccagtctgccgttgccacttggagttcttccaggtatcctgtgacaggat

SEQ ID NO: 15089 - DNA, 1054 bp, Homo sapiens
tttaagtttttgctatttgcttcattatctatgaacttcgttcattgtaagccagatgccaggtttcatttggggaatgtcttatattggtaaagtagcatttctgtagcgtgtttatcaatgtttaagaaacagattttggcttcttttcaagaggtgaaatttctcagaagtttactatattctgaattagtgttttctctagcaatgtatttggtctggattctaacttagatgtttaagtagtgacagttaaaatccttggggcaggattttctctttggtcacttgcttttggtcactttttgtcaaaaattttgggggtattgcagggaaccaatcatgtttagaaatgtgtgttactaaattagtttttctggtcttactgatttgtttcaaattgtagaattcttttggcagtaattgtatccaattttgtttatagtccagttacaacacagggatcacaacaaacacaaccgccacagaagcactatggcattacttctcctatcagcttagcagcccccaaggagactgactgcgtacttacacagaaactaattgagacattgaaaccctttggggtttttgaagaggaagaggaactgcagcgcaggtaaatagatattctatatttttttaactcggaaacttttattaatgttgacataaactaattttgaggcattctctacttacttagaagaccagggttatttgcccagatctatatatctgttttggagaagagggatacttaagagagaaaactttttgtttttgagacggagtcttgctcgttacccaggctggagtgcaatggtgtgatcttggctcaccacagcctccgcctcctgggttcaagcgattctcctgcctcagcctctcgagtagctgggattataggtacccgccaccacgcccggctaattttttgtatttttagtagaggtggggtttcaccatgttgggcaggctggtctcgaactcctgagccttggtctcccaaagtgttgggattacaggcgtgagccaccgtacctggctgaaa

SEQ ID NO: 15090 - DNA, 1033 bp, Homo sapiens
tggctaatttttttgtagtttttgtttttgagacggagtgttgctctgtcacccaggctgtagtgcagtggtgcggtctcggctcactgcagttctgcctcctgggttcacaccattctcctgcctcagcctccccagtaactgggactacaggtgcccaccaccatgcccggctaatttttttgtatttttaatagagacggggttcaccgtgttagccaggatggtctcgatctcctgacctcgtgatccgcctgcccaggcctcccaaagtgctgggattacaggtgcgagccactgtgccagacctgtattttttttatagagacagggtttcgccatgttgcccaggctggtcttgctcaagtgttccacctgcctcagcctcccagagtgctgggattttttgtttgtttgttttttcatagaaatgccttaaaagtagtttgacagatatggaatgttgttttgtttgtgtttcagattgatattttgtttgcaagattagcactgcagacaattcctgaagatttggatctacgagatgacagtctgctaaaaaatttagatataagatgtataagaagtcttaacggtatgagaaagcctacttccttttgtgtacttcagtttttgtcagatattagttgtttttacacaagttttgtattgaagctttttatagctatattgttaacacagtagtgagttaaataaaatgaactttgcctaataaactacagaagagtatgtagtagtttatttcactctacagtattttatacactgtatttcttctgtcattaatggtatactcaggacacttaaaaagaccatctgacttttgtactctgttgctagtgatttaggtttcatggcctaacccaaattaattttgatcctgttattctttagtaatgctttcagcattgctgagatcagaaggactactttggtacaattttatattagcatagcttgttactgtgctcttgaagagcagttcttggaaactttagtggattaagtcttc

SEQ ID NO: 15091 - DNA, 1365 bp, Homo sapiens
ggcacactttctagtaaggttgccaaaatccaaattgaagcagatcattagtttagatgaaatctttgattctataaaaaattcctataaaaacaatgtctctctacatggtttttctttctcaactccagctatgaatgaaataaaaaatagaatcattggttcagtttaacaaggggtaaaaagcccaagtatctgttgcatatgtacttgaagaaactgattggctgttgttgtatgtaggtaaaccccagtgataggtaccatcttatgcctataattacaccagcatacccacaacagaactccacgtacaatgtgtccgtttcaacacggatggtcatggttgaggagtttaaacaaggtaagtgtttatccttatgctctgatttatacaggaaggatttacgtaccattgtagacccagtagtcagctgtgcaacttaaattgaagaaggattcactgaagtggattttggtgttcatttatttattacagtatatatttgagaactgacttcaaaaaattaattccttttaggcaatttgttttttataacaagttggaagattaaccaacagttaaaaccagtaagctggtttagttgcatactattgccttgtaaaattataaatgataacagtttgtctacactggttgaaatgagagatgtttagcaggctgtatactcctgggaaagaactttgagcaggaatggggccaaaccacccaattacattccattattttggaggaaccttttaacttttgaaccctagttgtactgttaatttgaaggtatagctactaccaaatagtctttgagagaaataactggaacagattggtttgactgaaaacagtaaaggaaatagaatcagttgtctgactactagctttaaatttagacgtttaaaattcctgaatattttacactttagtttcatctttagtctaaagaggcccatcaagggaagatgcctctatccctttagaaacaacagggaaacttggttttagaaaggcaagaaacaaagtatattggaaagttttccttctcgggtaactggagtgtttaagaaagaaggtcattctatgagcatggcattttagaataattgtactttaccagaaacctggttctcaaaaaatcttccagctttttaaaaaaaaaatgtgtatatatataagagtatgctctaaaatcataagctaaaactatatatgttaaaattctggttttaggattatagtgagtgcatgtagtatgattaagattatttaaaattctagattgtagactgaagtatgcaaacattttaatatgtttttaatttaggtcttgctatcacagatgaaatttt

SEQ ID NO: 15092 - DNA, 1079 bp, Homo sapiens
taatgcttgaagcttttctgaccatttgatcttgtgttggattgtgttttgtaataatctaagcaagattgctttatgctcttccccaattaaaaacaagaatgatgaccttcatgatgtctctgtgttttgtttctgtatcttttgcatgagaaagcaataacggagccagtaattgtgttctcgaagcactacgttgtcagtaaaaattaaaatagcataatcattaaatactcttattttactacgaatccccccataaattgtgatttctgtttgacagataatttttctttgtttttattttaaccagtgtagaggaagtaccttggaacatttaaactaataaacatgtatgtagatacttttaaaactatgatataaaagagacacagttacatgtaaggagaagaataaaggaattggttttacaggaaagtgctagtaccccttaattcctggaatcaatgatgaaactagattcaaactttgttctattcactttcgtataggactgtgacggggcttctttcactttaagaaagattaatgtttacactgaacaaaccttaataatgtcattttatttgaacaaattcacatcattagaactttggtgctttttctaaagcttgcttaatgtttcttttaaaagttttaaactatgcttcagtccttgctggatagtacctgtaagttctttgactggttaaaagatatattactaatcttcactgaagtttttgtgaaataatcaaatttttttaggttgtaaaaaaagcagcaacaaatagaggaaattacatcaggaaaatttgcatttcagctgagtgtcttgtgaaaacttttaaaatatgacaatgggctagttttatccataccaaattctatttatatttttaattgttctccagaaatttgcctctttaagataaagtgatgactatcattaggcttttggaggtgttcacagatttgaatttttaaagacatcctcatataaaatactccaaagattgactgtacaaccaaatggaaatgtttagtcttcccatgagtcacaagttgattcaatctta

SEQ ID NO: 15093 - DNA, 1048 bp, Homo sapiens
atctctagaaaaaagtaaaagaattaggtgtggtggtatgcacctgtagtcgtggccactcaggaggctgaggtgggaggattgcttgaacctgcaaggttgagactacagtgagctgtgatcccactgctgtaccccagcctgggcaaccagagtgagaccctgtcttaaaaaaaaaaaaaaaaaaaaattttgagtctcgctctgtcacccaggctggagtacaatggcgcgatctcggctcactgcgacttccgcctcccaggttcaagcgactctcctgcctcagcctccggagtagcttggattaccgtcacctgccatcatgcccagctgattactgtatttttgtggagacggggtttcaccatgttggccaggctggtcttgaattcctgacctcaggtgatctgcccaccctggcctccccaaagtgccaggattccaggcatgagccaccacgcccggcctgtattacaatttaaccaatggcagaagtgcgggttggggaggattccctggatgagtgtgaaatagaaaatgctgaggtgttgtggatgtgtttttttctttcttttggacttcatgtgtatatgtttttaggcaaatcatgcataatccaaagacttcaggcctgaatatgtcctgtaagtgttatcattttaaaagtttttttttaagtgaagaaactaacattttaataagaattttgggatctgtgaaagtctgtgtcctttgagtgtgtgcacaaatataaaatgtgtacaactgtactaaataatttcacaaatttagttttgaagtttagtttcttgaagtaatactaagtaacttctgtaaataaaacttctgggtttttagaatacgattgtatatttgctcaacaagcagtgagtgtttattatgtactaggcaccttgctagccatttcaggctttcttcagcatctgtggttgttctctggccaactatccttttctttttagtcatttaatatttgtgcccttgagggctctctcattattcttttgtctgtttatcccctctt

SEQ ID NO: 15094 - DNA, 1025 bp, Homo sapiens
ttttgctaagaatgtatttagtaatttacttactacaacacaatttctttagagtggaaaaaaaacccctctagatttctcatggattctattatgttttgattaagaatggtgaaaaattattttattattttattatttagcttattctctgaagactttttctttcttttttttttttttggaaatagctgctattaactaaaagtaatctgatgaattttgtcactcttaagatggtaaatgagaatgaaaaacgggtattgtatagtactttaaatcccccagattacttacgatgcctaatacaatgtaaatgctgtttaaattgttgttatgatgtattttttaatttgtgtcatttttattgttgtattattttttatttttctaagtatttttgatccatggttggttgaattcgcagatatggattccacagatatggagggcccactgtaaataatcataacttagaagatgtgttctgaaaactcatctgtgtctgtgtaattatctcttagggcagtgattttcatcattggttgtacaacagaattagtttttggggttttttttgttgttgttgtttttcaataaagattttagggctttctccaaactgaatcagagatcttctagaagttaggcctggagatcctattaagagccctgctgccacatgattgggttgtgcagcagctaaagaatatactcaatttttgtgtcaattacacattcagactactgatactggtttgaagttgtcacggcatttcagaactcaaatttcttttgacattagtaaagtgtatttaagcataattctatgcatttaacatttggttttctttatgttaaaaatggcaccctaagagctctaaataagtttgtactagtgcagtattttgcaattttgtttgcacttaccttggtagaataacacttgtgtttcttgtctggtttagaaaagcaataagaatatagaatttttaaacttaagtatggaaaattaaaaatacata

SEQ ID NO: 15095 - DNA, 1051 bp, Homo sapiens
taaagatccatctctgtatttttttagtgttaaagaacgcttgtgatttaatctaattaatatgaaaataatctacctaaaatttaggatgattaaattattgcttagctgtatatatttgtttaatttacagtgtcagaaaataataaatttactgctgcttctgtatataaaatgagctttgagtattctcccacttgggggtgctccaatactagttaatattacagctattagtgttgtaataagtgaatacagtttagcagtaacttaagcattatatgataggtgattcttagaggaacaattttaaaaactatttgaaattacttaggagtttttaaaatattattaaaatatacctatttgaaaattcctttgttgaacacattatttgttgaacaaataatgtgataggcatatttacattccattttgacaacattatagagtttttaaatttgtaatacttttcttcttagaaggtttcttaggaagtaaagcaatggaaaatacatctcattgttaaattatggtgctttgaacaatgttgtgttctttgctttcattctcagaaaacatccagtacagacctttctgatatccctgctctccctgcaaatcctattcctgttatcaagaattcaataaaactgagattgaatcggtaaaaacaacctcaggggtccataaacaatatctgccaactcaacctgttgtcttcaaatgctaaaaaaggagaatggagggtacaagactagacatgactgaaatggatttgggttttttggtgacctcccttactgggctaatcagcacttgatcggaagtccaggttagtatgtgaagccaggagtactattattattgtgttagcaacagttgcattaactatttcaaaaattactgcctttaaaaaaaacaacctcaagctatatttgtattcataattgacatctggattgggtttatgtttgatgcattgtttggaaaatttgcaatacaaactggcataagaattacttattctgatgatgcacttttatgtatt

SEQ ID NO: 15096 - DNA, 1155 bp, Homo sapiens
tgattggtttgttttcttactgattttagagcattctttatatgttgtgtatacaaaatcctttgccaaatatatgatttgtaaatatattctctcagtctctggcttgtcttttcattctcttaacagtgtctttagcagcaaaaaagtttcaaattttgttaaagtccaacttctcaatatatggatcgtgtttttagtgcctatcttagaactctctgcctaactctaggtcaggaggttgttctcattttttcttctgttttacccttatatgtcttacatttagatccgtgatcctttttggtttcatttttgcacaggatgtgagctttagatcttggtacatttttcttttccttttgtccatggatgtccagttgttccaaaaccatttgttgaaaagtctaccctttctccattcaataagttttaaaaatcaaaaatcagttggccatatactgtaaattaggtatcaaaacaaagacaggaagaaatgaatgagcaattaactattaataaatacaggtttattgaaggtataacatggctggagtctggaaaaagtgggaaaacattttagagaataacatgggcaaagatctgttctagagaaaataagtaagaactggctatttttgggagtcatgcaagtgaagggaagtagagaagtaaaggaaggatcattggttcgtgaaaaagaaagagtatataaacttctggctagattgaagcatttgtaatcagtttcattggctattaggaaggtgctgtatattcttaatcaggaaaatggtatgatagaaatggtattaaagagaagttgttttaggaccatttgtggcagtgatacgttggtaggaagaacaggatataatcatgacccttgacttacaactttgttttacaaatatctgccagaaagctaaaaaagtggtgttacttcagaatgttataaattcctagtattttctagaaggcagtggtagatttcaaacttttgctgctgtcctcagtgatggatatggagaagtcagcaggacttccaaactgtttcgtatttatgctactgttattaagttgtacatttgggaaaaagagtagtttccgttggctcattgttgatgtgggtgacatttcttaccaggcctgaaa

SEQ ID NO: 15097 - DNA, 1025 bp, Homo sapiens
ctgggcagaaaggaagtaagaaaggagaccaagaagtggtggtcaaaaagttgggatgaaaataataggagtatcttgtaatgctggagtgactctgtgttaagtactgtggtagatacttgaataaaaaatgaataggacatggtccctgctttctgcccctgtttttgtttaattgttcagtttatggaactgcctagtcagtcattcctgaagacttggaagtcatcctttatttctccctcatacccttgcctctttgggttaccaagctccattgattaaaaaaatttttttgaagtgtaacaaaaaggtgcagaagcatcaagctcaattatttttaaagttttacaaagtgaacaccctgtaatcactactacccagatcaagatactcattttctagccctcagaagcccagattatgtggggatatcttgcagacagtagttactcccacccaaggtaaacacgattctgacttacataactatagttttacctggttttgaactcatgtgtaaatggaataatgccctctggactttttttttttttttttgcttgacttcttttactcgatgttgtgtctgagattcattcatgttgttgcatgtagtttgttatttttaaaaatagctctgtagttgtggttatctatccctgcataacacactagttttgattattggttattgcgtaacacaccactccaaacttactagtgtaaaataacaaccattttattatgctcatggattctgtggattgggaatttggtggttatggcttatcactgccctacaatgcttggggtctagaatcatttagaggcttctccactttcctgtatggtaccttgactagaacgtctagaagactgggatcatctgatactgttgaccaaacctacatgtggggtcaggaggttttggcttttcacagcatgttggctgagtaccttgactagaacgtctagaagactgggatcatctgatactattgaccaaacctacatgtggggtc

SEQ ID NO: 15098 - DNA, 1072 bp, Homo sapiens
ttcattttggttgggtatatatgtaggagtagaattcctggtcaaaatgtatatgcatctagcttgcttgcttgcttgctttcttttttttttttttttttctgaaacgaagtctccctttgtcacccaggctggagtgcagtggtatgatcttggcttactgcaacctctgcctcccaggttcaagtgattctcctgcctcagtctcacaaatagctgggattataggcgcctgccaccacgcctggctcatttttgtatttttagtagagacagggtttctccatgttggccagactggactccaactcctgacctcaagtgatctgcctgcttcggcctccctaagcgctggggttacaggtgtaagccactgtacctggccatgtgtctagttttaatagacactgccaaattgtttttcatccttgttgtacctatttatacttttaccaacatatgaaagttccggttactctgcagctttgcttcccttgatattgtcagttaaatattacaaaaaattaatcactagtggctgtatagaagatcttagtgtggttttcgtgggcatttctctaatcactgataatttgagcacttcttcatatgcttgttggccatttggataccctctgttataaagttcctgttcaagtcttttgtccattttcaacagattggattgtcttttttcttattgaaatgtggagtttataaggtatctggatatgaatcctttgtcgaatatgtgaattataaaaatcttcctgtcttacagcttgtcatttcactctcataaagtttttgatgaactgaaattctgaattttaatcaattccaatgtatccatcttttcctttacgggtagtgtttttttgtgtttaagaagtttttgctactctagggcgatgaagctattttcttatgttatcttctagaagctttagtattttgcctttcagatttaggtcaaagtccccaggaatttgtttgtgtgttatgaggtagggatcaagccttcttttacttttttcatatggttatctatacaagtagtaacaggtggcat

SEQ ID NO: 15099 - DNA, 1271 bp, Homo sapiens
ttctgtctcaatcataggatttttgggatcaaaatgaagaaaatatatgaggaccctctgtgtcactgggaagtggctttataaactcaagattctgtattttatttttcaaatgatttcttagcactaatcaaatgcattaatcaacttctgattagctggcacatttataagaggattgtctttagatgtattgctttcaaattgttcctgatgtaatttagcaaaggaggtgatggagttctttgttgactgactatctttcgtttgattttattctgacttactgtagtttggcaggaggccagttataccaaaatatgtaattacttcttaatcccaaataagtttgaaatataaatgagtcattttgtcttagggatatgatgggttgggaaaaaagtggtgtttttggctcctcctaaatcactcatgaatttattttttacccaacttctaaaatgaactggaaaggtcttttattaaaatcctcagatacggtagacttgtatgtaatagagcaattaaagtgaaaatgaatgacttaatgaagaaagtaagatgtaccagaatatctaggtcagtgggtcagtctgtgcatcacagtaccctgtgtagcatgaaaatataaagatgctggggctgttgtggagtaaggcctttactgttccaaagttccactgataattaggttggtgcacaaataattgcggttttggactgtgaattttaaatcattataactaggctcaaacacatctttatcaaaataggagccattgcagtcaacacatttttgccaatgagaagtaagttagtttattcctgtagtgtaaaaatccgtgttttgggattcgatgaactcttggaaagcattttctgcatcctgctggttgtgcaagcgttttccctgcaaaaatttgttgatatgcttgaaaaagtggtagtcggctggtgagaggtcaggtgaatatggcggatgagacaaaactttgtagcccaattcattcaacttttggagtgtttgttgtgcgacgtgcagtcgggcgttaccctggagaagaattgggccctttctgttgacgaatgctggctccaggtgttgcagtttttggtgcatctcatcgatttgctgagtgtacttctcagatgtaatggtttcgccaggattcacaaagctgtactaggttagactggcagcagaccatcaaacagtgaccatgacctttttttggtgcaagtttggctttggaaagtgctttggagcttct

SEQ ID NO: 15100 - DNA, 1067 bp, Homo sapiens
ttttctccctccctccagcctctggcttatttcacttagcataactgtcctcaagattcatctgtggtgtagtgtgtgtcagaatttacttctatttttcaaggctgaataatattccattgtatatacatgccacatttattcattcatctgttaatggacactcaggttgcttccaccttttactattattgtggatagtgctgctgtgcacatgggtgtacagatacctctttgagactacaaactttttcctagagatctgttaacttaaaggaataaacatcaattattttttcaaataaatgtcctgaatttccaaagatcttaattttattgagtagcacatttttaaatatataatttattttcacataataaaatttgtattttggtgtaagctgtggaaatgtaggtggtctgcttttttaacatgataaaaccctggaaaactgtatatgataaagtggaacaagctccctgaatgaaagctcatttcatcttgaaaaaagaatttactgtattcctcaaattgcctaggactgtgagtagcctaaatggtagactggaatccaggatactactgtattttgaaagcaaaaggaagagaatgtttcaagaaagaaagaatgagcagtgttgagtgcttctgggcaggcaaatgagatgattcagtgtcagctagatttcatagcatggaagtcactggtgacctcagcaagggttattagagaggaatcatgaaggcggatctcggagtgagttggataagtaggtgaaaggaaatattggcaagtacagacgattattgaaatggcaagtacagacatttggcattgaaagggaaaagaaaggatgatagcagagatagcagagggggattaaaaacattaattttttttttttttttttccctctgtcgcccagcctggagtgcagtggcgccgtctcggctcactgcaagctctgcctcctgggttcacaccattctcctgcctcagtctcccgagtagctgggactacaggcatccaccaccacgcctggcttattttttgtatttttagta

SEQ ID NO: 15101 - DNA, 1046 bp, Homo sapiens
gaactagaaaataaggagctgccaaattcagtgaaggtcaaacagggtatgggaggatgctgaaagggaacctgagacacagatgtcaggaaagctggcagaactgtgttctctaaagaaaggggcacaccctgagaggcacattaataagcctttgtctgggagaacaggaataggtgttggcaggcaggggcactagggaactttatggtgtgatgaaaatgttctgtctggtggtcgcacaagtgtatgtacgtttgtaaaattttgtcagtttactttgtgcaagttagtaatttattgcctctcaactccaaattcacccctttttgctctatttatatactcgagccagaccttttaaatattttttcttttcctggacagtgttagattttgtcagtagaaggtgaggaagggatactgcaagacttagcagagaaagtgcttctcttgttgccatgtgcttgtttttttgttcgtttgtttgtttttcttaatctcttaaggtgtggctgtcagctctacttactctcctgtaagcttcattagcaccctggtaggcagcttcttgctcccaccagtatctcgtgggcagcagattcctgtggataagctgtagctcactggccctacagagaactaccctaccgctcagtgggtcactgccacagtctgtccagtgaagtgttcctttcttgggcactctcccttagccttggagacagtaactgctccctatatttgctagttccatattccttcaaattgtcttttacatctattagcacttgacaactttttacaaattaataattttttatttatgttacattttcttgttttaattgattgtttgttttctagctcctgaatggacactgactgttatcacacacttgtgatttgtgtaccttacttactgtgttaattttacataaataaacaggatgaaataataagtatacttcttgattactttctataacatgaaccaattgtttaaacaccaagattgggatatagaatgctaccagatccctagg

SEQ ID NO: 15102 - DNA, 1027 bp, Homo sapiens
ccagctgtatttaagtcttttgtgtttctcaagatgctaaaagataagtattgaacaagtatttattagtacactgccattggccctgcttatacctggctgaagcaggccctaaggattgacagggcctttggttgcctgaggccacctgagattataggggccagcaagagcaagagggaatcctccacatctttttccattagaagccacaggagggagtttcatttagatacattttaaagaaatatttctgtcatagtggcctcttgcagagcagctgagtatatttcagtgacttcttaacgtttatgcgcaagacacagagctactctgtttaatatacaacatataagatgtgcctggaaataaaaagcaagactaataattcaaaagaaaaatgagccgaggttactcatagtttacaggaaataaagtacagattttgcttaggagtgttttcttttaatttttttttttttttttgagagggaagtgggaatggactgggcatgctcattgagtatgagaggatttccagttttgatcccttggtgaatattaattataggagcaataatcattttgttaaggaacctggtttcttttcatgggaagtggtattttaagactacaatttgtttgctagggatgctctttgctgctgggttgattattgtttctaagctttttagtgaatggggctaggaaatacaaagatgtgtttctgtgtatgtgtttattttaaagatacattctgaactaaaaatatttccaagtacagcatttttacctttacctattctatcttttatctctgtctctttcttccatatctgaatcctgatgttcagggacacaagagaatgatagaataataatatcacataattactcatttgcatcattccacatgtatgcacacaacagtcttagttaacaaaatcaagtatcacaatatgatttctggaaagttgccttttttgcgtatgttatcccattttttgatagttgtactatatctaca

SEQ ID NO: 15103 - DNA, 1025 bp, Homo sapiens
atggtcattctgggttgatttttcaaatgtatgtgatatgacctttcaaaatgtagttttatgtttaaatgaagttcaggaaagttttcttgaattaaatgatttttaatattctgttcccttgctttgattttctttgttatatgtatgttggtttttttgtgtatgttttcttaaacattttttggtcctttttgatttttttgtttttttccttttcactttctatttctcttgtcattaaaaagttttatttactcttatgttccttctcatgtagtttttatttccgaactgatttttgtctttcattttcaattattctgtcatctgatttctgaatttttctaattctgattgatgttagtctgtacataaagtgttttttagcttgttttgaaatactaatttatagctatcaaccttttgggaggcatgttttcttatgtacttttctaaagggattttttttctctttaaaaataccaacttagtgtggcactaggctttgatccatttttgttgctgagtttcgtatgcagccagttttcccttatatgcaattagttttagatagtctggttcagggtgagtgtatgtcattctctagatcccactcttcacttgtttttgtgtagtattccaaaatactgaggctaacttatagatccactttcatttgaactttctttttcctttcttcgtattatccttgtgatgttcactttggcttcatccctagcagtttctcctcagcctgaggctttgacctagaaggggctttggctggttagttttgagagttgtagaggcaacaggcttcagcctcttgagacctcaccaaggaccccttgcacttcctggctgtgggagtggcagagcccttcttctttcagttgcttttctcacagtgtcttgtgtgcttctaagaagtagctcctgataatttttggatcctaagatttatcagaggcaccatactttcttctgcttccttctttacagttgctgataccacacagatc

SEQ ID NO: 15104 - DNA, 1062 bp, Homo sapiens
tgattactataaggaaccagtcaaataagagattactctgatgatttgataaagtgggttgaaattcagaagggcatctgttttaatatttggaagtactatgtgttttagttgtttcttttatttggtttactaccataggtgtaaaagtaacctttcttggtgttttgagtctaggctagcttggttggcacagaaattccattttgcaagattttaccatgagtaaaaacacattaattaagagaactaattgacatgaagaaataagagacacttttatttattttgaagatgtttttgttaacttagagaagatttagacagcgaagatgcattagtattctataggaaaaaattcaatttaaaaagtccccagtaaattaataaggaacattttcagataaggagtttgtgtatttggagtgatagtgggtgagttggtgaaaaattccagttgaatctagtgtgtatgtatgtagcatgtctaggctcaaaactgagctcaaaactgagctacagacttctttcatctgaatagccatttcaagtgttgcatactgtcttaatcattcttattaaccttctttcttttctatatctccagtatgtttttagggaactgtggaacctaacaaatacttattttaaatcttttttgattaacatttatagaaccgagagtttgaaatcacacaacaaacacatgttcacatgcatactagtacaaattgagttccttcagtcaacgaagtgagttacacctgagggcacttgaagcccagtgtgaagtgacttgatcaagattacccaaccagctggtgtcatacctgcaatccaggtcttttgattccagtcagtactcttttcacaataaaacactgctttctctgaatgttatgttaaacttatgtgtcagtgagaaaaatgaatcaagattcatctcctaaaggatagctaatgggaaagaaagcttaggaattctgggtgtcaccagccttgcccagatgattaagccacagtttttcctgtcactcttgaaagttgtgctccttcctcaca

SEQ ID NO: 15105 - DNA, 1050 bp, Homo sapiens
tgggctcttctttgtggtaaggtctgtttttgccagtcctgataaagtagatataagtgtaatgaaaacaggaaaggaatgggattttggcattaattggttaaattaggtattgaaattttattaaatctgagaaatatcttatagccccttggtgatacagttaagatgattgctcatctttgcttaagggaaagcttaataaagatgaaaattagtttaaacatttttcttaaacttctgcaggctgagctatatatctgattttgtataatttatcacttatagaaatggaacttgagcaatataagaaatatagactaatatttctctgaacatttctaaggagtttgacttaatcttaacacagttataaacttaagtatcaaaattacattggacagaaaaatagatttgttggtcttttttgaaggttcattgaaaatatctcagtaattttaactactgctagtactaattaactcttatattttaaggaacccagtgacaatggacctctttttactgaattaaagttctaccaacgagctgcaaaaccagagcaaagtaagaaatacagtacacatacgtttacacttttaaaatgaccagttttttgttttaagccaagacctagagcattgtatcttattttatgactctttgttatttttttgctttataaattccacttacatgggatttgtgtgaaagaattctggtcttttaatgggtttgttgcatcaagattttatctatatagatacatagaatgaagttaataataaatgacctatgatttaggaaatattgttaaacattgagaattattgatgaaatagaacaggatatcaaggtagagagccagaacctctcctagtcactttggtcccttctgtccttcttccatgtctcttagatcttgatttcctggttgaggacttttatattgaggaagaaaaaccttttagattggtatgaaaaataggtcttcctgtagaagcaagtaaacattacataattagagagagaaactgcaacttcaggata

SEQ ID NO: 15106 - DNA, 1057 bp, Homo sapiens
cttagttattttatttattaaaagatgtttagacaagatgattttctaattttcttccagttcaaaaatgaatagaattctgagttacttgttcaacatcttgtcttttaatgttagtcaactcttccttccctattgaacttgtcatattgttatcatagaagcctataacatataaatgggatttttgtatcctactgacatttatttcagttaatatgtagtacaggggttaaaagcatgattttgccacatactagaggacaaattatcagttttcttctgctgtaaaatgggtatgataggagttacctactttatagagtgatgtgaggtttaaatgcattaataacgttttaagtacttacagtagtgctgtgtgcataccaggtgttcagtaaatgctagatgttatggtgttgatgattcataatcttcctcattggagatgtcctgatacattctgagtgtggttttgatttttattgatttactgaatgatttcaccagacaagttagaatctggaaaactattgaagataaaagtggtcctcagagcagaagctaagcagtgttattgcaaataggtgatgcttttctgtacatactgaaatataacgtgattattgaatctgagttttgggtgttgaaagtgaccttagaaagggtgagtccctgctctctcattttacttctgtggaaattgaggcccaggaagtaatgtgactcagccaaggtgacatagctgctttatgcaaagccagttatcttcatgttttttcaggatatttgtttttccccaaatcttggccattgagtgtttaatgtacaatccttttacgccatttaaacaatggtattgaatctggcttttgttaaagcatctcacgagaatcttgattttagcagaatgttgttactgctgaaatataccttaaaaataaggagaaacagtcacaggaaggaagctgatatccagaaacatgaattaattttaactatgagaaaaatcaatgctgtcatttttattcagcttgttttatttttaccgtgaata

SEQ ID NO: 15107 - DNA, 1691 bp, Homo sapiens
tttgcattctaactttactataaccatgaattattttttttagaggttagagagaaatatattgaaagttataaaatgattgtgttattcttttaggtgaaattgccaaatacatggaaacagtgaaattactagactacactgaaaaacctctttatgaaaatttacgtgacattcttttgcaaggactaaaagctataggaagtaaggatgatggcaaattggacctcagtgttgtggagaatggaggtttgaaagcaaaaacaataacaaaggtgaattttgttattaaattattctttggtcttcttgtgtttataattgcaataaatactaaaagaaagtatagcagtagttcaatgaagaacaataacagattgcatggcaattaaggcaaacattttttgtaatacagaaaatgtgtagagggttgtagaaaaataaatatttatatatttcttatgtttagtagcaagttactaaattcctgaactgattttaacttggaatactgatatctgacagggaaattttgatggtgcactgaattcataatttatatgttcttttctcccaagtcaccacttagggttcatcttgtcttggttgtttcttatttgtggatatggtcagagtatttaccagttgaaaacgggcatttgaaaaattaccatttgaaaatttccttgtttgttggtgtggtgcattttaccatttgaacattattttgctctgtgaagaaatattatataaagctatatatcagcatataaggggattaattgtttggagagaaatgttaaataatgaactttatggtagaagtattatacaagcatgtaaagaacttctggcatcactttagattttacaggtatgcattaacttactgatttgctattgattatttttgataattaacttactgataaacttactgatttcccttataatctgaaattatttaatacaatgtgttagctatttttatatgaggaaggaaaacaacttttagaagaaaaattttttttacattattaaccatttttactgtcattaactttgcaaattctaatagatttatttggaaatctcgtattccaaactgagaaaaagcgttaaaacaaatttttctctctttaaaatcagacgcagcacattgaaaagtttttatcttttcaattaacaaaggagataggaattttgaaattggaccaaaaatttaactttgccaaatagcaggtctctgtaatttcatcatagaatctgaaattatatacatgcatctacatatacttttttttctttgataagttttatcttaattgcatctgctccagttttgtggtcaacaagtgtgctgaaaactgtatctgtttgaaatgaagagggtaaaatggaagcctgagtggaattttttagtaaggtattatagtaaacttactctttgcatacatgcataaacaagcagcatgtttcttattgctcaggatagatttctctgcgttaatatttataggtagcttgtatagtgtttttctctaaaattttggtgattgagaagtaaagatctctgctgctatgtgagaacttgtccagagcaaccacctccctccgcccaacccccatccccctgtccccgcccctaccttcctttgcaaatccctttgttgtttggacttacatgctgg

SEQ ID NO: 15108 - DNA, 1059 bp, Homo sapiens
ttgtatactatgtattattttttagagttaatcatgagtctaacgtattttgtgttttttgtttgtttgttatccatgtcctttctcttgactttatgtttcagagtatatgctcaatctttttttaaagaaagcttctggatggtaaacttgtaaatcttgggaagtccaaaaatgtctgttttttccccagttgaaaactaatgtggctatatagtttttaattgaagacattgctttgttgccttctaacatctaattttcctaatttttgttttttactagatttctattttttccactcttgctttgaagcttcttgcctttctctttgtcctggcattctgcagatatctgtgcacaagtgtgtgtgtgtgtgtgtgtgtgtgtgtgtgtgtgttctagtttgtttttacactttaattagttatctttcttggtacttggcagacctttttcatctaaaggcttaatgcctgtcttagacgcttgaacaatttattttctgtgtatgtgaggctttcctttcctttccttctctattctgtccctccggaactcctaccacatgaatatgggaactctggaagctagcttcttttctccatgtctcctaactcttcgaccacatgttcatttccttaacgctgttttgtatagatctgtgggcttcttcttgcccatttgttacatctgttttgttttttagtcatattttaagggtactagttctttttttaatatgtcagcatattcttgttttattggtaagatagcctcttaaatcctttgagaatagtaattatgagacttttttatattaactgttttggcagagggattgttctttttgagtttaatgcctttctgttttggttctgtgatattgcttagatttttttcaatgtttattatctagtcatgttttttgttgtttgacttattttaatagtgtatacctcagtcaaagttggaatacctattttcctgttagtttaatagaattttcattacagacatctacttccagtgatttcagaaatgagtgaaatttgtggc

SEQ ID NO: 15109 - DNA, 1962 bp, Homo sapiens
tgggactggtgtgtgccaccacacctggctaatttttgtatttttagtagagacggggtttcgccatgtggccagcctggtctcaaactcctgacctcaagtgatccacccacctaggcctcccaaagtgctgggattgtaggcgtgagctactgcgccgggcctctagcaggatatttttagattattcctcaaatttgtctgtctcttttcaagtcattcattcatttcctaactctccatctttttatttcttctccctgtagttatgtttgacctttctctgcattttcttaaaacatatatgtaattaatgtccattcaaatattacagtttttgagagacttagaggaagatatgaaattacctctttattacaagaatagttcaatagttactctacaggtgcacatctgtatatgtgcaaaacactgtgccaaactcattaagggttagataaatgaggaaaaccatagtccttgccctcagggaacatacgtagtagaagagaaatagaggaggttatgaaaatagtttacatgaaatacacaaatgtgtgtactataatataactctggaaaaaaatacattaagaacacagcaactagaaactgctgcttcctactgaaagctcacataggagaccgcatagtgctgtggaaaggaaattgcaataagaataaagagctctgagttctagtcttttcatcaccatcagctgagaaatactgagcacattctctggcttttttccgtccctagcttcagttttttctgtgtatatagtagattttaactaaatctattagtttcataaatattgtggcataataacatgtttgctgtaaccttcatagaagatgtgtcctttttcttttagttactactaatattctattttcagccacttttagggaatgtaataatttaatcaaataaataaaataagattaactgattagtcacatggactgattagtgcagtgtttagaacaaagaactttgttctaaactgtgttctatagcacatatgacatatgtgctatatgaagcattttaaaacttctaggctgtatattttaagtttctaaagtagacatgtagacttttgtcttatgggatggacaaaacccaaataacactgcccgagtacgcatctcttagagacagccatgaatctgattggcttttcttagaagctgttgaaagcatctagaggtgatcttttgatgcttgacttgggaagcaaagaattggtctttggtttttgcttctgaagattttttttctcttttctattaaaacagctttaagtctacagcaggtctccaatcggtgtttagactattagtaaattatcagttcaaatgcatctagcctgtttgtcttcctgtttctaaattggaagtgagaagctgctaattaactaaactttagcatatctgaacacttcaaaaatataatgtgtaatatatatgctggtgccctttgaaatctaagttttgaagatattttagctgtgctgaattaaaagaatactcaagtttattttataagttattttagtatatcatacaatattttggtttcatattaaacgcaaaggcacctgtgagacctgatacagaatgtgacaaaaatcagagattagcatagtcactttgtgaagacatttttctgttcaaaaggaaccaaaatatgcactatctgaagcctaaggatgttgacaaataacaaaatgaagcatttggaaagattcagaaggaagaagctgggagcagattgcttagaattttactcattgccttataaaattgataacatacttaggtactactaaacttgaagggttttattttggttttttaattggtctgtagaccactggccctttctatgcagactacgtacattattagaaaagttgggcaggagttacctggctgaagtgtggattaatg

SEQ ID NO: 15110 - DNA, 1073 bp, Homo sapiens
gtttatggccctcttaaacttttaataaaaagtatgctaaaagagaaacaattattacaagtttttcattattgattcataaatagaattctaccaccaatgttatgtggtacaaacactgatttaataaatggggcaagacatacattttttccatttatcaaatagattatcctctccaccccacccatgttgtacaatgtggagagtatcattggcctgagtggtgatcgtgagtttgtaaaacattttgttttaaaagagtttctgtatgattagtcctgatggttaaaccatagctttgaataatgaagtatataaagcatgaaaagttagaggtggatataacaaatatatctaccatctgggttaactgtctagttgaaagttcttgtactccccctttcttccatccctcatccattcctttaggtaactactatcctgaagttgagaatattcttcctgtgtgttttgacacacccacacctatatacatttatacacacacacagacaaatatgtgatgagtttgtagtttacttgactgtcagatatctctctctctctctttaattttatatgtaagaagcgaaagaaagaaattgaagaaagcaaggaacctggtgttgaagatacggaatggtcaaacacacagacagaggaggccatacagacccgtaagttgaacagttttgcctagctgctttcataggtaaacacaaatttcatttcctcccattagatgaggggtcaactatttgggtcatgaccttttgattttataataaaataccacaagatttttatatagtatgtattgtgtcttttgtacacaggttagattattttctctccacaataattataaagttgagactgggaagcttccttcattttgcagatttggaacccgagacactgaatgattaaatggcagagctgccaggcgtggtgactgatgtgtgcctgtagtctcagctactcaggaggctgaggcaggaggatcacttgagcccaggagtttgagtccagtctgggcaacatagaaaccccatctctaaaataaataa

SEQ ID NO: 15111 - DNA, 1050 bp, Homo sapiens
ccctgccccattttgccagtgtcctattttgaaaagaatagtttttctgtttcaaaaatctacagattttttaagactccaaatgatggctttttctattgccccattcagaagctattagaaattgtatttaatcttaaatttttcaaagtcacaagaggttcaaatactttccatctccctctatttgaccattcttccatagctagctttctctatcacccccagaactgtgatcaggctttgtctttgatgatgttatcttccctactgaaagccacctggcagacaaaatctgggtggaggtaattctgctaaaattacgtttccattttaggagtccatattcacatgggatttttcatacaagtttactttttcagtctttggctagatggctgaggcaacatcaatgaaagtataagagcttcacatgtcttagcaaagcaacagctggatggtctctgatgatttttgttctataccagaagctgatagaaaaggacaagagaggtcattttatccatgttaagattataatgcagtaaaattaatatgttattgtatatgtaactaattgagctttaataaaaataaaactggctttaaaaatcatgtcacaaaactctctaagagatgagtttgatggcttctcctatggaagacaaagcaagaacagccctgctgtgtgttttttgttttgttttgttttgttttttgagatggagtctctgtcgcccaggctggagtgcagtggtgtgatcttttgggtgctaactttcccatgctcctgaattgcacatgtggaatgcaatgttcctggtaggcatctcatacaacccctagagaaggaaaggagaggggccttcaggaacctggtagaagcctgggcagagttggctgacgtcacttggtctggaatgagagaggatttgacattgcacacagtacaggaggcacctcacgtgttaccatgtgattcacttaaggtcttttctcttggactggtctatttccttagagaaggttctatctgttgcccagagggct

SEQ ID NO: 15112 - DNA, 1045 bp, Homo sapiens
aaaaaacccatatcaatgaggttaaaagattcaaaataggcatttttgaattccaattgtataaaagtctctgacgggagaggattttttcattgtttttcctttcttagtgttacataaaatactggtgtgtctcacagtggaatgagccttggtttgaagggaatacagtgatcctgcagaatgaccttctaagtcaccatgtaggccactgtgggaattcctgtggactgtaaacctggaagtggaattgtttgtggcacaggatgtctagtttggctaagtcgtgccatgtcatatcttcaccagcacttggcacaactcatctttctaatttttgtgagtctaatatgtgtacagtgatctttgttttaaatagcatttctctaattgctaatacttttgagtgtctcttcaggtacttgctggttcttttgttttcttcctctgtaagttgcctgttcttttcttttgcccattttcccattaggcctgctttttcttatctatttgcaggagtttcttgcacattctagatgtaatccattgctggcttagatgtttcaaatatgtttttcttttctatcccccagagctctttggaaactgccatgtgccttctgggcactggttaattacaggttctcagtgtgatgtggatatgggaagatttagctttgccaaaagagcaccctgccatgacctggcccctcagtgtgctgcgccttcccctaaagcagttcctgaaggagctgcattttgaaagagtgctcatgccactcaggagacccactttcagctctgcagttgccatgcaccagactggcaagttaaactttgcattgttgtttagaaacagctccctgtgtctgtgccccgggtgtctccatgaagccagctagtattttctgagcacaaagttgcttttaggctccaggcttccacagatgactgggggaagctcagatatggcagaggcactcagactagcacaaagtgtaatgtgaaaggggcaacagggagcagcttgccaggtgctgctcag

SEQ ID NO: 15113 - DNA, 1031 bp, Homo sapiens
taatggatttgctgtaaggtagaaagcttgaagagttcagggtgagtccaggggtggactggaccactggcagagtggtctctgtgggcagatggggggaaagggagagagcccaggcacttgaggacgtaatgagccgctgagcctctgaccttctttcctatgggcagacgctggctagctcctcaccaagcccctttccctttctcctgggtgtgccgccagactgtttcccagtctctttttgtggttaggtgcagacctgtgaatgggttctagaccataaattgtaggtggaggtgatgggcacttcttccccatccacagcccccagcccatcctctgtgctttttgcctttctgcatgtttgatgtagtttccatggcgacattgggagccacatattgaagataggggactcacaagatggaaggagcctgggtctctcaatcacgccttggagaagggacacctgctaatcagaaccctgcactgggcttcacatgagtgagaaataaagctcgattgtgtttggagctcagtatttaatcatctgtgagtttgtttttgcttgctgctagggatccttgaacgaatacaatgtgcctggagtttaccccaattctagtcttgtagttttagcaaggaaaacatttcctttaagagaaaggcagctcaaggcagagctttggtttatggcagccctgctatggtctcaatgtttgtgccccccccaaattaatgtgaaacctaatgccccacgtaatgacaactggaggtggggcctttgggaggtgattgggtcatgatggtgactaggccatgaggcctcatgaatgggattaatgcccttataaaagatttccaagggagcttgtttgtctcttctgtcgtgtgaggttacagtagaaagatggctgtcgacgaaccaggaagcaggccctcaccaggcactgaatctgctggcacccttatcctggacttcccagcctccagaagtgtgagagataaatttcttttgtttttaagcc

SEQ ID NO: 15114 - DNA, 1158 bp, Homo sapiens
cccagttaaaaaaaaaaaattacccaagtgtagtggtgcatgccccgtagtctcagctgctcaggaagctgaggtgggaggattgcttgagcgcaggaggtcgaggctgcagtgacccatgtccacaccactgcacttcagcctgggtaacaaagtgagaccatgtatcaaaataagtaaataaataggtcgggcacggtggctcatgcctctaatcccagcactttgggagggcgaggtgggtggatcacctgaggtcaggagttcgagaccagcccggtcaatatagtgaaaccctgtcgctattaaaaatacaaaaattagccaggcgtggtggcacatacctgtaatcccagctacttgggaggctgaggcaggagaattgagcctgggaggtggaggttgcagtgagccaagatcacgccattgcactccagcctgggtgacagggcgagactccatctaaaaaaaataaaataaataaataaaataaataaataaataaatagaaagaatagcagtgaaacttgtcctatctactcccgtgcctcagccattcctcctctacctaaagacaaccaatgtcaccagctgcctctgtgtcctatcggagacatttcacaaatattcaattgactgtatatatatccccttctgcccaatggcagtattctgtgcattctgttctgtgtaataatttcttcatttcataatatattttgaaattatttcatattgatacattctcttttgaaacatatcagtgctttctctttgtgattaaaatgtattctatgatagatgtgacataattaataacttcccattgatagacatttaggctgtttctaatcttttgtcattgaacagtgggcatttaatggaaaagtgaccttattttgttgtcccaggctggggcagcttggatatgctgtttatatctaaggtagagacaggaaaactcacttaatattccattcaccttcccacatttctcagcttccttgcaggtaggttgggtcctgtggtcagttctagcccatggacttgagaaggaatgatgtctgagacttctgggcaggggtagtggaaagcccatgtgagattctctaatctctcttcttctaccattgcaactaaagaggcagaatctcacag

SEQ ID NO: 15115 - DNA, 1082 bp, Homo sapiens
gccagattgaaatccatacggcctgacattaattgagtgctgccacatcaacgtattcaagtttcataaaccactgaagagtgagtttttactggcttgaattagaaatattccaaccctcttatgctaaaatggtattgtttatgtagcgattctttaagccatcattaagtggtataactcttaataaaatgcatttaaacagaccatatgcagagtatggctgtgtttttaagaaattgcattttttttttcactaaatagatgattacatcttttttcttgtggggagtgattcttttgtacaatatatttcagtaaatactgcttttcttttgcaaagagatgagacagatgcaagattactgtcaatttttcctgtcttctctccacccctccttcttttctggggggtgggaggagaccaagtggggaccgtttcaatatttgtcctgggagagagggtggtagtgggcaaacctgtggtcaattgcctgcaaggagtcactgtggtacttggttttattttaatgaagccagaatcaatatgctcaattccagtgagaattataaacagtgtgtcgttcagaattcctgagttatgaccgagatgttctctcctataggtgggcctcatgagagatgtggagtcctcatcacggggttgcctggtgattatggaataagcagcggacttacagacactcagcgtccaggcgcaccaggccaccacatcccagacatgagtacctgtgcaaaatgcattcattcctccatcttggacgagtttactgagcacctgtgatgtgccaggcactaggggtgctgcagcggaagagctaagcattgagggtttgtttgtttgttttttgttttttgagacagagtttcgctcttgttgcccaggctggagtgcaatggcgcgatctcggctcactgcaaccgctgcctcccaggtacaagcgattctcctgtctcagcctcctaagcagctcgaattaacaggcatgcgccaccacgccccgctaatgtttttgtatgtagtagagacggggtttcaccatgttggtcaggctgatcac

SEQ ID NO: 15116 - DNA, 1041 bp, Homo sapiens
ccactgagcggctacagcagagacgtggcatggagagtgtttgccttggccaaggatgaagatatttctccctagggtggtggatcgtgggctttaacttcagaaggacctgatttctagctttccctgtagcactgatgaatcagttaactgttccgagtcttcacgtggccatcttcagaataaagacactgatgacactgatgcagtaaagttcttggtatatttgcagatgtttgatacacactggccccccaagagtgtgctgtggcgaaggcgatgtgtaaactgacatttttcattcgctttcccattcattccattgtcccaagagcctgcggtttaggcagggtgtgtttttattcccattttagagatgagggaagtgaggcccagcaggggccgctggtttactgaagccttgaccctcagccttattttcatgacatcgcgaggccaccatggtggcttttgccaggctctgcagcctacattgattctgatagaacgtgggctcctgagggaacccatcaacccttgcctcatagctgtgacaggttttaggaggcctgccttctggaaagttccaagtagagagagaagcaggacccaaacgagagatgctgaactgaacaaaactgcatgtgaggcagcgttaaaggcagaggctttgggctcagacggacggggtgtgggtcctgtacccacttcctggactgttaacaggtcttctgagcctcagtggccttgtcagtaccgcggggacagcaggacgtaccctgttgggctgttgagagtctaaacaagctcacactctgcaaaggggacacaagaagcagctgaaatggcccctgttgttcctgttctgtttctttgcaaagagtagctcagaggaccagacactgggagtcccttcctcagggaggtccctttcatccacactaggtcacctcccacctcccttctccctcgtcaccctgttcatttccttcagagcattcatcacaatccgcattttccttgattgtatacttattcact

SEQ ID NO: 15117 - DNA, 1050 bp, Homo sapiens
aactgccttctgaatgccattatgacttgactcagctgggaaccacgagaggacgagatgacatctcttcaggatggtgtagagacgtgggcggagtgtgcagggctggcgtgcaaggggtggggacacgttgcatccatggtgctgtttgtgcaggtaagatgcacaggtgacaaggaggaggctgttttaaagccaaggcaggcaccagtgcctggataggactttttggtccttggaacgggttcccccagatcttcgtctgtgtcttggagagaggtcctctagttccgcctagccctggctgccccagccactgggatggaactcttttcaaccacgtggaagaaaacctgcccccagatcttgctggcgttgctgccgtgtgcgactgcagagagggcctggttcttagcagaccttgaagtgtcccgcaaagattggaaagtcccacatttgggttcatgtttctaacaggtactggtctaacaggaggagttaaaagatgggccctagctttcctgagcaaggcaggtgaagagcacaagatcgtgggaagggtgaggctggcctgaggcttatttcccacccatcagagaggccagcagctccatggccccttctcccccggaggggctcagttgcagggagtctctgagctgtgcccctgagcccttcgcgaagtcctagccggaaaccaggttcccacagcctcgggtccctggggctccgggtcagcctgagctgggttcagtcccactctcttcctgccatgagatcttgggtggctccctttctttgagcctcaacttctccatctgtgaaattgagacaaataacatgacccactgtattagtttcccaggcctgccataacacaaggctgcaaaagagcagcttaaacagcagaaacgtcctgcttcccagggctgcaggctggaagcctgcgtcagggtgtgggcagggctgtgctccctctgaaggcattggggaggctccgttccaggtctccctctgagcttctcgtagctccttggcttgtggctgcag

SEQ ID NO: 15118 - DNA, 1066 bp, Homo sapiens
ctgaaaaacaagttcactgattcagaccccacagggttttggttgggattaaaaatgtgggtgatcacctggcatttggctggtattcagctgatgaaagacccttcactatcctccctttaccccaccacaattgttcagcgagtcctgcatctccagtttggtttggaggtagcaggtgctcctggggcattcctgaatcccagccccctggacttgcctcttttggacctctccttccttgggggatctgagacacacctttgaggacaggggcagtgatttgcacatctgccgtcaatgtatttgatggcctagttccactcaccgcttccaaaactgtgttttattcttctcctaaattactaataacatgagaattgaagaatctagatgtttaaaatctgttaaaaactaaaaacctaggagcaaccaagatgtctttcgataagtgagtgaataaacaaacgtggtacagctatacaatggaatattatttagagataagaaatggactgtcagcttacaaaaggacatggagaaacttccagtccacattgctgaatgaaagaagccagtttgaaaaggctagctagtgtatgattccaaccatataacattctgaaaaaggcaaaattatggagatggtagaaagatgggtggtggctaagaattgggaggaagtgcagagggatgaaaaggtggagttcaggggcttttgagggcagtgaagctattctgtacaccactgtaatgctggatacatgccatttgccaaaatccatggaatgtatgacacagatggttaaccccaatctaaagtaaggactttcattattaataaggtgtcagtactggttgatcagttgcaacaagtgcaatggcaacactcatgcaaaatgttgacagtgggggaagctgtgaatgtgagggcaaggggaatacacaagaagcctctgtattttacactcacattttctgcaaacataaaactgctctagaaaatagtctaaataaaataaaataaaataaataaagttgattcctttgaagagcacaaatctca

SEQ ID NO: 15119 - DNA, 1918 bp, Homo sapiens
aaaatgtgttatatacatagagtgggatattattcagaaatattatttctttccttgaaaaggaaggaaattctgacacatgctgtgacatgaatgaagcttggagacatacgagaaaaataatctagacacaaaaggacagatactgtatgattccttatatgaggttcctagagcagccaaacttgtagagacagaaagtagaacagtgattgccagggtaggggagagggaatacagagttgttgtttaatgggtacagagtttcagttttgcaagatgaaaaagttctgaagattggccgggcatggtggctcatgcctgtaatcccagcacgttgggaggccgaggcaggtggatcactgtaggtcaggagtttgagaccagcctagccatgatggtgaaaccccaactctactaaaaatacaaaaaattagccgggcatggtagtacacatctgtagtccgagctacttgggaggctgaggcaggagaatcttttgaaccagggaggtagaagttgcagtgagctgagattgtgctactgtactccagcctgggcaacagagtgagactccatctcaaaaaaaacaaaaaacaaaaaactcaaaaaccaaacaaacaaaaagctctggatatggagagtattgatggttgtacagtactgtgaatgtacttaatgccactgaactatacacttaaaaatggttaaagtggtacattttgtgttatgtatattttactacaattagtaagaaagaagtgttaactatttatgagattgttaatcaggtccttagaaagagcacattaaggtatcatgggagcaggaagcagccccagggtttgagcttgtcttctgcccttctgccataggatgacccttgctggatgccagtgacatgctcttggacttcccaggctccagaatcataagccaaataaacctcttttctttataaattcctcggtgtgtggtattctgtttttgcagaaaatggcctaacaccctcccagggctggggacaaaggaagcaggtagaattgctagaacttagaaagcacagcagagcctgtggagcttgaacccagacctctgaggagcgggcactgcttggctggttctggtgtctctgagatgagaagggtgaccaaccattctggtttgccttgggatggagggaattcctagggtatggaactttcagcactaaaacttggtctccctagcgtggtgcacaggaaagctggtctgataggtactgaaaacattcaaactagattcagttccggctgcaggaaggaactgctgctgctggagtgaagaagcaaaacaggaaggacagaagaacaggaagtgcaagttcattttttctgcaagcctaccagggagcagcagagaaaacaaaaatgcagcttccagagcctaacccagtgtctcagagcagagagctctgaagggtagggtttgaataagagatgatatcttggtgtgtctgtcacttcactgattacttcaatccccactgatactttctaaagtcagggtgattcatctttgcttacaattatttgctaatttcttgtatcatgttttttggtactggtttccctgtgacacccacctggactccacccttcctgaggataggcagagactagcctaatttattttttagcccaataataaaaatgcaaattacctatcatgtgcttggtactgtgatgaggttttaatacttatgccatgtaattcttgccacactctgtccccttttcgcagttgaggacattgcagctcagagacattaagtaatagctcaaggtcactgctgtgatttgaatgtctccgccaaaactcatgttaatatgaattgccattataatggtattaggaggtgaggcctttaagaggtgat

SEQ ID NO: 15120 - DNA, 1050 bp, Homo sapiens
gggagggaatcccagaagtgcagggaagaccagcggattattcaacgtcagccagcacatcagtaatgggcaagcactttgatttcctggttcccagccaggacttgatctactagtccttccttctgtaagggccagagagtaaacaccaggctttgcggcagggccacgtcttgacttttgtgggtccttggcacttttaccttcttgagtccctttcttggtaagaaaatataaaaaatattacaacatattatacaatttttacaatattttgtctatttacaataaagacaaagatagcctaggttggatttcttattattatattcatgtttttcttcctattttaaagtaaattagaattaaaacatttttgtgagcccctaaaagtaactgaggcctgaggcactgtgtctggtgggcccagtggagtgctaggccctgcttgtctggcaacctgctctccccttttcctacccatctctgccgctatatggcaacagctgtcctggatggtataggaatgaacatgtggactgtgttcccgtcagaccttattgatggacacagcaataggaatttcctataattttcaggggtcacaaaggcttcttctgagttcttttccacccatgtacaaatcattctttgctcaaggaccttggaactatgccatgtaggtttcctgggcaaagcctcccctgacgttggacttggtaacatgagaaacaagttctaggcatatctgctgagaaataatattttatttttcctttatccattagggatggccccattttgagggagctgtccctttgcccaccaagtgctaatgacacagagaattgtgctgtctcccaggcctggggctgaggaggctgaaagcaacgaacagcacccccatcctctccagcgtttttctccacctctggtagaaaattgtaagggaagttctgtctttgtcatcctcatttcaatgcatatgaataggcaagcgcttcaggtaaaggaaaggacactctctctgcgccttctcccctggcactt

SEQ ID NO: 15121 - DNA, 1048 bp, Homo sapiens
gacccttgaagcagcaaagcagatcttctaacatatgttgcctggaacctgccctgcctctggtcctccacggttaggggctaatcaatcatctcattgttgaagccagtttgaatttgaacttgctgttacttgtagctgagattatcctaacccatggcagggatggcaaacattttttgaagcagtgtccaaaactgagcaaaggatgtcaaactatattaataaatgagatcattacaggtagccagtgccagacaagttgattgggctcaaaagccaagaggcaagttggaaaaggggggaagcacaggctgtggattccagaagacctagattcaaggtcctagctttacctcttgccagctctgtgacccttggcaagttacataccctctctgagccctctctggtttttcatggagtcctaatgcctactttgcccagttgctgaaactcttcacgtaagtgctggtccacagaccacctttagtggctggtaggtaacttgttcttagcttaatggacttgctcagggaagaaagcttctatttctccaatgtgtcaagtctttgggcccaattacctcgtagatcacctcccctcacctgtgcagacaacctcatggaggtggttttagatctgatatcccattttaacatagcaaccaggtcagactctctattattcatattctgcagtaatgggctcattaagcattactgtgtgactccatagaatctgcaacgaaaccaaagaccacttctccagtggttattttcttccccgatatgcttacactttttggaggtaatgccaacacatccagcgaggtactcaaatcctctttggagggagacaagatataaattattagtaagtaaataaataaatcatcatttgattctgtcagtttaggaggaaaaaaaatcagtcaacctgaagtttgctgtcacgcagaccccttgatggactgaattatgaacttttttggggaagaggggaaggaggagaagcatcagcattatgctgctgtctggaagttttg

SEQ ID NO: 15122 - DNA, 1035 bp, Homo sapiens
tgagttatgcacacactcagatatccaaacagatgcatgaatgaatgggatacccccatccatctggcacatcataataaatgaattagataagaacagctggaaaaatattgagatcctttgccaatgacaccggcaaattctagttctatctccgagtcagatctgccccccacccccagtctgtccaaaagggtaataacgttggataataacttacattgtgcagggccctatggcttcagagtttacaaaaccctcttattgaaatcatcatcttgcagatcctttaaagctcagtggcatcaccttcccacctcagaggctgaatttctccagctgggctaaattgcttatatgatcctacatgttcctcactctctctggtctccagattgctatacatgctggtacctccagccctgtgcccttgtttccctttgtgcctgctcacccctcagatcttggcttcatcattgcttcctccaagaagccttccctgactccacgtctgggtcccctgtccctctgtgctcactaagcctctcagagcctcttccccaccatcgactattctacctccatcttttccaccagactgtgtgcttctgaagccaggatctgtcttacatatggcacagagcaggtgtcttcaaataagacattacaagaatgtggaatggcagaaccccataaggtggatatggtgtacctccttggacacgtgaagaaagcgacactcaggggcactgagctgacgcccaagagcacggctctctctcagatgccctgtgttagatgctgctaagatgcgatcttcccaaagtagctttgattcctttaagcttctgctggcctggagagcatgtgccaagttgaaatgagcattaaaagaatgttgtgggctgagcagatcatgggaacaactgctatacaaatactgtcaaatggggcatgtatttaaaaggttagacaaaatacccccttggctttttcctttggttgtctttttatagtccactgcaaaacaataac

SEQ ID NO: 15123 - DNA, 1049 bp, Homo sapiens
cctgcaccacatccaccttcccgaggaacacagggatggggctgggcgaggtccagctggctcagctccttcatttaccaatgtgtgaactaacctcattctccaggacattatgatggtgcccagtgctgtggcactgggtatttgccggagctcatccagggaagctcttttgcatactgcctgacacatggttggtgctcagtgtaacctcatcttttttgcctccatagctgttgctgctattctaggctctgcttctatcatcatagagctgtgacacttgggaaagggcccttcacctttctgagcctcagtttccccatgtgattgccaagggcacctttaggatggccattcaatgactcccccacctggtttcacctcttctgcctggaccacaggcaaagggacaagcagcagcattgggacatctggggaaatgtcttcaatatataatatggaactttcgggggtctggcttcaagttcataacattggaggattaaaaggaaaatggtaatgaaatggtgatattagggaagctcactgggctgtagagatgggacaggatgccgtgtgaggagcagcctgcacaggcaggggctggggcaattgaatgggcccaggagtgagatgtccacaggtttgactcctggcttgaccgcacactaccatagacctcacccaagcaatttgacctcaatttttctcatctgtaaaatggagagataacagtatctaccttatactatgggtaaggattaagtgagataatacaatgacaatgaaatgcccagttagtggtgaacactgggtctgtgctagcacttattattgttattgatcacccatggctcctactctatagctgggaggaggcaagatctttgtccctggtgcggcccagatttaacccctacctcctttccttccccaaagacatgtgcttagctctgtaggtgctggggctatatctactgaatacactgaataagaaaacccagggctgccctcaaggggctgtctgtctccctgcagagtcagcc

SEQ ID NO: 15124 - DNA, 1032 bp, Homo sapiens
cccattcagaatcatttcccaaaggcctcacttcttcataccgccaccttgggaattaggtctcaagctatgaattaggacataaacattcagaccatagcagaaagaaaaggaagcatgggcagtgctgagatggattccacaggactgtgctagaaggaaaaggaagcatgggcagtgctgctgagatggattccgcgggactgtgtttagttgtgctctttctttttccacggcaaagcttgctgtttagggagttaatttcagattggaatatgagaagaaaatttatttatgtgactcttttcctttttggcattttctttgtttacatgactttttttttaagaaagttaaattttaaataatttatgaagctagagtttgggggatttatatgtataaaatttccttcaagcttctagagtatcggagtatttgtgaatgataaaaagaaaggtaggggaatgaggaagaccagtttattacgaaggccaaaatttattgtatctatttctgtgtgacctttgataacaaaaatcaagaacttttgtttcccttttaggtgacaggagcctgttgcctctttctggctgggaaagtagaagaaacaccaaaaaaatgtaaagatatcatcaaaacagctcgtagtttattaaatgatgtacaatttggccagtttggagatgacccaaaggtaagaatgataataacttcctgccttctggtcttgattccttatggtagtattgtacagttccacatgttgacagtgcctgtagcccttgtgtctgccagtctcttgagttcctaagagggccttctgtagaagttacttgatgcttttgtaagaaaggagggaagatcgtgtagcctacacttactcagtgcttccttatgtgcccagcagtattctaagtactttggggcagtggcacatttcatggatatgagcaaaaatcctcttaattgccattaggactctgcttcttaagtgcagtggtgatggcagggttacaactccagctagct

SEQ ID NO: 15125 - DNA, 1030 bp, Homo sapiens
ttttatgttcacagcaaaaatgagtggaaagtacagagatttcccatataccccccacccaacacatgcacagcttcccccattttcagcatccccccgaccaaagtggtacatttgctatgactgatgagcctgcattgacacatcacccagagtccaaactttacattagggttcattctcagtgttgtacattctgtgggtttggacatacgtatagtaacatgtagccaccattatagtatcatgtagtctattttcatagccttaaaaattctctgtgctccacctgtttgtctccttctccccgctaacctctggcaaccactgatatttttactgtctctatagtttcaccatttccagaatgtcatcgaattggaatcatataggatgtagctttttcagattggtctctttcacttagtggtgtgcatttagatagtagtatccattagatgatttttatcaaattatcacacacataactccctccccttctcagctgtaagatgcatgaaagcaaagactatctgttttgtctaatgcctcattcagtggcaggacagagtaggcattcagcaagtactcgtggaataaatgtcaaactaatggtctgaggaaatttctaaatcacagttaaagctaaagcgatgaagttcagccccattcatggtgttgtttttcctaactagcttgtattgtctcacaatagttatctttttctctgccaagcattatgtatgtatatacaaaatgtatagtcattctcctcattgctttgaggagttaacaagggcccagaacacttttatacatattgtggttgtgattaacactagtattttctaagtattgccaatgtgggtaactcttttgaacttaattataaatccattaatctgtttataaacatttgaacctattaggaactcatattaactataaccaaaaatgcagttttatagaaataatttcaccatcagataatgttttcaatgtgcatgggtatttgatttttactgagtag

SEQ ID NO: 15126 - DNA, 1431 bp, Homo sapiens
aattatggctgtaggagaactgttgctgcaattttatttttagagactatttacccccatcacagcagcaggagtcctctcccaagcaccaagccacagcagatgcgggggggcagtagggggtggtgtgctgcccggacagcaccagcccggcccagcccagctgcccttgcaggcaaggcctctttgaaacacacttgggttgaggtgctgtcacatgtctagaacccaaagttagttcatgtcaatattggaaataaacagaaggagtgagcaaaattggaacaattacaaaacagaaagttagaaatgttttgtcacagggtcagtccacctatcatactgaactctttgaaggcacagaccctattgactcatttgtctttctttgttacttggttcttagttccagtagttcctggttcttagaaccatgttctcggttcttagttccattcattaaactgctgtgaaatcttccagttatgatagagctactttttttttttttccagtatatttgagggaatgatgagttcagtacaggtgaattttttttttttttttgagacagagtttcactcttgttgcccaggctggagtgcagcggtgcaatcttaactcaccacaacctccgcctcctgggttcaagcaattctcctgcctcagcctcccgagtagctgggattacaggcatgcaccaccaggcctggctaattttgtatttttagtagagacagggtttctccatgttggtcaggcaggtgtcaaactcccgacctcaggtgatctgctcgccccagcctcccaaagtgctgcgattacaggcatgagccaccgtgcccagcctacaggtgaattttttaattagcttcaaattgaccgacattaaatgttagacacaagaacgggctacactccatgccacatgaaatgcaattgagttgacgtgcaggtctgtcagaggcaggaaacaaactatatatgaccttgaaggaagagttgcatttgagcagcgagagcagagggggaggatggagcaataagttggaagtacgcaagtgagcaaaggaattgagaatcaggggaaatggagaggagtctttctggaatgtgatgaattgaaaggcaatagcttctgataggatctaaaatgtgggttaggaccagatcacagagtttacctggaggactgtgagtttggcagaggcaagggaagccattggagatttagcaggggaatggcagagtctaaattcatttgagaaggagtcccctggcagcagtaaatagggcaagtggttaggaatggggagaatcttgctggcactcatgggaaacatggtggcctcagcatgctggctgcggggcaggaagggcagatccggaggaagctttatagaggaactcagctgcactgtgccatgccga

SEQ ID NO: 15127 - DNA, 1058 bp, Homo sapiens
tcctagtaattggccgggcacggtggctcatgcctgtaatcccagcactttgggaggccgaggtgggcggatcatgaggtcaggagatcgagaccatcctggctaacacggtgaaaccccgtctctactaaaaataccaaaaattagccgggcgtggtggcgggcgcctgtagtcccagctactcgggaggctgaggcaggagaatggcgtgaacccgggaggcagagcttgcagtgagccaagatcgtgccactgcactccagcctgggccacagagcgagactccgtctcaaaaaaaaaaaaaagaaattctcctagtaatcattttagactcttctacccactgccccatatctcagttggctcagtggattctgcaccccaaacgtctcatcatccatcccttcctccctggctcgggccctcatcagttctcatctaggctagggttgggtttggttttggcagcagacctaaagcagtcttcctaactctagtcttccatccgttcctttaaacaagcactcaagtactcacagcgtccattattacactgttttaggggttccagcgaaatgcgaggatgacatggtccttagccttaggaagcctaatttgtttctcaggagctaaacatccagtgttattttcacactcacttcatgacaacagtgataggttgttctaagaagtgtaaggaacaatggtagggtattgcagcactggggggcatgtatcagggcgggcttcctaagagaggcatccgtgagagcgtctttctagtctgctcactgcaggcgggtaggtgggagtggggagagccattcgggccagggaagcgtctaagaagccctgggtgggaaagaacctttagagaactgaaagaaggttgcctgtggtgaaagggaaaggagtagcgtggcttgcagtaggactgggagcgtgttttggggacatggtaaggagtttggtcttcttcctaggagcagtgggaatacaggggagaattttgaggcaagggagcgacttgttcacattttttgttttaaaagatcac

SEQ ID NO: 15128 - DNA, 1070 bp, Homo sapiens
tgctacagagccaggctgtaccagagtccaggcccatgaaaacaaagttcagggagactctgttgactttgctaaattcatgggttccttccttccttcatttctttgttcaacaggaatttatgtatctgccataagaagacctgtgcttggcttgtgaaaagtagcagtgacacttcacatgagtgtaacatctgcggtttatggttttgttgcagtgtttcatttcgtcctcgcaaccattcagtggaccagctggtgttggcccttttcatagatgaggaaactgagggctaaatagcttctccacatctgcagattccaatcctcgtggcttttcctgttctgcggctttcataggccctctgcattatttgttaagactcagctattttctaaccccaacccacttgaagcagtggctttttcagatacccgggacaaatcacgtgaccttgtggctcagttttctatgccataaagtgggattccttcctaatccttgcaactcttaagtgaaataatctatgtgactgctttgtgaattgtgaaactcaatctggtgactatagttaataataacatattacatgtttcaaaattgctaaaggagtggatcttaaatgttctcagcacaaaaaaatgatacatatgtgatgtgatgggtatgttaattagcttgatgtaatcatccacatacatatacatgtatcaaagcattgcattgtaccccctaaatatatacaattattgtcagttaaagaaaaaactctgatcacatggtaaagtatttctgattcttcttcctcttttcctacatccagatatgtctgtctgggatcccatatggtggttctccccgtctcttatgatgttcacctcatacacggttgacccttgaacaacgcaggggttagggggtgctgagccctagcacagttaaaaattcatgtataataggggttttttttttgtttttttgggtttttgttttttgaaacagggtctcgctctatcacccaggctagagtgcagtggttgatcacagctcactgcagccttgactcact

SEQ ID NO: 15129 - DNA, 1023 bp, Homo sapiens
catttcatagatgtttgagagttagagttctttcttgttatgattctagtcatgtatgtgttacccaacaatatttcattttatattaaaattacagatgcttgttagctcttttgttttgaatatttctgttcgctattcttatacagcagtcttccgttattcagttttgctttctgcagtttcagttacccacagtcagctgcagtctgaggatattaaatggaaaatttcagaaataagcaatttctaagttttaaattgtatgccattctgagtggcaggatgaaaccttgtgccgtctgctttcatccctttgtcccatgcacccacactgtagacgcccctacccatgagtcacttaataggagtctccgttatcaaatgactatcatggtatcacagttcttgtattcaaggaacccttattttaccagtagtggcctcaaagctcaagagtagtgatgctggcatattgttataattgttctattttattattagttatttattattacttaatctcttacagtgtctaatttatgaattaaacatcatcataggtcaccataggtatatatatacacttgacccttgaacaatataggggttacgggtgctaatccccacacagttgaaaatctacttttgattccccagaagttaactacaaatagcctgctgttgaccagaagccttaccagtaacataaacagttgataaacacatattttgtatgttatatgtattatatgctgtattcttcaaataagctggagaaaagaaaatgttattaaggaaatcataaggaagagaaaatgtatttactattctgttagtggaagcgggtcatcataacggtcttcatcctcgtcgtcttcacgttgagtaggctgaggaggaggaggaagaggaaagcattggtcttgctgtctcaggagtgacaagcagaaaaaaatccacatagaagtggatccacgcaattcaaaccagtgttgttcaactgtctaggaaaaaacacag

SEQ ID NO: 15130 - DNA, 1030 bp, Homo sapiens
catgcatttgtaactcacttatgctggttaatgtgaaccagacatggtctcattggtgaatcatcgaaagcaactgtgtttctttccattatttgtggtgagtttcgttttggcaaacactaagcaatggagaagatggtccatggagctggctcctcagcagtgaccccagggctggaaaaacttcaagaactgggcaggcagtccaaggccttggagtctgcagaaatacatgctcatttggctcttattccagtcacctgtgtgacctcctggggcctcagtttcatcaccctctggacaagtaggttggatgagatgccctttgaagacttgctagctctgttatctgtgactctgtgactatcctgaacccaacaaacagccaaaatcatctttcctgcctcccttacaaatggaaattccagcccaggagcgcttggaggcatgggtcgtcagcctggctgagtgtcctgcacccacacacatcagatgtcatgaaatcactgactctggcaaggaaactttccaaatcctaggactggtgacctccagaaataagtcattcgggggagccacatgtccaaatgttaattttctttttatcagaagaatggaaaacatgaattcatgtacttttaaggaataaagcctttgttcagaaaatgcaaaacgtgccaaatagactgtggtttcaaattatgtttcgttaaggaagaggggaggggaggcgagggggagggtactgaagaagggcagaaaaggcctttctcgggatctactttgtgtggacatcggcatctcatctgagcctcagcagcacctgccagatgggctttaggattcccacctgccagaggaggaatggaggtcagagaggtgtgagctggaggattaacacaaggagcctctgactccccaagcatcccagggtctgtcagacaaagaccaatgcccactcaggtggaagcagggcacaggataggatgtgagtggtcccaatctgtcgtctctcagctcctcctgcagc

SEQ ID NO: 15131 - DNA, 1085 bp, Homo sapiens
agtgtgtgcctctccttgggtaataaaggagagacatgccattttatagctctaaaggtgtgtttcctatggaacttaaagagacagtggaccttacaagagcttggttttggcagccgcctacacccttctccagtccttttcccatgtatttgtcctgggcctcttctttaaaaggttccagcactctcaaccattctctgggtcctgcctgctgctctgctgcttttgtggagctgtgtttattgcacttatcttctcttctcccttctctctcaaagaattcttaaataagaaaagatctgttgctaaatcatgcaagttgatctcagtctagctgcttccttttcctctttaccttgctaacttcttagccttcaaatcttatttgaaacatcacttcctcagggaggcagcctttgacccttagcctagctgagggccctttcctgttaattacctttgtgatatcccatatttcctcttctgtaactgtttatatgtatgtaattacttaaaatttccctgatctactgaaggctttataaaggcagagattatgcttgttttgatctctgctagaaccccagaaccccaagcactggtacttggcacttggtagatgtttaataaaacattgacactgccacctgtacctaagatggatagttgatcgtggcattcatcccagtttggcatggatccttctaaggacagcatttcaggtggccacccccaaatcgtagaagctagcatccaagcaaaagctattttattatgtgcttaatgacttaatgcattactgaggtgtcagtgatttagtctgttgtgtccttactgctgccataagacatgatttgtttggtgatgtgtggatgggtatttttttctgtgatttctttgtaaggacgttatccactgtaacccttagtatcccagatgtttctcaaacttgaatatgtgtaggaatcactggagggatgtgtatgtatgtatgtgtctttccaaaatggagaccccagccccatccccaaggatgaatgaatgcttttctttcttttttaaattaatagactttgtatttt

SEQ ID NO: 15132 - DNA, 1065 bp, Homo sapiens
atagccaagaagaatagcatggggcatatgagatggcagtgtcagaaaagaggtatgaacgacataatttttatttattattattattacatttgagatgggcctaggggaactggcaggattttgactgggcttatcttctgttttggttcttcacctttgtacttccttgaactggtctttcttccagttggcttttcagatgcttgaagacaatggacttcagtaagtcttgccttttcttggttaaaagtccttggtcttggccaggcgtggtggctcatgcctgtaatctcagcactttgggaggctcaggtgggcggatcacctgaggtcgggagttcgtgaccagcatgaccaacatggagaaaccccgtctctacttaaaatacaagattagctgggtgtggtggtgcatgcctgtaatcccagctacttgggaggctgaggcagaagaatcgcttgaacccaggaggtggaggttgcggtgagccaagattgcgccattgcactctggcctgggcaacaagagcgaagctccatctcagaaagaaaaaaaaaaaaaagtcccttgtcttttagccattcattactaattagtggcccttctgtggaccttcctttcactgagctctggcctgctgaagtcctttagcaatttagatctctaacttcggcttgaatacagaaagatgttcgacctagcacacaaatgaaaccctgaatacaaaatggaaacatactaaaccttggagcctctttgctgatagatcaaaatcaaatgtattggctgggcacgatggctcatgcctgtaatcccagcactttgggaggccaaggcgagcggatcacctgaagtcaggagttcaagaccagcctgaccaacatggctaaaccctgtccctactaaaaatataaaaattagccagacgtggtggcatgtgcctgtagtcccagctactcgggagggtgaggcatgagaatcgcttgaacctgggaggtggaggttgtggtgagctgaaattgcaccaccgtactccagcctgggtgacagagtggactctg

SEQ ID NO: 15133 - DNA, 1050 bp, Homo sapiens
ttgtatcattaaggaaaaatcaaacagtaagcaacagactgaatcagatagtgtcccaattagaggagcagcgctaggaagggaaccagctggtgccttcacaagatcagagtgatatgcttcagagtgtccaaggctatgggtgatgaggcagcatgactgtgaagtgcacatatggtaataattgcacaaatatttattgagttcactgtgcagatttctggactatgaattgaagacatggttttctacacatgtagcctagttccaaggagatagagcataagtacgtgcaattcagcatgtctacaactggacttactacccctacatttatgagcaattgttttttgacaagagtgccagacaattcaatgggggaaaatagccttttcaacaaatactgggacaaagtacccacatacaaaagaatgaaattggaccctacctcacaccatatacaaaattcaacttaaagtagattgtaaacttcagtgggaagactaaaactttagaactcttatgggagaaaatacaagagtaaatctgtgtgaccttatgttagacaatggtttcttagaaatagcaccaaaagcacaaatgaccaataaataaataaattggattttatcaaaattaaaaatgtttctgctgaaaatggtaccgtcaataaagtgacaagacaatcctgataatgggagaaaatatttgcaaatcatatatctgataagagatttatatctagaatatataaagaactcttatattttgctatggtctaaaagtttgtgtgctcccaaaattcatatgttgaaatactaccccccgccaagattatattattaagaggtggggcctttggaatatgattaggtcatgagggttgaactctcatatatgggattagtgtccttataaaagaggttagaggccgggcatggtggctcatgcctgtaatcctagcactttgggaggccaaggcaggtggatcaactgaggtcaggagtttgagaccagcctggccaacatggcaaaaccctgtctctatta

SEQ ID NO: 15134 - DNA, 1023 bp, Homo sapiens
tatttcactggatggtagtcgataagttctttgaggttctcttcacctttctttattcttttttcgttttatccctctgactcagtaatttcaaatgtcttgactttgagttcggtggttctgtcctctgcctagttaagtgcttttgaacccctctagttaatttttcaattggctcttcatagtttttctttgttgatattctcattttgtttatgcattgttttcctgatttctttagttttctatctgtgttgtcttttagttcattgagcatccttacagtggctattttgaattctttggtaattcatataaatctatttagggttagtttctggagatttaacttgtggttttgattgggccatgtttccctgtttctttgtataccttattatcttttgttgagacttgagtatttgaaaaaacagcacccctcccagtccttacaatctggctttgtacagggagagatcatcaccagtcaactttactagataatctggagaactctcaagccttttcttgggttgagtcttctctatgcatgtaataccctagttgaggtttacctatttgtactcaggattttcacttcccgatttccatctgtggtactgtttcctctctggtgctgtggcaagccttggtactggagttctccctagcgtctgtcagtggtactgcacactctctggtgctacagccagttgcagtgatctttgttttcagtggcttccaacctggtgcccacttctgtcttagattcagttaagaaaccagtccctcaggtagcttcccccctcccccaccaccccatcaaagtgagaacattgaatgtgtgctctacttttatcttttcatccaagaaagaagggatttgggattttttttttttttccaatggtgctatgctgtgctggggagaggctgtggaaagtatatgccatgaacttttctgctggctttcatgaggttcttcttggcatacttggggtacagaaacctcttaactggttt

SEQ ID NO: 15135 - DNA, 1050 bp, Homo sapiens
ctatgaactaacttggtgggcttggcaagtctcttgatctttcttagtgtcagctgaaatggggagagtgattctcaccaagaaactccataacactgttagaattaaatgggataatataaactttatgaattacagcagttcttcctacatgaatataaagggggaagcacatcctggggccggctccatcaggttatccacacgtgcctgtaggcctcgtttgtggacacgctcctccacacatccccagccctgagagcagaaggaagggccacattcttggtttgttttttttttttttttggagacagactcactctctgtcacccgggctggagtgcagtggcacaatctcagctcactgcaacctctgcatcctggattcaagcaatccttctgcctcagcctcccaagtagctgtgattacaggcatgcaccaccacgcccagataatttttttgtatttttagtagagacagggtttcaccatgttggccaggctgttcttgaactcctgacctcatgtgatctacccaccttggcccccagaagtgctgggtttacaggcgtgagccaccacacctggctggccacattcgtttttaaaaggaagtctgattttgactcagatgcatttacttattggactatgaattccatgagagcagaattcataaaaacaacagaatcctgcctgtttttgtttccttggcacctacaactgcttgacacacagtaagaccttaatgagcagttggtacagtgcattttaaccagaacttaaggaaaagcaagcaagctatccagctagctcggcacagtcctgaggtcggtgccatggtgccacgtgggctgttttgtgtgctggttcaggagaacgtgtggaaaagctgataactgatctcctgagaaaagcgtggtgtcctcagcacaccccacttgctggagtgccagagaagtcatcacgtttcattaaggaatccctgcagatgatctcactccactgagcactgatggttgtgatgatttactgctgcctgggtccca

SEQ ID NO: 15136 - DNA, 1053 bp, Homo sapiens
gcaactaccagctactagaacaattaacagttggaggaatgaatgaagtttgccttctgtgtctctgggttctgtaactggtatgttacaactgaaaaacttttaaaatgagacattattcctcaaattttctttctaaattgtgtttttgctggtttttgtatttttggagttaaaatgaagtcactcaattagaaaatcagaacctatgtttccttcattcactgtattgtaccctggtttggactgttaaggcagtttattatgtgttttttttggcaacaacaaatgttttgcatagttccaagatggtaatttcattcaacagtgtatgtgtttttttttctttttatatgctgctcactccctcagatggggccatctgttttctcttttttttttttaataggaatttctaatgtaccaccctattgatgtagttactcttactgtttctatgataaagtctagctctaatttattaagaattgtcaggaagagaaatgtgctgccgttttgcataccagtgtggttttcactgatggggagagcgctgagatgtacaggtgcgtcatttaccctctttgagacatttgttttctagcacctggccaaagaaacaagtatcagtttgagattgttccaataggtaagacattgcacaaagattgagaaatttaaaagaaaagacattcaggtcatttttagcacacctatttgtctgctaggatcacattattatttctagaaagatacgtgttttgccagcaactggttagttgggtagaagggagctagcattttctattcaacagtaatctgacctaactacctgtcatgtagtttatgtgggtctaatcccccacctcacctagggggcagcacatgacccagacctggccagaccaagactcaatcccctggctatggtgactggtttaggggcagttttgtcatctaagaattctctatggcaggggtccccaacccctcaggctgaggaccagtaccagttcgtggcctgttaggaaccattccacacagcaggaggtg

SEQ ID NO: 15137 - DNA, 1046 bp, Homo sapiens
ctttaacttctcaaagctaaacttgtcccaatttgcagagtcaagggtagaatcgaggccctcctgatctctattttgcagtctccgtcattctgtgctgttaataccacaagagacaaaagagacctcgtctgtcctgtagcaccccgtgcctgcgtgcgtatctcttgtcgatgctctgtcggctcaggatctctcctaccagcctagagctctttcagagcaggacgcttgtgttatgcattcatgtttgtccctgtgcctagtaaatagcacagagtccaagtggctacttgtgtcttcaggggtgtttgtaagggcagagccggggtcttcattcccaggctgttgattcatccttggagctgaacatactgtcccaatccttggcccaagccaggcctctacagttgtcccaaggctgtgctaaaacctgttccacttcacaagtgatcagagtcacagactctggggacacaaattttgagatgaagacacagagcaaaatatataaatgtttttgaggtttgagtagccttaacgtccacgtggctgtcagatggctccccaaagaaagggctacgccggtggccttgaaagagtatgggagatgcatatgagacagggtcagtctaggaatgtcagactcccccaacagttggttggagtgtttttccagattgcaccagacttcacagagtaatggagaccagctgtccaggcatctgagagggtgacatccaaggagaaaaggcaaacgtcttgattgcccatgatgtgggcaaccaatttggatagaaaagaaggtgtcagggtttaacactgaatgtagactttatttacccaaagcctttctttaattctaacactctcaaaaatggggctcagtcaccatttgggtttcccatgttaatatgcagagagctaattcattgtctttcattgctgtaatgcagcagttctcaaaatgtactccagagattgaccctcctaggagtctgtagatcagaactgtatttataatattactaagacatcatttgcca

SEQ ID NO: 15138 - DNA, 1047 bp, Homo sapiens
atggtataaatgtctttctagaaaccttctagaagctgccttcctaaaattccaattcactaattctagatctgcctttcagtgacacactgtgccacacgttgcaggatatacagaacctttggccccaattatggtgacagtcaaaaatatctcaagctttcagaacacctagtggttggggcttgtgagggcaatacctccatgtctttgacacaaggtccaccttgtgcagttcctgaatcatagtaggtgttccataagtgattgcttttattatgacaagtttcccattcccttcctgcctcttggttgccctccagggcgtagtaggaagacggcatggtgtactggaaagggcatgggaagggagagctccccaaaacccaaacaccgcctgttctcagggacctcagcacctcacagcctccttcagaggaaaccacatgttgagaaagagaccttttccccactccgggagggactgacggcagtcttcagtggtatcctgtttaaatttggagggctgtgttgattctaacttagagacctcctagagtgtgattgagaagttcagagcacagcctcccacttggaatcacatgttcaggagacaggctatcagacaggattgaggatatctccccacatggatggggcatgtttagctaggaatagaaaagagattcttggtaaaccaagacattagagaaaatggcaggaaatctggtccataacaacttttagggacctcagtagaaagactgattttcacagatttggttttagtccgtgtgggctaccaccttaaagtggtcagacatgttgagagaatcaaagattcctggttttataactaaatagggatatcttacatgtttaatgctctttatggttaatggagcacttttcatgtctattatttcattctcccagtaaggataatggtacaagaattatcatcaccattttgctaaataggtggacataaaaccaggtaatcagttatggagaaaatatatagtaagttatagtaccattagccaa

SEQ ID NO: 15139 - DNA, 1110 bp, Homo sapiens
gggtccgggcatggtggctcatgcctgtaatcccagcactttgggaggccgaggtgggcagatcacctgaggtcaagagttcgagaccagcctggccaacctcgtctctactaaaaagacaaaattaggccgggcgcggtggctcacacctgtaatcccaatacttggggaggccaaggcaggcagatcacctgaggtcgggagttccaagaccagcctgacaaacatagggaaaccccatctctactaaaaatataaaattaggcatgatggtgcgtgcctgtaatcccagttactcgggaggctgaggcaggagaatcgcttgaacccagggggcgggattacggtgagctgagattgtgccattgcactccactttgggcaacaagagcgaaactctgtctcaaaaaaaagaaaattagctgggtgtggtgacgcatgcctataattccagctactcgggaggctgagacaggagaatcacttgaacccaggaggcagaggttgcagtaagccgagattgtaccattatgctccagcctgggcaacaagagtgaaactccgtctcaaaaaaataagtaaaaattagaaaataaagttttgggaagtcttgccaaatgccttctagcatgactatactggtttacacgctgtccagcacaagacagttgcccactcctcagacttcataattcataagcactaggcattagtactctcattaatctttgtaaacacaagagaagggaaacatttttatttgcatttttctttttttgggaggatggagtctcgctctgtcactcaggctggagtgcagtggcactatctcggcttattgcaacctctgcctcctggttcaagtgattcccttgcctcagcctcatgagaagctgtgattacaggcgcccaccactatgcctggctaatttttgtatttttagtagagacgaggtttcaccatgttggccaggccagtctcaaactcctgacctcaagtgatccgcccacctcagcctcccaaagtgctgggattaaggtgtaagtcaccatgcccggtctgacttgcatttttccttactggtaagggtgaacatttgcatacattag

SEQ ID NO: 15140 - DNA, 1478 bp, Homo sapiens
ccggggtccctccttcagggtccagggcagggtgtggccagaaagttccacaccagtctagaacaaggggagcaagggcagggtctggctccttcccacccgcagctccagacaccctttgtagacagcaggggtcaccccaggtctagaagcataggcctcagctcagacacacccaggttttaactctgaccaagacatccgccagctgtcagtgtcagtcctttgctcagaaagtggaatcaagtggacttgttaggtttggcaattcccagttccccgctgattttaattagaacatcctggtgggatgtaaagaggccagattcaatgttaaagggttgagggggtggtggccagcaagaaggtcgaagcagtgagaagatagtttgagagagaaggcgagcagggtcagtaactgaaagggttaatttttaaccatgtgaaagtttgggtctcatttattggttcagaatgaagagccgtgagagagagagggtgattgagagaggagatggagtgagtgatgcacaggtgtgagtgaggccaacatttaaaaagattcttaaggatgtctcttctgcagccagaaggtgggcagagatagagagcactccagttgggtttgctggggcctttcttcctctaaccacactgtttctgtgcttctctgcccacaggcccctccagccagcgtcaggtgcagaatggcccctctcctgatgagatggacatccagagaaggtaacccagcacccgcaggggccaggctggtcatctcccaatcaggctgggtggccaggggtgccttcagcgggtgaggatgcaccagcagccaaggccaggactcctagaggcatacactgcgggagggtgcaaggtgcaagccagaccaggaagaaagagggggccgatgcgcagccgctggtcccggacaccaagaccaggaatgactgtgggagtctggcattctacagagagtgctgctgacctccagcgggacggctctcagggtgacccagcagggcccaagtgctgctcccttgttgcctcacttgcccttccccaacgtagcaggaggcagtccaggcatgagggattcagcctgttggggcagtcacgcccatgggatggggctagggaccataggaatgaaccccctcaccccatggagcttctaaagtgttaccacagtggggaagaggaagggccaaggctgttgtcccgaaattacagagtcgtggtgagtccccatggagcagcctcccaaggtcacattgctctgaaatggcagagtcaggacttgaacccaggtctgccctctcagcgatgggtcctctgcctcttctgtgtcgagggaggtagggcctggcccgggccttcctcactcagctttgtcagatagggagtcaagctgcagctctctgtggctacacttatgtccagccctggactaggagtcaggaaagccggcttct

SEQ ID NO: 15141 - DNA, 1415 bp, Homo sapiens
ctgccccaggaaggcctgagcagcgaggctggtggggcagaggcgggcgctggcgccgattcacatgtctgtttcattccattgccgtagaaccccgtctgtggcaaagagccccgaagctaagagcccccttcagtcgcagcctcactctaggtaccgaacaaccctcctgctcacatgtcccccagggtttggggctcctctgtcccccgtcccgtgactaacacccttgcacgctgtctcacgtcctggcatttaacaacttgctctgcgaaggtggtctgttctttcagacccaggacctcggggtcctgtcagtcagctgctccgtcttttccctctgagagagagaccaagggcaaggagggcagtgacctgtccacagaggtagtgcaggggggggccaacatggagtcccagctctggactcactacgtgtgacagtgggcaagttaggggacctctccaagcctctgttttccccccacaaagtgaggtctgttaacccctgctgcacagggtggtggtggggacagctgtgagcaacagctggacatggggtgtggtcactagccagggctgcaccctacagttcaaccagtcctagcactggcgctgagccctacccctttcctccagcccagagtccttcctctgcggccggcacacagaatcagtttccccacagacatactgaccatatttcccaagccaaaagctggcatgacaacatgatagaatatttggaactgagattgcccaaaaaggcagaggcagccagccacatagtatctggaggtacatgtggcctgaattggaaggcctctagaacctgcgtcaagaatgtctccatcgccaccacaaattgaagggaaaccacccttatcacagagcaggaggcattgaaactggccttgcagagctgaacaggtggtgagagcagagcagtgcaggtggacagagatgaggaagtcttagcagtcagctggggtttgtccaaggcttgtggtcagccaggccgtgtgctggggacagtccctgcctgcaaagagcaccgtgtgaacaaggccactgtggtcctgaggggtgctctggacagggtgcagggccacatggtggaagggacagggtgctttgcggagtggggtggggcaagcctctgtcgggagctggcattttcgttgacccggacgaggaggagtctgctctgcggagatcatggggacagcctcccaagctgaaggaagggtaagtgccagggccctgagcctgcagccacccgccaagctcccccgcacctccacctggaagcagacaggccatggggcaggggaacgggaagggtgaggaagagggtgtgggggagcgcggagttagaagtttgcattgtgttcatgcgcagggcccagtcatgg

SEQ ID NO: 15142 - DNA, 1152 bp, Homo sapiens
cggccgcctcctcgcccgcccgcccgcagccgaggagccgaggccgccgcggccgtggcggcggagccctcagccatggcctcgggcgacaccctctacatcgccacggacggctcggagatgccggccgagatcgtggagctgcacgagatcgaggtggagaccatcccggtggagaccatcgagaccacagtggtgggcgaggaggaggaggaggacgacgacgacgaggacggcggcggtggcgaccacggcggcgggggcggccacgggcacgccggccaccaccaccaccaccatcaccaccaccaccacccgcccatgatcgctctgcagccgctggtcaccgacgacccgacccaggtgcaccaccaccaggaggtgatcctggtgcagacgcgcgaggaggtggtgggcggcgacgactcggacgggctgcgcgccgaggacggcttcgaggatcagattctcatcccggtgcccgcgccggccggcggcgacgacgactacattgaacaaacgctggtcaccgtggcggcggccggcaagagcggcggcggcggctcgtcgtcgtcgggaggcggccgcgtcaagaagggcggcggcaagaagagcggcaagaagagttacctcagcggcggggccggcgcggcgggcggcggcggcgccgacccgggcaacaagaagtgggagcagaagcaggtgcagatcaagaccctggagggcgagttctcggtcaccatgtggtcctcaggtgagcgccggccgcgcgccccggccccgggatgtttttgttttgaagggaagccatgttttatgtgtgtgatgggcgccgccatcttcttcgccagggcaagtatggcggccccaaaagatggcgggccgtgcggcggcgggggcgcggcggcggcggcgggcggcgggccgcgaagatggcggcaggccgcgggggggaggggccggcgccgcccggctaggccgcaatggcgtagtttctccgagagggggaagcgccgcgcggggcggagacggccgggggaggggccggcgcgctcgctccccgacgccctcgctccccgcgcccgcatcaacgggcgcgcccgccggcccgttgtggcggcagctgcgcgcccccggcccgggcgggacgcg

SEQ ID NO: 15143 - DNA, 1034 bp, Homo sapiens
tctgatttttgcctgttgctaagcagtgaatcgcaaatgtttagctctcccctgtttcagtgaaaggttgggtgatggcagcggtgactcttttttgtctttttttgccagaagtaacctggagtggcctaagatagaaggtgtggagaaacaaaatctagccaaacatatacatgcatacatacataggtaaatatctcagttggtgaaggtgaatatagaaaatcgggatcacaggaaaaattaccatcaaccctaatgaggttactggcagtcaaaattaaaaaaaaaggaacttatactaccttcatctgatattaattctgaggaaataaaatgtttcttaggaatgaattcctttgtgtatgaaggggaccactgagtggtagtactggcatttttcagccaatgtgacaaatttcacagtgctgtcttagagatgcctaaaaaatgtattaaggaacgtggctgggtatggtgcacttttggagactgaggtgggaggatctgaggccaggagtttgagaccaacctgggcaacatagtgagaccttgtctccacagaaaattaaaaaaaaaaaaaaaaaggccaggcatggtggcatgtgcttttgtagccccagctacccaggaggctgacgtgggagaatcacctgagcccaggaggtcaaggctgcagtgagctccactccagcctggatgacataatgagattctgtctcaaatgaaaagagagagagagaaataatatataaggcctttgatttttctgattaacatattgactaactggttgactggttgactgaataatgactcccaatatagccagatcctaattcttggaacctgtgggtgttaaccttatttgcaagtgtgattaaaccagggctcttggaatagggagagtatcctggtttatccaggtgggtaccaaatgtaatcacacaagtgtccttgtattcacaggaaggcagtgggagattgactgccaaagaggaagtaggagaggtgtgagaggttggagtccagtg

SEQ ID NO: 15144 - DNA, 1066 bp, Homo sapiens
ccacacaacaactttatagctctgaaactgattctcactgctggcctctagaactataagagaataaattcctgttgtttcaaaccaccaaattggtggtagtttgttacagtggtaataggaaactaatacatgtgctagcatcccctgtatagcttcattctgcaggaacttggcaagtccctgttatgtgcaaggcacaagacctactgttcccccttaaacctaggagaggggggaagtggaataaaggggctttttttgcacactactcaatttcccagacatgatgattggcatttaacatgttaccttgttttagccttataagatcagtggtatccttcctccctccctccctttgtcccttcctcccctcccctccctttgcttctctttcttctctttatttctttgtagaggcagggttttctctttgttgctcaggctggtctctaattcctggcctcaagagatcctcctgcctcggcctcccaaagtgctgggattacaggtgtgaactcctgtgcctggcctcattgtttaataaatgaggaaaccaggcgaggttaagagtagaggctggagtgacaggaatgaatggcttcttgaaaggaagagatcttaatttgggttttggagagtggactgggcttaggtaggtcatgagaggaaggcaagagggtaaattgtattgagtaccttttactagacactgagaaaaccactttgcttggagcgtggagggcaggtgagactccatctttttacttctctggacttgtagagtgcttctagcctttccatttatttagttccttaattatatctttttgactggaaattggagtctacaaactcagtcttatgctttgctcctcaaactagacttggagtgattattgctttggtaacatagaagaacaccgagcagctgggagattgggatgggccagcggcttatttatacaatacctttaaccttctgaatagtaccatatgcagaaatagaaacttttaaatgtgagttaattgtccttccacatatatgactagtgttggctag

SEQ ID NO: 15145 - DNA, 1028 bp, Homo sapiens
ttagatactttgcttcctgaacatgttttacctagatgtacatttgatattaccccatcgctagtcaatagaaatcagtaacattcatagcataatttgacattcaaagtggatcagtaaacactctcctctatgtagcaaatctttttcagtagtaattatgaagggaatagtatttttagtagcaatggaggtttgccatgttagccaggctagtcttttttattttttgagacagagtctcgctctgttgcccagcctggagtgcagtggcgtgatctcggctcactgcaacctctgcgtctcaggttcaagctattctcccacctcagccacccgaatagcagggattacaggtatgtgccaccatgcccagctaatttttgtatttttagtattgatggagtttcaccttaacctcaggtgaccagcctgcctcagcctcccaaagtgctgggattataggcgtgagccagtgtacccagccaaccagggtaatcttgaactcctggcctcgggtgatccgcccacctcagcctcccaaagtactgggattcaggcatgagccactgcgctgggccagggttaatactttttaacaaagatttttattattattattttttataattttctttttttgagatggagtctcactgttgttggctcagggtggagtgcaatggcatgatctcagctcactgcaacctctgcctcctgggttctagcagttctcctgccttgccttcccagtagctgagattacaggtgcccgctaccacacctataatctttttttttatatatttttgctagaggtggggtttcaccatgttggccaggctggtctcgaactcctgacctcaggtgatccacccgcctcggcctctcaaagtgctgggattataggcgtgagccaccacacatggccaagatatttttttgaacaaagaaagaaacatatgtacatatggcctgtaatgtaataaataaaaattactagcttcttttacagcatcataaatttc

SEQ ID NO: 15146 - DNA, 1289 bp, Homo sapiens
cagtgaaaagaagagagaagacccttctcgaccacgggaagcatcttccagaagtgtgattgggaataaatatgcctctcctttgtatattatttctaggaagaattttaaaaatgaatcctacacacctaagggacatgttttgataaagtagtaaaaattaaaaaaaaaaaactttactaagatgacattgctaagatgctctatcttgctctgtaatctcgtttcaaaaacacagtgtttttgtaaagtgtggtcccaacaggaggacaattcatgaacttcgcatcaaaagacaattctttatacaacagtgctaaaaatgggacttcttttcacattcttataaatatgaagctcacctgttgcttacaatttttttaattttgtattttccaagtgtgcatattgtacacttttttggggatatgcttagtaatgctacgtgtgatttttctggaggttgataactttgcttgcagtagattttctttaaaagaatgggcagttacatgcatacttcaaaagtattttcctgtaaaaaaaaaaaagttatataggttttgtttgctatcttaattttggttgtattctttgatgttaacacattttgtataattgtatcgtatagctgtattgaatcatgtagtatcaaatattagatgtgatttaatagtgttaatcaatttaaacccattttagtcactttttttttccaaaaaaatactgccagatgctgatgttcagtgtaatttctttgcctgttcagttacagaaagtggtgctcagttgtagaatgtattgtaccttttaacacctgatgtgtacatcccatgtaacagaaagggcaacaataaaatagcaatcctaaagcaagaatatggcagaacaagatctgtaagcacagtcttattttcttttgttgtccagaatacttataattcttgagcctcccagaaattggaagctaaataaagcaactcaagtttcctttattttgcactcaattacagtgattattgatgaaagcgatgcatggatattttaatacttcctacatgtcctgacttctgaaagagagtaggtaacaggcatcccgagttcaggaactacctcagaacaccccaggccaggttggtcataggctgtgattttagcccccggcaagtgtgagtgaagcatctgtaccaccgcgcaggctgagcgcctgcgcagggtaaggtgccacctggcagtggggcacacagagggaagaccaggcctgtccatcagccggctgccttcagagg

SEQ ID NO: 15147 - DNA, 1099 bp, Homo sapiens
tgctctgctggcttgctgaagccagctctgagtcacagggttgccttggaccctcggctgtagggggcacctgtctggctccgggccctttgtcctggatacactgacagtaatgtgagcgcagcacttcagagttcaggcccagcaggtcctggcaagtgcattccacccgaacttttaacccaagcggtggggaaggaagccaaaactccaagctgcactttcttggggttctggccatgcacttcttagccttctctctgactttacaggacaaaaggtaccccacgccttcagaatcatgcttacctgcacggcagcatctgactggatggctggctaggtctcatccaccccaaattactgacccttgatttatgttgttactgctcaggttatgctcagatgccctggttgcctgaagatggtttaagtgcaggcccttcagacaagtcacgtcaggcaagagagggctggcctctgacccacaagagggcagatttgtggccaagaggcttcctggcatccacccccaggcccaagggatcagtgtggtgccagagaggatctttaagctgggactgtactgaggcttgatgggaagtatgggcagcatgtacttgacacgttatcacccagtccccttgtaaaatctggaatggagcgtttaagctgagcgttagcatcaggtcagcaggcaaagcaaacctcccacaaactgggtgccgtaaggtgggaggtgacacatggagagcttcgtcctggccgagcaggcacccagccccatgtcccccgccagcattctggatgtcagaggagggtgcgtgtgatggcgtcacattcatctgaagcacactgattgattttccacaaggtggcaagtttgatcaaattgaccgcttttcatgagacacccagatgctgtaaaaaaaaaaaacagcactgggatgtgttgaggagggggcagtttgctgtgctctgttctgtctgctgctctctctgggggccgcacaatgtccgcacacatcacggaggggagaaaggcatcagtaccaaacggaacaacctcttttttctacattgtccatacccggacatg

SEQ ID NO: 15148 - DNA, 1023 bp, Homo sapiens
ctgcactccagcgacccagagagcaagactccgtttcaaaaagaaaaaaaagtttggaccctaaaacccacttgatactcactttaactttgccagttctgctttctctttggttacatgtgactggtatggttttgtccaacttgtaattttggtgtttttgttttttgagacaagatctcactctgtcacccaaactggagtgcagtggcataatcttggctcactgcaacctccacctcctgggctcaatcgaccctcctgccttagcctcccaagtagctgagacaacaggcatgagccaccacacccagctaatttttgtaattttggcaggatgggtcttgccatgctgcccaggctttgttcaagaaaactcctgacttcaaaaaaagccaagcctcccaaagtgctgggattacagacatgagccactgtgcccaatgtgtagttttgaaccttttcttactatcttcttttagatgtttgttgtaaacaactgtatctggattttgttttctaacccagtctaaagcagtctgattttgctggaacaactgagggatctgacatttttatgccactttattttatgtaaatggtttattttactcctttttccatacttttgatggtttgggaaaattactatttattccctttcttttatttattttttattttttgagacagagtctcgctctgtcgcccaggctggagtgtagtgttgcggtctcggctcactgcaagctccacctcccgggttcatgccattctcctgcctcagcctcccgagtagctgggactacaggcgcccgccaccacacctggctaattttttgtatgtttagtagagacagagtttcaccatgttagccaggatggtgtcgatctcctgaccttgtggcccgcccactttggcctcccaaagtgctgggattacagactttagccaccacgcctggcctattccctttctttttttgagagtcttgctagtgccgttgcgcgatctgggctgac

SEQ ID NO: 15149 - DNA, 1048 bp, Homo sapiens
ttgcatttcaccaggttttccactaatgtcctttttccgtttcaggatccaatctaggatgccatattgcatttagagagctcttgctatttaataagtaatttgtttttttggggggtggactgggcagtaaggaatggactggagcttgtcctggccactaattttgagttccctgttctgagcaaaccctgcacatcctggctgatgtcccatatcaggagaccagagccttgaagctacagttaagctcgtactggatgtcttttggttttcaagacttgcttcctagttcaatcatgaacaagacaagcagaagatttgcaccttaatgaggcttaaagagcactcacttataaagtgccattagtgacttgtccttaatggtagctgtttagtgataacaggtttctcattccttttttcttttttttttcttccttttttcctccttctggatttaacccagccagccttttgggctaatgttgacattagctagaattcgaatttagactgcttaccacattgatgtttttacacaaccttcctgtggtttatcggataattgagtgtgtcttgaggcagtaactgagttgaaatgtgttgcatttaatgagtgaaactagagcatgctttgcataccgatagatgcacatctgtaggtgatttttccgacaaaagtcccagcctaggacgtttccttccattcctttcccttccttctcttgcatttccccccttttcctttctctctcatcctttctctcatgtctttttcggtacttttttcactatgctctcctttggccttgcacctggtcctgtctccgcctgccttttctcctttgcatttcctcctttccgtccccctgtgcccctctcgctctctcttgccaattcccatcttctatgcctttccctgcaacaggccagtgaagctgttgccacggaaacagaagcccagcagaagctctgttctgctttccggatgcttctaacgatgatgacgcagataatattgatttctagaatcagctaagccctg

SEQ ID NO: 15150 - DNA, 1045 bp, Homo sapiens
attcagcctctgctgtccaatcagccactgagttgtgacttctctacttagaggtagttctttatcaaattcatctcattcctcgctgccgtttggtttctccctgtgaagggtattcattttcatggttgttttaagagtaagaggcagtacaagggaagtgcctggtatagttcctggtaatcgtagatgcccaaattgtgactactgctgttgtaatttctattattacgtattctcaactctgattgtcattccttgatgtaaaaactttgctgtttgccctcatactacaatacaggttgcagcccaaacagtacgggatgcaaaccaacccatgtcaccggcccattcaccctgccccgatttctgttcctatcacaaactgcctgctgtgtgccttgaattctttccagctctttcccaaacatgacacacccttttaggccttttccctttccttccttcttttcaggcaaagtcttccttatccccctggacttggctcaagggtccccttctctctgtacccattccttgaggttgcctttctcccttgtctccagactgcataaatggcagtgtggcctgtgttgctgtagcaccatgtgcacctgggctgtgccccggcagtgttctgtctttgggctcactggggagggagcactggaccatcgtccccagatgcccagggagaagcttggtgctcgttactgactgtagggtacttttctgtagcaggcacttggggctcacttatgggacccagtaacttcacagtcatgaggtacttgatttgaactgaggagaaaatgtgtcaatacctttcccagggagagtcaccctcacaaaccttggtctggaaggcccatcttagcccaggggtgagatcttgcgtggatgattcagaagtcacagtattcctgaaaactagtgactcaacagaattatatggctttgggagaaagagtccctccaggggcaatccaactaccacaggccaggggccaagctttggtgagccgagcctgggccctgcccctcc

SEQ ID NO: 15151 - DNA, 1086 bp, Homo sapiens
ttccccttataattgctttccttatcattcttttaaaatttgttgtgtgtacatgttttgtaatgagtataacacatcaatagaatagggtttatgtactcaaagttgtgtgctcagaaaaatttttaaaaatgatagtgatatgtgatcaaaaaagtttggagatcacggaaagagaagctcactcagctgtcttgaagtggagagagccctggcctggccttaacatccagagatgagggcttgtgatcccacctgctcctgctatgggggcaacaagacattcattcactcaatcattcgttcattcattcattcattcattcagtatggctgagcggtgaggttaacacagtgagcaggaaggtgctgtcctgacttcagagagcatctgcaagtccagatggggatcttcatggctggaaggacagtgaggcctgtcagggaaggacacagtgctgtggatcacctaggaggggcttgtaagtgaggtttgggggttagatgtgacttccagggagaagagtgacgcctaagtgtgtatgagagtcctctggtgtgaggcttggagaggagggagtgtagctgctggccagcaccgtggaagagttgactctgagcaaatcattaatctttttgggccttaattgtcttctctgtaatggggaaggatagtaccactggcctctccagcaagttctttgcatctgctgaggccagattcaggtgtcaaattctcagctctgctgttgactagccatgtgtctttgggatgtgttatgtctggagctttgctaacaaagctttctcaccttatctcattgagtcctcccatccagcattttccatatgagtgctttgagtttcagagaagtgaagcgcttatggagggtcccacaagcagtgggagccgggacgcagggctgactactacacctgggcccgccttttcaccacagactgtgtgtgcttgtcatacttagactttgcttgtacttgggaaaggagttcagtttgctttaatgtcactttaatgctttttagaattcatttcctttgtttattttgcagcggtataatttgcaa

SEQ ID NO: 15152 - DNA, 1021 bp, Homo sapiens
ggatctgccatggtacagaaggttggccgtgtgccccatttttccatgcatgccccgcctcagccagtgcatgctgggtgtgtactgctgctgaatttggtcaaatgccatatgatttttctccttaagatgttaagattataattgctgtgttgatagatttttctggttttgaaccatctttgcatttgtcagttttgtcgccgtatattattccatgcgcggggcagagcccatgcaagtaccggtgtgtgccggcctctagcatacttcctttacctcttctgaggagtcgctgcacaagcctctttctacatctgttctacatctgttttctattctcaacctccgtttccttcgtttttcattatacctagtaagaatggcatgcaatatacttccactgacgcttacattttcacttttccccaaaatggtaaattctccatagtaaatccacatatccaggagaatttcacatgtatcaagccagttcccctcactggtcttgtttgataattctctcttggctgttctaaaacattaatgcctctgtatatatactaaaataatttcacctagttcagaaaaataataattgattggaattaaagttatatattaatttggtgaaaattgataccttttttccatctaggaagatggtatatatcccccatttttctgggtcttgttttctgacttataaaattttatggttttcttgtaaatctctaactttccagtaaatttatttctaaatactctatagcttttgtcacacttgtgactgggttatattttttcccatttccacttctaattggtttttgttaatctcatgcagagctattggtttttaaatattttcttttgccgtcaccttaccacattttcgtattagtcttaattaatttttccactacagtctgcatatatagtcctgttgtttgcaatagattcttttatctctcttccactatttatgccaacatagactagttattttaattttattctg

SEQ ID NO: 15153 - DNA, 1056 bp, Homo sapiens
cagtgatataatgatatataagaagacctgaaggtgtagggggagtgtcgtattcagaggatatacatcaaggcaaggatactctgtatgcttgtacacacacacaaatacatatacacaaagaacatacctattattaatttctgtttctaagtatgatcattagaagctgattaggtaaataaactttctgctttgggacaagcagaaagatttaattaacacttaactgaaattcacagatactcttttttttttttttttttttagacagtgtctcactctgcctcccaggctggagtacagtgacacgatctcggctcactgcaacctccgcctcctgggttcaagcaattctcttacctcagcctcccgagcaactgagactacaggcgtgtgctaccatgcctggttaattttttgtatttttaatagagacggggtttcattatgctggccaggctgttctcaaattcctggcctcaagtgatccacccgcctcggcttctcaaagtgctgagagtacaggcgcaagccaccgtgcccagcctcaaaagatattctttttcttacctcaaaaactatgttttccaacttttcacagtggaaagttgaagtcgtgaaaatatcctcaggataaatctgaatcgtgtttcttttattgctgagtctggttggcgtgttcctggtatttagtggaactctggtcaacacaggctgaagttagtggggttctctctgtggggttctaaccttgaaataggagcatggggcttgccttccccttctccattcctccaagaaagagaaaggaaaggaagagaaaagaaaaagcatcctgtattatgtgtaagtttgtaagaatccttactatgagttctgagtacaacatctttttaactcttttctctccctctcctgcttccttcttcaatctccagctaccattcatttcctgatttcatttataggtcttaccaggcaagaaggccaagcagaaggaacctacatcagggaagtgctgggctacgggccccacctggacttggggttctg

SEQ ID NO: 15154 - DNA, 1033 bp, Homo sapiens
ctactacgatttttactattctacctaaattttaggttaagttcattgagttcatcaaaaattcagtttaagattgtgtctgctttatacattgctctgcgaagttccatctttgtaatatgatctcattccacatcaaaggttcctccgttttttcgggcattcttcagtgccttttattagagttttctgctttctccatcaaggccttgtaactaggtcagtaattcccaggcactttgtagtttttgtgtctgggtagctggagtcttcgtctctgtttcttttttgtatttgcttaattgttagtggaaaggtggttgctgttggtttcatatttttgatatttgcatgtggtagtctagttgtgatggtctgtctgttgcttctgttttccagctatatcatttgcaaacaaatgacaattttgtacttaaatatatatatattgcgaaggggcttaacactttctgcccttcccagaaatgtatctcttagcaatatgactcgtagaacctaacagttccatcacaggaggaagtgttctgcagtaactgtaatttggcctttgatggattcatctgttataaatcctgttgacatgaataaaacagagaataaataacagaataacccttgtggttttgaacagagaactgtaaataatcaaacctttctttcctgttgcctctaaagttagactgtcagcggtttttttttttaatgtatcccttcatgtcttaaaatttttatatgttacactgctgcagttatgttacggcataaatattcactcattggtaatgaatgataacacatacagaaaggctgcatgatattgctgaattgtaagaattttccgtaaagttgcttcttgggccattctagtttacatctaatttaataaatttagcaatttggagaacatctgcaggactgatgtaagtactgaaagtggaagtgtcagggaggcagcagaagcaggtgcttcctgatattaaccagagacggtcctggcacagatggggccgtg

SEQ ID NO: 15155 - DNA, 1079 bp, Homo sapiens
tggccctgtctttgcagtggccccatctggagggagacaggctggcacagagggtagggtgcgtgtcctggggctcccctagaagcaggcgcagtggacagagatgtctcagaggaagggagctgggtctgtcgcagatgggtgcttcagaaagatcgcacctgagacagcacggaggatgcgtgtgggtgtcagtggggaactgggcaggtagaataagaggagttcaggaatcacttctaccctttgcaggaactgtgctaaatattgcgggctttaaaattaagtaagacattggcctatgttgaaatacagcaaaaacgtaagatggattaatgaacgagtaaaagatggatgaacagatgtgcgtgtgatcaagcagatggagcacattgctcgtggtcgaatctggtggttgaaatgggtgttcactgtagaattctttccgttttcctagatgcttgaaattttccaaaataaaatattgagaaaaaaattcgtgcaagaccaagttctctgccctcgaggcatttacagctgcaggccttgaggagtttctttggttcctgaagggctgcttgctcaccacgagcagtgtttgcacaaatagatgcgcttcttgttgcctggctccatggctcctcctagagcattgttttcttattcaggttagttcagtgtctaattctaatgggaaaattgttttttctaggtttatttatgaaacagagcatcataatggcatagcagagttactggaaatattgggaaggtaagcctctgttatgggtagcaaacggctgtagatggaatttataccagagtgatccatttcattgagtccagctgcccgctttaaagcaaggcagtttaaaccattctctaaaagaattcaaatacaatttcactgaaagcaggagttggtgagctcttagattagagcacgccaaatgacaaatctctcccatttttatggttctgtacgtagattctacttcgtatacctcagtatcattactatggaaacacaattccagttatttcctcaagagcaatgttaaaaatagttaacctaagaa

SEQ ID NO: 15156 - DNA, 1032 bp, Homo sapiens
tattttatgatcattgaatcacaagtgaacgttagattactgctgttctgtgcgtggatctgtaattttttttcagcctccataattatgtcagaggatttataattttcttaacattttatgtttattaaaataggctatcatagccagggttaacaaagccagacatgtcaggtgccagtttaagcatttaaatacattttttgaaacaactttattgagatataattcacataccacacaattcacccatttaaagagtacaattcaaaaatttttgatacgttacattttgaatttttttaaattgtggtaaaatacatataacataaaatttgtcattttaaccgcgttaaatgtacagttcaccagcgttaatgacattcatagtgttgcgcaaccatcaccactatttccaaagctttgtcatcatcccaaacagaaattctacccattaaacaataactctccgttctccctccctctggcccctgctgacctgtaatctactttatctctgaatttgactattctaggtaccttatataaggagaatcataaaacgcttgtcctttcacacctggcttatttcactcagcgtaatgtcttccagggctcattcttgggttgcgtatcagaacttcattcctcatcatggttgaatgctgttctatcatatggatagaacacattgggtttattcattgttttttcagtgtacacctgggttgttcccaccttttagctattgtgaataatgctgctatttggatactggtgtacaaatatttgctataatccccattttcagttcctttggatatatatccaggagtggaattgctgaatcatatggtaattgtatgtttagctgcgggacagacccccatactgttttccacagtgactgtcccgttttacattccctgcagcaatgcacaaaggctcccatctccccacattctcaccagtgctgatgctgctgctgctgctgttgctttctttttatttattttattttatcttattttt

SEQ ID NO: 15157 - DNA, 1046 bp, Homo sapiens
ccatctcaaaaaaaaaaaagaaaagaaaaatgggggaaccaccctctagtggcttcccgtgagtaagcgccagtgcactcaggccctgttcccctgccctcctactgttcatgcccccactgccctctgcagtggtcctcagccagccccgtgctgacaactcaggacctctcctccctctggtccttgctcagatgtcacctcctccccattgaagccaccccaccgcacacgcaccgccgctgcctgttctcctgccctgctgccctttgtatgtgacttatcgtttctagtaaattaataatcatccatcacctgtctcctccccactagaatgtaagctccgtggagtcaaggatttctgccttgctttgttcagtgctgaatgctcagcagaacacagcacgccctcttgacctgacagatgggggaggcgggtggataggtggaatggcctcctttgagttgtctcctcagcatctagccagcatctagcataaatgtttacggaataagtagagaaataggtgacaatgttcttgatgagttgatgtacaagaagttgtctgcctctttgttgaaggctcttcagggttacaggttacagtctagaatattttgaatttgtagaaataatcataattttctggtccaaggtagttcattacccgactcacaggtttaacagcaaggacagccacctgatgtctcaggcacaacctccagcaagccatccacttgtgtctttcaggtggcagagcgagctctctattactggaataatgaatacatcatgagtttaatcagtgacaacgcagcgaagattctgcccatcatgtttccttccttgtaccgcaactcaaagacccattggaacaagtaagaaagaactggctgccatctttttcagtcattttaaaatatggcacgttttactgctacttcagtaagaataaatatcagaattttaaatatcaattaaaaaacaagaaggtcagttgctttgtggactcataaattaagtagcagcgtgggttgtttctgtg

SEQ ID NO: 15158 - DNA, 1049 bp, Homo sapiens
ctgggagtttgtggccacgtgttcatttttaagacacgaggctatacacagttaaaaagccaattcttggccgggtgtggtggctcacgcctgtaatcccagcactttgggaggccgaggcaggcagatcacctgtgctcaggagtttgaaacaagcctggccaacatggggaaaccccatctctactaaaaaatacaaaaattagccaggcttggtggcaggttcctgtaatcccaactacttgggaggctgaggcaggagaatcgcttgaacctgggaggtggaggttgcagtgagccaagatggtgccactgcactccagcctgggcaagaaaagcaaaactccgtctcaaaaaaaaaaaaaaaaaaaaaaaccaattcttacacattaaatagcttagggttggggaatttttatttttggtatagcctttgacttaggtcagaattaaagctagacaaagaataaactaggtccaaaatgtgatgtacctgaaaggtgtgtgcatatttgcaatttaggtcctgctctgtagtagatcaagaacttgatcaagaatgcaaaccaaaatagcattctctcctgagtaaagctgcctttgaaagtcaggcctagtatctgtgtgatattcggggccccagaacgtccaactgcttggtctgtccactgcccttagaaaggggcacgtcccctcctgggagggttaccttatacagtgacaggaaggaaccagtcctatggccatccacgtgtctacttgtaaatacacacacaggcaggacagttcttggagaactcctgtagcatgtctgcttccttgttttcacaactcttgaaattgtattctgtcaccgggtttcctgtgtgactgatattcttacaacagtgattccctcacctcatccttagatctctatgaattatgttcctgagtcagaagactcagaagagtcattgggatgtctgttttccccagattaacgtgctctccattagaatctcagcaggctttttatcctcaagaagttgagaaagctaattctaaaa

SEQ ID NO: 15159 - DNA, 1033 bp, Homo sapiens
gctttgtgagatgaatacttcctgagaaacttgacaagtatctctccattttaccattatgaaaactatcattaaaaaaaacagtttagatgccttctccttttgagggaaaaagggtgctttttattgtataaagcagcgtcttatgtattttgatataccattgtttgaacttccgtctttagctgatagattctcaaatatccttgattttggatgttcagtatgtttgtgagagaggtttctgggaagactctctttttgccctcgggaaaaagcaaaatatcaatgtttgggtgactgtgtaaagctcagtgtgtaagaacatctttttgtctaggttttctttctgctctttattgaagacaaacactcaccaaaaagaaaaataaaagttttcagagaaactaattttctttggcaagagtattacttaatattttggcctcctaaagtttccctagttagtactcggactcctgtgctaattgtcagcttacatatcattgtatagagactgtttattctgtaccaaactgatttcaaaagtactacattgaaaataaaccggtgactgtttttcttcataaagttctgcgtttggcatcttcactctttccaaaatgtatctgtacatcagaaatgtcactattccaagtgtctttttagtgtggctttagtatggcttccttttaatattgtacatacattgtatctttgttttatggtaataagtaataaaaatgtagacttcatattttgtacaaaatgtcctatgtacagaataaaaaagttcatagaaacagcaaatataggtaagtggcacaattatttttctttagaaaatatctgtaactttatgcattagtgaaatgttaagtaccgacatattttttaacattttgtaattcaaaactttttgttttgacattgtttatgaagagaaacttcatacacttgccatttaatatgctcttttatctaattttcaaaaactctaaaaaacggtgtatcatatggactaaataaagaa

SEQ ID NO: 15160 - DNA, 1050 bp, Homo sapiens
ccgagactacaagtcccagaagggcgcgcggcgacatcgccgggcccgccccccgcgcacgcgcggcgccgtgacgctaaggccgcgagcgagcgcgggtggctgcggcggctgcggccggcggggcggggcggggccacctggcagtggctgcctttagggcggagccggctcccgctctcctcagtctgcggtgggctagcggacggtccggcttccggcggccgtttctgtctcttgctggctgtctcgctgagtcgcggccgccttctcatcgctcctggaaggtcccgagcgcgacaccatgtcggagcccgggggcggcggcggcgaggacggctcggccggattggaagtgtcggccgtgcagaatgtggcggacgtgtcggtgctgcagaagcacctgcgcaagctggtgccgctgctgctggaggacggcggcgaggcgccggccgcgctggaggcggcgctggaggagaagagcgccctggagcagatgcgcaagttcctttcggacccgcaggtccacacggtgctggtggagcgctccacgctcaaaggtgcggggccgcggagggcagggtcgccagagccaggcctcgcggaatgcagggcctgccaggtcctccggggtcgcagatgtccccgggatgggaggagcccggcagctgcagatgacccctggatgggcagagcccggcggccgcagacgtcccgccggccgggtccccagggccgcagacgccccgcagaggccggcgcggcgcccggggctcgccctcgccacacccactgcccggcccggagcccccagggcgccccgctcctggtcgcggggaggggaaaggggtccccgtctgccgtcacccaaaacaatggggtcgctttgtctgctcgggcctctcaagatggccgagttgggtggagacagcgtctccctgggctgagagcgggcgaggccgcatccctgcctccagtgtcacatgagcttttcggtttcgatttgtgtccaagccaagtggccttcgggagggatgtgtcgggggcaga

SEQ ID NO: 15161 - DNA, 1050 bp, Homo sapiens
ccccatagggttaaatgtatgatagctgtaaagtgcttagtaaaatgcctatcacacaggtgttgctgagtgaacggctgagcagaatattcttgagagcaggggtggaaagtgacttctgtgtttgaagcacaatgaatgagcttcctgggatgggatgctgagaacttggccatagccagcagcggctagcactgcccaccgccaggccctgttccagtgctttcatgcaccaactcagttatccttgcagaagccctggcatgctcacgctaccccacttcacagacaaccgccttgcccaaagtcacacagcaaagtcaggagtgaggaaaaaaacggataggaagggaaaaatagtgccaagtcatgtaggtgtcgatatgtcaggctgggagtagggagaaaatagtcattgtctaagcagttgataaataagaaattggaaatgttgatattaatttgatatatttattatgatttgtagaggacgtcggtgatgaaggagaagaagaaaaagaattcatttcctataacatcaacatagacattcattatggggttaaatccaataggtgagtagtacaaatattaccattatctcaggttataaatttgtgagaattaatatgaatcttttttcttttcaaactcagaaattcttactaagagaattaatataaatcttttttttttttttgagacggagtttcgctcttgttgcccaggctggagtacaatggcgcgatctcggctcactgcaccctctgcctcccgggttcaagcaattctcctgcctcagccttccaggtagctgggattgcagacatgcaccgccacgcctggctaattctgtatttttagtagagacagggtttctccgtgttggtcaggctggtctcgaactcctgacctcaggagatccacccgcctcagcctcccaaagtgctaggattacagacgtgagccaccgtgcccagcctaaaattaatatcaatcttaattgactcagacaaacacattaagaaaacactcaagcccggcacggtg

SEQ ID NO: 15162 - DNA, 1044 bp, Homo sapiens
acaggtaaaaactgtggtttgaatgttatatttcacttaatgttcacaagatagtatagaactcggtgtaaaacttgggaattgggagggtaacgctagtgagccgaggggatataaaccctgtgtattaataaatatgtgtgtcattactatttgacagacctgaaatgatgggatctctttggagaccaatagcacactaaatgttgaggtatgaaatctgtttttagggatggtgataaaatggctccttcagttgaaaagaagattgcagaactcgaaatgggactccttcacttgcagcaaaatattgaaattccggagatcagcctgccgattcatccaatgatcacaaatgttgcaaaacagtgttatgagcgtggagaaaagccaaaagttacagactttggtgataaggttgaagacccaacatttcttaatcagttacaatctggagttaaccgctggatccgagaaattcaaaaagtaagagcacaggattgaaagttatgtaaaatatgttactctttaatatctttgggaaaactgatctggattttgtaagtgaggtaaattatgtgataacttgttagtggtgccgcctcttggtcctgggactgtccagtgcaggactagccttggtctgggtggaatggtcaggggacagtgtgagattgcttgagtagtcaccctgatagagcattaatctcagcagtcgtatacctttgatttcaaatcaagccacttttgatttacagggaaggaaatctacttgaaatataaaaattgagttgtaatgcatgtgttttgttaacgatatctattctaccttgtttaaatagtgaatacccttgggtgttattttattttcaaaggtgaccaaactggatcgagatcctgcatcaggaactgccttacaggaaattagtttttggctaaacttggaacgtgcgttataccgcatccaggagaaacgggagagcccggaagttctcctgactctggatatcttgaaacatggcaagcgcttccatgccaccgtca

SEQ ID NO: 15163 - DNA, 1039 bp, Homo sapiens
aagccatcctctcacctcagccacccaagtagctgggactacagggatgtaccaccatgtccaactaatttttgaatttttgtagaaatggggacttgccacgttgcccatgctggtatcaaactcctagtctcaagcaatcctcctgccttggcctcccaaagtgctaggattacaggtgtgagctaccactcacagtcattattacaattatttttaaattcttttaaaaactttgtaacttgactgagctgcattagcacgtactaggtctacaatgtttgaacacgaggcattattaggcatttctgttcaactctgtgctcacaaaagacatgttagaacaagtaattaagacaatagcagttgtcatgttctcacttcccccaaaaaacgtatggtacccacatcttaaatgttagagaaaattgtaagtagaaaccttccggttacttagatcacattgcacacattacatgcgcattcactatgctgaaatgtatactttgatttttttaacacctctgaaacttttgtttttttcctaatactttttttgatcttatgccaaagaaagtcaataaatagattaggatccaagcactttcgtgattccatgtccttagttagtaatatgttcacctaaattaagccatgaatgtaaaacttaaattttaatgttttcaaggataaaattttagttcttctaaacttaattgttactaataaacgttaaaataatatagaacaggggtccccaacccccagactggtactggtccgcggcctgttgggaaccaggctgtgcagaaggaggccagcagcggcgagtgagcattactgcctgagctctgcccccgtcacatgagtggcggcattagattctcataggggcgcaaaccctgttgtgaactgcgcacgcgagggatgtagattgtgcactccttatgagaatctaatgcctgatgatctgtccaccatctcccattacatcaccctcagatgggacctcctagttgcaggaaaacaagctcagggc

SEQ ID NO: 15164 - DNA, 1030 bp, Homo sapiens
tgggcgacagagcaaaactccgtctcaaaaaaataaaataatagaaataaagtgcacaataaatgtaatgtgctcgaatcacctagaaactacccacccccccaccaccccccaaccatctgtggaaaaatcgtcttccacgaaactggtccctgttgccaaaaatgttgagggccactgatatagaaagcaaagcaaagcatggtaaattctctgaggctgccaccttcagcctttagagtatgtaggaattgactcatactcttaaataagcaaaaatggagcgccactagggttatcctgttaataacgtgttgttttttcaaatatgaatagtttttgtctcgctagatattttgcaacatcaaaatgttccattgtaatggcatattttagtttacttagttttgttactttatgtgaaaaccattaactctttctctgttaatataggtctaaaacaggctttggaaactgtgaatgactacaatcctctgatgaaagatttccctctgaatgatttgctgtctgccacggagctggacaaaataagacaggcgcttgttgccattttcacacatttgagaaagatccgaaacacaaaatatcctattcagagggcactgcgtttggtggaggcaatttcaagagacttgagttctcaattactcaaagtattgggcactaggaaattgatgcatgttgcttatgaagaatttgaaaaagtaagtttgaatatataagacaaccaacctcaagacattgagatgaaaatatgtcttaataataagcctcacttttgaaattatatcctaggttatggtagcatgctttgaagtttttcagacttgggatgatgagtatgagaaacttcaggtattgttgagagacatcgtcaaaagaaaaagggaagaaaatctgaagatggtgtggcgtatcaaccctgcccacaggaagctgcaggcccgccttgaccagatgagaaaatttagacgccagcatgaacagctaagagctgttatcgtcaggg

SEQ ID NO: 15165 - DNA, 1050 bp, Homo sapiens
agttttattgctgctacagctgaaagcagagcaggctctaggtctcagccacgaaggccttacccagagcctgcggctgccagcggaccagatgcatacgacagcgaggctggctccccaggcacaggaggagcttaacagagcacgtttacttccttctcccagatttacccatcagaggccacctctcccattgagtgggagtaagggaagagaagctggggaggctccatgcattttcctttcctctgcaaggacatgcgagtggggattagtgttctcaccccagcagctaggattagctacttatggaagaactgtgcctggagcatttgtcaatgtataatatttgagaagaatgttatgtgagaataaaggaacagagtgtgagtgggtgttttaaatattaaatatttcttccttcaggtggatgatctgctgatcattgaagaaaaaatagacctagaagtccgttccttggaaacttgtatgtatgaccataagacattctcggaaatcttgaacagagtccagaaagcagtggatgacttaaatctgcactcctattccaatttgcccatctgggtcaacaagcttgacatggaggtaagggatagaatttgctagcattttcctcctttttcttctgctgaccctccagtaagcttattagtttgtcactaaaaagcatttttccttggaaattatctgtgatagttcaattcccctccaaaatctcatttaactagtgatagaactgaattgtggccaggcacagtggctcatcatgcctgtaatcccagcattttgagaggccgaggcaggcagatcgcttgagcccagaagtttgagaccagcctgggcaacatggcaagaccctgtctctactataaatacaaaaactagccaggtgtgctgatgagcacctgtagtcccagctactcaggaaactgaggcgggaggatcacttgagcccaggaggcggaggttgcaatgagccaacatcgcaccactgcactctagcagagtgagaccctgtcacacacacac

SEQ ID NO: 15166 - DNA, 2104 bp, Homo sapiens
tcacccaggctggagtgcagtggcaggatcctagctcactgcagcctcaatctcccgggctcaaacaatcctcccacctcagtctcttgagtagctgggactacagatacatgccaccatgcctggctaatttttttctttttaagtagagatgaagtcctgccatgttgcccaggctggtcttaaactcctggactcaagtaatccacctgcctcagcctcccaaagtgctgggattacaggcaagaaccactgtgtctggccagtcttacgtgttttataactataaagtgccttctctttcatggggctctaattaataatttctatcattgttatagaagaaaaaacttgatttattttttaactctcaaagctctaccgcaatggccagcgcttactggaaaagcaaaggttccagttcccaccttcctggctttatattgacaacatcgagggagagtggggagccttcaatgacatcatgcggcgaaaggactctgccattcagcagcaggtggcaaacctgcaaatgaagattgtccaggaggatcgggccgtggaaagccgcaccaccgacctgctgactgactgggagaagaccaagcctgtcacggtgagtcccgccaggtggggacgcaggagactcctcacccagcagtgtgatttggtgactttctttcaagcctaaaaggccttgctgtgactgagctttctagtattgaagactcttttcctttttgtagttaaaaaagcagatggagatagcaaatgtgaaaatatgaagcccagcttagacctctttttactcagaatggcattcagtagctggttttaaggattaaagtttttctgttcttagatcattctcttacgtagatatgcgcagaaattagagtttaatttcctgtagacaaaggccaagctttccactgctgctgctagttaatttaattttggttggatggtctctgtttttgccagtgctgccagtggattgtggggaggcaggttctgttgtcttcgtcattgtagccatttaaaccttccaccacccagaaactgccacatccacttttcttcatgcattgaagtatttattgagcaccgactgtgttccaggccttgttctaggtcattgagatatagcagtgagtgaaaaggacaagagcctcctaccttcatggaatcacgctccgtgggagagagaaaaaaaatgagcaagaagagacaggaaaggcaggtggtggtgctgctgcgacagaagcagatgagagggcgctggctcagtggctactgctgtgcctgggagggtggtgtggaagggggctggcaactcatgctgatagcagaggtgatgtagataacagtgtgtgtggttactggaagtggaattcaaaattttatttattttattttttgctccctttgttatttttatttgttattttctaagagtgcatgaaattatctggagagcatataaatacaaatgcctggacccctctcccctctataaacgctgatccgataacacaaacgcctggacccctctcccctctataggcgctgatccgataatacaaacgcctggacccctctcccctctataaacgctgatccgataacacaaacgcctggacccctctcccctctataagagctgatccgataatacaaacgcctggacccctctcccctctataaacgctgatctgataatacaaacgcctggacccctctcccctttataaatgctgatccaattgggttatggtgggtcccaggcgattggtttgttttctttttaattttcaaatttttatttatttagggaatataagcatagaaaagacaaatggaaaagatgtgaacatattttgaatattaatctgtttttctcatttggggatgtaagtttcccacagtaggcctaatgacaatgacagatttagccttccacaaagatctgctggttaattgtcccatcctgcctgtaaccgtttccgtgctgctgggcccctgcaggttctactgtgtgcttaattttgatttgatggtctctgcttttgccagtgctgctgttactgctaggttatgagtg

SEQ ID NO: 15167 - DNA, 1061 bp, Homo sapiens
ctatgagtttgttcagaggcttctgaaaggttacatgaaggtaggtggccagtatcgcacggtgatgagtgtccattagaaacgcacctgcacagatcactttgtttactttctccacagataaatatgctggtgattgaactgaaatccgaagcacttaaagaccgccattggaaacagctcatgaaaaggcttcacgttaattgggttgtttctgagctaacccttggccaaatctgggatgttgacttgcagaaaaatgaagcgattgtcaaggatgtactgcttgtggcacaaggggagatggctttggaagaatttttgaagcaggcgagtaataggactgaacggctgctttacgttgtgtttcgggctgttacatagatctgagctatgtaaaaatggagccttgtcatctgtggtccttttggttcttataatgctgggtcccttgtgcaggtagtgaatgcccacatattgataacatgcatctttctggtttgaattcagataagagaagtgtggaatacttatgaactagacttggttaattatcagaacaagtgccgcttgatccgtggctgggatgacctcttcaacaaggtcaaagaacacatcaacagcgtctcggccatgaagctctctccgtattacaaggtgctgttgctggggaagctttccctccccaccagtggtctcccacgctttcactgtaatgccttttcactgacagttactaggtacctgttttttattgtattttttgagacagggtctcactctgtctcccacgctggagtgcagtggcaccatcacagctcactgctgcagccttgacttcctgggctcaagtgatcttcccacctcagcctccaggtagctgggaccacaggcacatgccaccatgctgggctagctttttattttttgtagagacagcatctcactatattgcccaggctggtctcgaactcctgggcttaagcagtccttctgcactggcctcctaaagtgccgggattacaggcgtgagtcaccacagccagtcaatacttgttttt

SEQ ID NO: 15168 - DNA, 1081 bp, Homo sapiens
tcattgtttaaatatttaaatcgttaaatataatgtatttcagcataaagtgagcagcttgaatctaactttgttctggacagttatttatccaattgttccaacattgtttactcatttggagacggagtctcactctgtcgccaaggctggaatgcagtggcgcagtctcggctcactgcaacctccgcctcctgggttcaagcgattcttctgcctcagcctccctagtagctgggactacaggcacccaccaccatgtccagctatcttcttaaatatttcagggtctaggttctttaatgtaaacatgttttgccacattttaccttttgaccacttctctgtgtcttaagatatttacgtgtaccttccatttttctcattgccataggagagattcacccaggatacacaacctcactatatctattcaccccgtgaaatgactaggtgggtgagaggcatctttgaagcgctgagacctctggagaccctgcctgttgaaggcctcattcggatttgggcacatgaagctctgcgtctcttccaagataggtaagggaagccgaggatccagttggtcccattctcccctgctctgagttcttacagctgtcgaagctggggtctttgcaggggtggtctgcctaagttagagccaggtggtgccagtggtggaaggagcagagtcagccagggcagcctcccgtctggacactggtcacagttgccccagggtaacaaagtcacagtgcgctgaatgcaccggctggcccaccactgtctgcttacacaaggcactttcataaaccttgtggctgtgaacagggtacttttttttttaaagatacatcatagaagtcaaaaaacggggcactttaataaaccttttaaactgtcaggtgggaccacaaaaggtagcagctgcctgtgataaccttaccagagcacgggttcactgctgagttaaaaggtctcccaacaactgcccagtgtgcgtgttccgtaaccaccacccctcttcctgtttctcagtctgtgttctcatcaaaggctttgcagctgcagctctggggca

SEQ ID NO: 15169 - DNA, 1022 bp, Homo sapiens
ctttgggaggccgaggcgggcggatcacgaggtcaggagatcgagaccatcctggctaacacgatgaaaccccatctctactaaaaatacaattaaaaaaaaaaaattagccagccttggtggcgggcgcctgtagtcccagctactcaggaggctgaggcaggagaatggtatgaacccgggaggcggagcttgcagtgagccaagatagtgccagtgcactccagccttggcgacagagagagactccgtctcaaaaaaaaaaaaaaaagtgagactctgtaagtaagtaagtaaataaataaataaataaaatttcaggttgcctaagctgtcatgagttcagcttttaggttcatccatgcatagtaaaggaagatgtgtgataaagactgactgcatcctttggaagagcccacagcacccacaaacatggtgaacatggtgcttcttcaccgtgccctctagttacctaaatgcacatgctgctctccccacagactcgtagaggatgaggagaggcgttggactgatgagaacatcgacacggttgctctgaagcacttccctaacatcgacagagagaaggcaatgagccgacccatcttgtacagcaactggctgtcaaaggtagcaaactcgcatcatttcagacatacttctttttctgccatccctttctaacactaacgaattctaacgaattatcttctactcaaaaatatctttaggctgggtatggtgtctcacacctgtaatcccagcactttgggaggctgaggcaggaggatcacttgatcccaggagtttgagaccagcctgggcaacatagtaagactccacctctacaaaaaaatttgaaaatttagccaggcaaggtaactcacgcctatggtcccagcaacttgggaggcttgagcccaggaagtcacagtgagctgtggtcacaccaccatactgcagcctgggtaaaagagcaaaaccctgtttcaaaaaatacttcagaaaacaaaatatcagcc

SEQ ID NO: 15170 - DNA, 1026 bp, Homo sapiens
aggctacaaaaaaaaaaaaaaaaatagggcaggccctcacacctggttcttttctggagggatctttcctgttccaaatgaaatacagaaatggcttgtcaggttgcaccaggacaataagcacctcccaccactgagattttgactgggattacattgaacttatggatgagtttgatggaactggcatttttatagtagagtgtttttttcctccatgatcatggtatgtctcttcatgtattgaggtcctcttcattgccttttggtgaagttcagttttctctataaaagtttttcatgtttttagatccattcctagtgaatttatatttttttgctatgttataaatgataccttttttgttgcatttttaacagtttcttcatggtatgtggacatacagttgactttggtctaataactaacatttttttctaagtaatttgggtattacctttttttctataggattacatcccagtagaccaagaagagttaagagattatgtcaaagctaggctgaaggtcttttatgaagaagaacttgatgttccgctggtgctgtttaatgaagtcctagaccacgtgctgaggattgacaggtgggcttttttgttgttacagccccacctctcgcctaagctgctcttgagtaagtgtgtgtgccgggtcacaccaggcctcatgctgtcctaccacctccacctcagccttctccaccaagcagcttcccccttctcttctttctaagtccagcttaaccatcctcagtttatcctaagcagaacttcattcttcctcccccagcactgcatacctgccataattatggccctttgaccttctgctggaattgcattagtctctcatgtcagtctagaggacaggaccgtgtcttactggtctttgcattcctcctggacttcacaaataacagttgctcagcaaatgtttaatatacaagttcaagttaaaacatgtccaaaatactgtagacactagatatgagtcaaaaggggaat

SEQ ID NO: 15171 - DNA, 1050 bp, Homo sapiens
ctggctgtaaaaatgaaaagatagcatttataatggatgaatctaatgtgttagattctggattcctggagcgaatgaatacccttctggccaatggagaggtaattaggtgacgtgttgcgttgcattacgtgttaccgggggaccagtaagtcagcactgtgctgtttcccaggtgcctggtctctttgaaggagacgagtatgccaccttgatgacgcagtgcaaagagggggcacagaaggaaggcctgatgctggactcgcacgaggagctctacaagtggttcactagccaggttatccgcaacctccacgtcgtgttcaccatgaacccgtcctcggagggactcaaggaccgggcagctacatcaccagcacttttcaacaggtacgtgggcctttacttggctctgggtcaggaaagtcggtgtccttccaagggacaaagcctgcccctcatagctgtcctgaaacatgggcctctttctcaggtgtgtgttgaattggtttggagactggtccaccgaagcactgtatcaggttggcaaagaattcacaagtaagatggatctggagaagccaaattacatcgtgcctgattacatgccagttgtgtatgataagctgccgcagccaccatcccatcgggaagccattgtgaacagctgtgtgtttgttcatcagactcttcaccaggtgggttcagttttgagatcaacagataaaccacaaaactaaccatcatgctaatataaaactaaattgctataaaaatagaccttaaggccaggtgcagtgactcatgcctgtaatcccagcactttgggaggccaaggcgggaggatcacttgaacccaggagttcaagaccagcctgggcaacatggcgagaccccatctctacaaaaaatacaaagaaaattagccgggcatggtggtgggcacctatagtcccagctactcaggaagctgaggtgggaggatcacttaagcccaggaggcagaggttatattgagctgagatcacggcactgcaatccagcctgggc

SEQ ID NO: 15172 - DNA, 1045 bp, Homo sapiens
atcctcagtttagagaagttaaagggcttagagaggtttggaagtgtaaggggtatctcgaaagctctaagtggctaagctgaggcccgactcgagtgttctggccccgagggccaggctccttctatcatgtcacacccatctgccaaggccaaaattgttttctgaggttaagtcacagagtttcctgaagagtgagaagatgtaactattttctgaaaggcgaatgctcggctagcaaagcgaggcggcagaacgatggccatcacccctcgccactacctggacttcatcaatcactatgccaacctgttccacgagaagcggagcgagctggaggagcagcagatgcacttgaacgtggggctcaggaagatcaaagagacagtcgaccaggtgcgtcacaggcacaaattcctcacgggagtgagctgcagtgaggacccctttccatataatttctgcatgtttctcgtctctgagtgtgggctttgctctttaggtagaagaactgcgtcgtgacttgaggataaagagccaagagctggaggtgaagaatgcagcagccaatgacaagctgaaaaagatggtgaaagaccagcaggaggctgaaaagaagaaggtatggtgtcagggaattctggcctgtaaggactgagcattttcagtctccaatgagagagtaggaaatgtagttccaaatgggtcttagggttagagagagggagggagggagagagagtgtgtgtgtgtgtgtgtgttggcagagtgaagaatgttgtttagaatttagtcagcaaattaaccaatgcttaacccatacctaagccatccctcctttctaggttatgagccaagaaatccaggaacagctgcataagcagcaggaggtaattgcagacaaacagatgagtgtcaaagaagatcttgataaggtggaacctgccgtcattgaggcccagaatggtatgtaaagactgtcagagctttgatgtctaggaagggtggtctccgtcaacattactgtggagttcaggtcactgaa

SEQ ID NO: 15173 - DNA, 1023 bp, Homo sapiens
gtctagaaggatcgtaaacatgaaaaagctattctaacagtgcaggatgctgagaggatgattgtcccagaaggaaaaagatttttaactatggccctcttggtgtatgactcaagctacctcctcatgccaatagttgttcaaaaggatgaggtgatgttagcattaagcatgtaagctttattggtaaacctgaaaacgtctccggaaaccactctcgggtggtggtaacagcctatcaatcagggtctctcatcagggactcggctaaccgtgatcctgtgctttccccattcggtgtttcaaccttctcttctgtggcctcatcctcaggtatccgctgatcattgacccctctggacaggccacagaattcattatgaatgaatataaggatcgtaagatcacacggaccagcttcctggatgacgccttcagaaagaacttagagagtgcactgagattcggtaacccccttctggtccaggttggtgttggcctttgaattcttgaaacactgcattcaagagtgaattcctttttgggggctgcctttagttttcaactttgtaagacttcattttgtatcagaaggataaagctttgcggtggttctgtaatagataaattcaacagaatcattatttgcatttaaaattctattcagtggtcgggcgaggtggctcacacctgtaatctcagcactttgggaggccgaggcgggtggatcatctaaggtcaggaattcaagaaaagcctggctaaaccccatctctacaaaaaatacaaaaattagctggttgaggtggctggcacctgtagtcccagctactcgggaggctgaggcaggagaatcacttgaacccgggaggcggaggttgcagtgagccgagatcatgccactgcactccagcctgggagacagaaagagactgtatcttaaaaaaaaaaaaaattatattcagtacagccataaaaagcaagaaacagccaggcgtggtggcttatgcctgtaatcccagc

SEQ ID NO: 15174 - DNA, 1035 bp, Homo sapiens
ctcttgggctgggaccccttcctggactgagtctgctcaccttggattaggccacctactgcttcttcctcttccttttctcaggctctgcaaggaagagctccagcttcctcttggagaaggagattctgggccccttttctctctcccaaacctaggtggtggccatgcccctcgagctctgcttggcacgtgtctgccagtctcagggggctccatgggagtgaggaagggctcggcggccctgggggtctggtcctcctccgccatcctcgagtcctcgggctacgtgccctcatctttggcttccagggacacgggcccagctggccacttctatgacaagaatgtgggttttttgtgacagggcgtctactatatgaacttcctctggactctgacttcagtgtgtaggaagccaccttacagctcatgtcacccagagaacagtcgttgcagctccagttggaatgactgggggtgtcttccgaatcgccatcataaagatctaaaagctgaggacaaaagtgtttctcagtccaagagcagttctgcgaggcggaatcaagtctaacatgctcgcatgcgctgactcttcctcccgtcactgatgctggtttttgcaggctctgccttgcaaatgaatttttctttctttttttttttttttttgagacggaatcttgctctgtcgcccaagctggagtgcagtggcgcaatctgggctcactgcaacctccacctcccggattcaagcgattctcctgcctcagcctcctgagtagctgggactacaggcgcccgctaatttttgtatttttagtagagacggggtttcaccatattggtcaggctggtcttgaactcctgactcaggtgatccacccgcctcagcctcccaaggtgctgggattacaggtgtgagccaccacgcctggccgaatttttatttgttttttgtttgtttttgttttttttaaaaaactgagtctcgcactgttgtccaggctggagtgcagtggcgcgatctcggct

SEQ ID NO: 15175 - DNA, 1050 bp, Homo sapiens
ccaccatgcccagctcatttttgtattttaatagagacggggttttgccatgttggccaggctggtcttgaactcctggcctcaagtgattcacctgcctcagcctcccaaagcactgggattacaggctctatgttcttagagcatcttgtgctttgccttcctagcacttttctgaatttgtaattctgtgtgatgatccaactgtgccttctataaaacaaagctcccttagaatagggacattatctttcctgctctccatcttctcaatgcacagtgcagtgtccagtttagagttaggcccttgctgtgtacttgttgagtgaatgactgagtaaagccatgtctgtctataccaaacttgaaagagatctttagaagatgaaaaacctattcagttttgggcccaaaagtaacttgggtattttttaatagctcatatcttttaaaagacatttaaaaatattgctagtaggtaaaaaatttaaccttcttaaaatagggaaatcgtgtaagagacaatgaagtaatagtaaacaaatgacacagattacttttgatctacttctgtcaaaccatgtcacctacaagatccatgtacaacttttaaaaactgttctcaggccaggagtggtggctcatacctataatcctaacacttttgggaggccaaggcgggaggattgcaggggtccagcctgggcaacacagtgaaacctcgtgtgggttcgagaccagcctggacaacatagtgaaaccctgtctctacaagggtgggcgtggtgtcatgtgcctctagtcccacctacttggaaggctgaggtagaagggtcacttgaactggggaggttgaggctgcagtgagctgtaatcgtgccactgcactccagcccgggcaagagagtgagagcctgtttcaaaaaaacaaaacaatcaataataaacaaaaactatactcagaattacttaacattcaagccaaagaaccttcctaccttcccacatcttaagattccaggtcacaaatgtactgcccagagaagttac

SEQ ID NO: 15176 - DNA, 1026 bp, Homo sapiens
gccaaatcagtttgtgttacagcttatcttgctttgtatcaataggaaaatagcttaaatatataggttttataagaaagaagcaagaatcattcatgaggaaggaatttataaggattttatatttacaaagtaagaatcaggcctggcataggattacatcacgcctgtaatcctagcacgttgggaggctgaggtgggaggatttcttgaggctaggagttggaaacaagcctggacaacatagtgagaccccatctctacaaaaattaaaaattagctgagtgtggtggtgtgcgcctgtagtcccagctactcggggccgaggtaagaggattgcttgagcccagggtggggaggtcgaggctgcactgtgattgagccactgcactccagcctcagcgacagaatgagaccatctcaaaaaaaagtaagaataattcagtaagagggaatattttaacatcttagttaccgcattgtagattattgctctgccatgaagctgtttttttctttagttgactcacagccagcttacccttttactacccttttttgttctgctacagtaaaacttgtacaggtgctcattctctttacttacttggatctctgctttagagctctgtcttgccttaatatttcatttaataaatatttgagtagtttttgtgtgaaaagcagtatgccagactttgggaaatcaaagaagtatgaggtatgggccctgaccttaagagtatcatctaaccaaggacggacatgatattcacacactcattctaagaggacttactgagtgcctgctctatattgttaagaatctctgctgtcaaagagttcacagtccaatggaataatcaagggcttattcattcaactaacatttattggacctgtggatccaaagataaataagacatagtccctggcccaaagtgcctacagtctagtggtgagacagataagtaaaccagcaatgataaggcagctgctaaaaggcattcagaactgaacattgcc

SEQ ID NO: 15177 - DNA, 1023 bp, Homo sapiens
cttcatgttccttgctgatgttcattttgttgcctgcttactgactagtcccacctaaaatctacaagaggagggctttatctgtctttgttggtgagataccaggatctaaaatggtgcctgaagcatatagaattcaataaatattggatgaatggatagtggatattctcaagtaacttttttttttgaggtgaagtctcactcttgtctcccaggctggagtgcaatggcgtaatgctcactgcaagctctgcctcccgggttcaagtggtcctcctgcctcagcctcccgagtagctgggattacaggcgcctgccactacacccggcttatttttgtatttttagtagagacagggtttcaccatgttggccaggctggtctcgaactcttgacctcaggtgatccacccgactcggcctcccaaagtgctgggattacaggagtgagccaccgcgcccggcctttctcaagtaacttagtgagaaagtctgcattgggaattaggtattgtgacgtctcataggcctattttattttttaataggtaatacgttcacatggttcaaaattcaaagagcatgcaatgaagtctctcacactttgccctccagtgccaccctgtccccctcctctgaagtaaccagtattaagttcttgtatgtatttccagagatagccaatgttttaatacacaaaattacagatatagttttcctcctttataaaaatgcaaactttagcatctgcactgttttacaccttgttttgatttgtatacttcggagattgttctttgtcaataaagacattattgtgtaaaagcatctttaatgcctgtacaatatcccattgtgtacatttatcataattcttcttttgatggacattgatgtttctagtctttacacgctatactgcaataaatcactttgtacatacatcattttgccttgttgctagtatatctgaggaataaattcctgtgaggaattgctgggtgaaaaggatatgtgcat

SEQ ID NO: 15178 - DNA, 1109 bp, Homo sapiens
aaaacaaacaaacaaacaaaaacaaaaaacaaaaaattagccaggtgtggtggcaggcgcctttaatcccagctactcaggaggccacggcaagagaaacacttgaacccgggaggcagaggttacagtgagccaagatcacaccattgcactccagcctgggcaacaagagggaaattctgtctcaaaaaaaaaagtgttgactagacagaaggtgatattgctgttggggaggatggggctgaaccctggagggcaggggtgctaggtactttttcctacattgacttgatagaaattaggaggccacaggccaggtgtggtggctcacgcctgtaatcccagcactttgggaggctgaggcgggcagatcacttgaggtcaggagttcgagaccagcatggccaacatggtaaaaccctgtctctactgaaaatacaaaaattagccgggcatgttggtgcatgcctgtaatcccagctgctgaggaggctgaggcacaagaattgcttgaacctggaaagtggaggttacagtgagctgaagtcatgccagtgcactgtagccttggcaacagagcgagactctatctcaaaaaaaaaaaaaaagaaaaaaattaggagacattttgattagagataagatgtggctggaattaatgaataatggtagctacccaaatacttctgtgtgctctgtgctttctgttatctgcagccttcaccattgccttgcaggggaggggtgggcctttgatctcctattagtgagaggaaacttgcactttgcccaaggccacttggctaccaagagggaaggcaggatttgaacttaggcttgcctggtctgggctctttctctcgctaccagactgcccctgcctgggaagccatctgccaggggctgatgaccccatggggaagaggaatagctggcttgggtggttactcctgctcctaaaaaggtatgtgagctcagagtgcatgttggcagacaccccatcccccgccccccagaagaggaggaaataggatggtcacttatcagtggaaattgagttagaactcagtgattaatggaaagaggacaggcgagtgggagacggttgt

SEQ ID NO: 15179 - DNA, 1036 bp, Homo sapiens
cctcctacctagtatgcccaagtttaaatgtggtggattaatttgttgaccttacctgttcttccttggggtgactgttttgtgcatttttatggagcatgctcaggtgtctataacaggtgttttaaaactcttctataatggagatagggacagtactgtaactcggtatttataatttaagtaagaaaatgtggaattccaaagttggttcacatcaccagaacatttcatgcagatcaaagaacttgatgacatttccttaggctgcttaaattgtagccaaagcttttgtatgtatgtttgacagtcatttggctaaggagtacttcacttgctcttgaaaatagttactgtaaactcatctttgacatagttggaaatcctggcgcttaaagtttggtcacatgacatagcttttgccagtgttgtagtatgtactggggtttctagtatcttcaatttcattctggaaagagcctgagatatctgagctgtctgttcaggaacatgtcaggactgttaaatgtggcatatagaaattgccaagtagattatattttttaaagctgttggagcatctttcagcctcaagtattgctatttcatatttaatattcttcctcgtctgtttcagtatgacttttctaccaagtggaaaagataaggtaggcttgctgagttagaagccctgggttccaatctctacttgggaccttgcccctgaggcgcaagggtcaggctatgtgggaccccctcccttttgcattgttgcatggttttaacatcattaacttggaacaaaaacacattatagagtatggtttttaagaaataattttgtttggggaagaaaattcaaattgacaaatggcagttaaaatttggattcttttgcagttatggtacttgctattcatgcaaatcagtatccacccagggtgctcctgtttgacattgccagtggatttgataagatcttatgaaccatgccatctcttctagtttcctctgagttgactggaaacaaaacttg

SEQ ID NO: 15180 - DNA, 1179 bp, Homo sapiens
ttttatcatttctgtatacttgagtttattagagattgttatgttaggcgacactgtataaaattgtatggatattttgagtgaaaatcaaaagtaaaattcacatgtatttccttttttatattttcatccaatttcttgacaacttgaataaatttcataaagagccttcctaacatgaaatattggtaaattaaattctttactgttgcaataattaatgaaactttagtatcagtattgttttataattttaaggaaatcatgtttgtttcactgctttgtttttttttttagctgttgccttgtcactgtcacagctaacaagacttactacatacttgatattctgaagtactgtggggctgtcctctgtatactgacattaaataaacgtgtgtgagtgaactgtaaatgtagataattttcagtagtcattttcacatctaagctttaaaaatcccagtgaaccaaaaccagaaaagtttttaaatgctgtaaaattaaggaccttgttaatgtttatagaacagccagccaccggaattgctccctcttactaaagctgactgtttctcatagttggcagcgtactcgatgaaatgttctgcgtctcagatactgttttatgtggtcctcctctgtgccaactccagtccgggagaaggactgttgattggcgtttcggctgagctgtgtagaggcttctgtttaatgagaatgcagacattctgaagtcgtcctgggccacgagctggcttttgttacatggactcactatcccggatgctggacatccgacattctgtccagccacccagccagcagctgggagagtggagaaggtagcggctggtaggctgcttgcttttttttattttgctgtaagttctgggatatatgtgctgaacgtgcaggtttgttacatagggatgcatgtgccacggtggtttgttgcgcccatcaacccgtcatctatgttttaagccccgcatgcattaggtatttttccttatgctctccctccccttgcccccaggtaggctgctttcagtaggagctcttttcctggctagagttcattgtctgcctactcctcatcttgaatagtgtttgcttaaggctttgtgctggcgtgaggttgtcctgctgtagacaccaggcccgtcgtcggtgcag

SEQ ID NO: 15181 - DNA, 1117 bp, Homo sapiens
taccctgctgaatatggccacagctttttgggtttggaatccaaaaatgacatatttttcgtaaagcaaaagcaaacttattcgagcttaggcagcatgatgggattgtattttgtagctaatctaatggagacgatataaattctacctgcaataatatacctttgcagcacattcttttaatactctttcagccccagctgtgtcatggaggccacaaaggcaaaccggatgcgtactttgcccctcagtagtttatgaactaacaggagatgaaacaagacccagataacttctagtcaaggccagaaagctaaagatagtgaaaaagaactgaatgtatttagagaaagggagattgttcctggctgaggacatcagaagcagctttgttgaagaagtggtatctgaactagatttgaaagggtgcgtctgagttgaaaatgcagaaggggagaggcaggttctggggcggttgggggtgcatttcaacaaccacagcagaaggcccagtgttcgctgtgggggtggtgtggatcagcagcacagaccaatggacacacttgggtcagatcgaggcccctgtctctccccatcctccctcttccccaccccacagaaatttccagttccatccaacatgctgtgccccttttcatgcatccgtgcatttacacatggatgtgtgccctttttcacctggcaaaaattcccagccttcaaaatgcccctcagagatcacagcttctgggcagcccaccacctctgggctgttcctgcctcttgattgcacctgttgtaccatgatgacatttttcctgtctgcctcacctgtctgcattccttagggaagcttgtctgccttcagaatcatcagtggagcttttgaaagggcagatcttggggcctcaccccaggagatccgattcagcaggtctgcggggactgaggtatggcaggggaaaccgcccccatctcaagggtgaggttaggacttggctcctgtgtatgtattccacccagaaatactgagttaacattagctgaattaactaaacaaagtatcaagcataatacccacagggtaagccagtgaggatagaggataaatacatta

SEQ ID NO: 15182 - DNA, 1683 bp, Homo sapiens
cctacccatgttaatgtggataaaattcacgaagcaaaatgaagtaaagaaacccagaaaagccctttcaagttgcaggagatgatatcatttatataaagtttaaaaacatttcagaactgaactatatatttttagaaatatctgcatatgccacataaatttttaaaatcataagaatgctaaacagcacattcaggacagggtgaagaaacaggcatgcaggttgtgcagtaggaagctgggtaacattgttccttatggctttgttgtcgcttccagaatttcattaaaaactttttaaaaaacatgggcccacattatgaattacgtctgcttttagagtactaaaaactccaagcaaaaacacatgggtaacgccgggcacggtggttcatgcctgtaatctcagcactttgggaggctgaggcggacagatcatgaggtcaggagtttgagaccaccctgaccaacatggtgaaaccccgtctctactaaaaatacaaaaattagccaggtgtggtggcaagcgcctgtaatcagggctactcaggaggctgaggcaggagaattgcttgaacctgagaggcagaggttgcactgagctgagatagcgccactgcattccagcctggaccacagagcgagacttcatcttaaaaaaaaattagctggtcatggtggcacacacctgtgatcccagctattcagtaggctgaggcaggagaatcatttgaacctgggaagtggaggttgtggtggcactccagcctgggcgacagaacgagactccatctcaaaaaaacaaacaaacaaaaagccagccgggtgtggtgaggcaggtggatcgccagaggtcaggatttcgagaccagcctgaatggtgaaaccctgtctctactaaaaatacaaaaattagccggggcgtggtggtacgtgcctgtaatcccagatacttgggagactgaggcaggaaaattgcttgaactcgggaggcggaggtcgcagtgagccaagatagtgtcgctccactccagcctgggcgacagagcaagggtccgtctcaaaagaaaaagaaaaacctcacatgggtaaaactgttaggaaggctcttatctcttcactggtcatgaaatcaacttagtggattatgactagtattttttaaaaagtgatgtagaatagggctgggcgtggtgtctcacgctggaaatcccagcacttcgggaggccaaggcaggtggatcaatcacttgacgtcaggaatttgagaccagcctggccaacatggtgaaacccgtctctaccaaaaaatacaaaaattagctgggtgtggtggcagctactccggaggctgagatgagagaatcgctgaaactgggaggcagaggttacagtgaactgagatcgcaccactgcactctagcctgggtgacagagtgagaccctaatctcagaaaaaaaaaaaaaaaatgatgtagaatagatacaatcagcgggcatttatatagggatggtaagtagttccatcaactttattttatttatgtatgcagatatttatatacacgtgtactaggtcataatgtaaaatgtatcattgtggtctctgtttttgtttttgtttttttcagatggagtctcactctgttgcccaggctggagtgcagtggtgcgatctca

SEQ ID NO: 15183 - DNA, 1097 bp, Homo sapiens
taagtgaatgactcctttcccaatcctatttgaaggcatgggaggcagaataggtagtaagtgttaaaggatggggtgtcctggagtcagagccgggcaggtcccagcggccccttcctagctctgtgctggggcaagtgccctacctcactccgctccagtttcatcaccagtggaatggagatgagaatagtttctacctctggcttggtaagaggattaaatgggtcagtgcatgtaaagttaagcacggtgcctgccgctgtacatttcagtaaaggggagcccctgctgtcatctgtgctagcctgcgttctcgccctctagtcccttctgatatgtctctgacttctcatgactttagtttctccttctctacctccatttctcttccctgcacttttttcttcctctcttattgggattcaggaattttattctgttctgtgacttatgttccatgtgttggcagaatgtgggataccagcctgggtgcatccttttctcatctattggagtgaccagttgcacttgtggactgcctccttgcagccaaggtcttgtagacagagttctgggaaatctcaaaacgcaaatcccaggcataggtagaatctgggaatgaagccactgtagctccttgtgatcaccagcgattcctggtcttttaggctgcaggactttgtgttttctcacacccagctataatgtaccttgataaacctctgaccttatttttgttgttgttgttgttaacctgacttacgtcccatattggtggttatttggccatcgtgtgccagcactgtgccaggctggctctagggatgctgtggtgaaccagacagacccttcctgaggtcactgcctcagaaagatcatggtctggcccatgaactttaaaagggagaactaagtgcaggtgtaggggacacacaaattgaattttcaggactgccttggaaaaccagtggtggggaagatggaatgaggataaccctcttctgaaggagtgactaggaagtagcttttgttaggcatcagctatattatacccacgtgtctttttcaatagaagactggcatctactggattt

SEQ ID NO: 15184 - DNA, 1031 bp, Homo sapiens
gatcaccatcttaaaatccatgcacagaggcgtcctagtcacactgctgaagatcacagtcttaaaatccatgcacagaggcgtcctagtcacactgctgaagatcaccatcttaaaatccatgcacagaggcaccctagtcacactgctgaagatcaccatcttaaaatccatgcacagaggcgtcctagtcacactgctgaagatcaccatcttaaaatccgtgcacagaggcgtcctagtcacactgctgaagatcacagtcttaaaatccatgcacagaggcaccctagtcacactgctgaagatcaccatcttaaaatccatgcacagaggcgtcctggtcacactgctgaagatcacagtcttaaaatccatgcacagaggcaccctagtcacactgctgaagatcaccatcttaaaatccatgcacagaggcgtcctagtcacactgctaaagatcacaatcttaaaaatagccagagaacaatgacgtattacctgtagaggaacaatgatttaaatgactgtggatttctcatcagaaactgtattagcccgttctcatgctgctatgaagaaatacccaagcctgtataatttataaaggaaagaggttttattgactcacagttacgcatggctgcggaggcctcaggaaacttacagtcatggtggaaggcacctcttcacagggctcactgtcacaagaacaggaggggggaaaccatgcccatgattcagttatctctacctggtccctcctacgacatgtggggattatgggaactacaattcaagatgaaatttgggtgaggacacagccaaaccatatcagaaacaatggaagctggaagacagtagcatttttttggttttttgtttttgttttgttttgagacggagtctcgctctgtcgcccaggctagagtgcagtggcgcgatctcggctcactgcaacctccgcctcccgggttcaagcgattctcatgcctcagcctcccaagtagctgggactacaggtgcccgcc

SEQ ID NO: 15185 - DNA, 1031 bp, Homo sapiens
aattataacacatgctctgttttccctctgcacacggtgacgtactcatagtggcacagagggagagtccaccctgcagagaggagccttcctcactgccatgtttagcactgctggggcacagtgattatgaaaagcaagccgcctgtcgttagtttcattattgtccttaaattctctggttgcccgcacccaggtggactcctttgacacaccactgtcaatacgttcctttttttccttctaacaactttatatttttccttttaagttacaacccgcataacataaaatttcagccttctacagtgtgcagctcagtggctttagcatcagttagcagcagttagcaccatccaattccagagggttcccatcactccaaaacagagagaacacccttacccattagcagtcacttcctgttctcacagaaccagcccctccgcccatggcagccactcatctgctttctgtttctatggctttgcctattctggacattttatataaattggatcatataatatgtggccttttttatctgacatctttcactttgtatcatgtttcggagttcatccacgttgtaggtgtatcagttcttaattcctttttatgactacatcacagctctgttgtatggataggccacattggtttatcatttcaccagtggatggacatttggattgtttctgcttattggctactgtgaataatgctgctgtcaacatatgtgtgcaagtctttagggaggatgtatgttcccagttctattgggtatctgtctgtaagtggaattgcaggtcatgtggcgattctgtgttgaactttttaaggatgtcaaagtgtttttcacagtggctgcaccatttgtgttccaccagcaagatatgagagttctagtttttcccatcctcaccaattttttttttttttttttttttgagccagagtttcgctcttattgcctagtctggagtgcaatggcgccatcttggctcactacaacctccgcctaccgggtt

SEQ ID NO: 15186 - DNA, 1032 bp, Homo sapiens
gtggcatgatctcggctcactgcaagctccacctcccgggttcacgccattctcctgcctcagcctcccgagtagctgggactacaggcgcccaccaccacacctggctaatgttttgtgtttttagtagagatgggttttcactgtgttagccaggatggtctcgatctcctgaccttgtgatccgcctgccttggcctcccaaagtgctgggattacaggcgtgagccaccatgcccggcctattttttatttttgagacagagtctcagtctgtcattcaagctgaagtgcagtggtgcgatcatagctcactataaccacaaacccctgggctcaaacaatactcctgcctcagcctccaaaatggctaggggtatgcaccatcacacctggctcattttttaatttttattttgtagagatgaggtcttgctgtgttgtccaggctggtgtcaaactactggtctcaagtgatcctcccacccctcagcctcccaaagtgctgggattgcgggcgtgtgccactgtgcctggccagttttgttttttggttttgggtttttttttttttttttttttttgagatggagtcttgctctgtcgcccactggagttcagtggggtgatcttggctcactgcaacctccgcctcttgggttcaagtgattctcctgcctcagcctcctgagtagctgggagtacaggcacccgccaccacgcctggctaattttttttttttttttttgagacagggtctcactctgtcacccaggcgcgtagtgcagtggcacaatctcagctcactacaacctctgcctcctgggttcaagtggtcctcccacctcagcctcttgagtagctggggctacaggtgagtgccactatgtatttgtatttttagtagagacggggtttctccatgttggccaggctggtctcaaactcctgatctcaggtgatctgcccgcctcggcctcccaaagtgctgggattgcatgcgtgagccactgtgcccagccacacccagc

SEQ ID NO: 15187 - DNA, 1061 bp, Homo sapiens
tatttgcggtatgccagcttgaccctatttaggtttgaaagcaaatggttggagctaagactatctgatatttcctatgcagttcaaaggaagatttaattctgtcatgccttacaaagagtgaatgaggtggatagagcacgttagtcttaaaatcctgattcagttcttttttttttttttttttgagacggtgtctcgctctgttgtccaggctggagtgcagtggtgtaatccgggctcactgcaagctccgcatcctgggttcatgccgttctcctgcctcagcctcccgagtagctgggactacaggcgcctgccaccacgcccggctaatttttttgtattttaagtagagacggggttccaccatgttagccaggatggtctcaatctcctgacctcgtgatccgcccgcctcggcctcccagagtgctgggattacaggcgtgagccgccacgcctggccctgattcagttcttataaaataattaatacctagattagatcggtgtagtgtggcattgcttggtagttagaataccatttgtgtttacactgaaataaaaagttttaccaacttttaaagagttaaaaaaaaaaagagttaaaaacctaagtgcagccctacacttttaacttaggctttgttcttacatgtgttgtccagactgcctttccatgctgtctgccgcagattatgctgagttgtcattggtttcttttaatattcagtagttacagaataatagggtaagaggggggatgcttatctatcctacctctggttggttctttcctacataagcaaagcatcacttattttgaaatgaataatgtttttctttccttttttttccttttttttttgagatagggtcacactctgtcaccagtatagtggtgtgatcatggcggcagtgaacttgaacctcctgggcgcacactatcctcccatccatactttacctcgaaagtagctgggactacagatgtccacgaccatgcctgactagtttttttgtattttttgtagagacaagagttttgccacgtagtc

SEQ ID NO: 15188 - DNA, 1050 bp, Homo sapiens
caaactgcagtgcagcttgcagttcagagaaaatctcagccagagtagattgttagaagagtctgttgggcaggaatggtccttctttgtgaacatctgctgtgttcagtcattggctgggagcagcctagagtagcctagccttggtatgggtgctgtagtagatttctggtagctggggctgtcagttaactacactccttgcaacattttctctcttgaagggaaatctgagtggcacactcaaggctgtcagaattcccatacgtgtttttgtacttaaatacatgtgtgtaattccagcactttgggagggtgaggcgggaggatcacctgagatcaggagttcgagaccagcctggccaacatggcgaaaccccgtctctactaaaaatataaaaattagctgggtgtggtcgcgggtacctgtaatcccagctacttgggaggctgaggcgggagaattgcttgagcccgggaggcggagattgcagtgagccgaggttgtgccactgcactccagactggacgacagagctagactccgtctcaaaaaaaaaaaaaaagtgataatatgttttcttgttattgttagtgtttttgtaaatggaataatctatgctattcatgtacttttatgctttccaaacaagtacatttccactagcaaggtaaacaactttgttttcaccttgtcttcgtcatggtgttagttaggttattaattttttttaaatgctatcctttaatggcttatattagcatttttttcttttcttttcttttctttttttttttttttttttggagatggagtttcgctcttgttttgttccccaggctagaaatgcagtgacgcagtctcctctcactgtaacctccgcctccccggttcaagtgattgtcctgcctcagcctcccgtgtagctaggattacaggcatgtgctaccacgcctggctaattttaaaaaatatttttagtagagaaggggtttcaccatgctggccaggccggttttgaactcctgacctcaagtgatctcccgcat

SEQ ID NO: 15189 - DNA, 1049 bp, Homo sapiens
gtttccatgtggccccaggtgttggggaattttatgtttcgggttgccagagccaacttgtagtccagttacattcctcttcttcctggcagtgagaacaccggtgaaatgggaggtggttagcttggttgcctggggacaaattggactgagttgctttattcctgcatgtatgttgaaatagtcatcttcacaacttagaatatagttggagttttttttagaagagccatttattttgatggtgtgactgaaggctatacatacagtcatgtattgcaaaacaaatgtcattttggtcaaggacagtggtcccataagattataatggaactaaaaaatttctgtcgcctagtaacttcaccttgtctatagtgcaacagcgtgtagcattacttaggtgtttgtgtggtgttggtgtaaacaaacctactgcactgccagtcttacaaaatctagcacatggagttatgtatagtacatagtacttggtaatgacaataactgtattactggtttgtggatttactatgctatactttgtatggttattttagagtgtattcctacttataaaaattatcagtttgctgtaaaacagcctcaggcaggtccttcaggaggtattccagaaggaaggcattgttactctagaatatgacacctccatgggtcttattgcctctgaagaccttccagtgggacaaggaaggtatggagttggaagatggtgatattgatgatcctgactgtaggctaggccaatgtgtgtgtctttgtggttttttttgtttttgtttttgaaatggagtctcgctctgttgcacaggctggagtccagtggcatgatctcggctcactgcaacctctgcttccctgcttccagtgattctcctgcctcagcctcgtgaatagctgggattacaggtgcgcgccaccatgcctggctaatttttgtatttttagtagaaatagggtttcatcatattgggcaggctggccttgaactcccgacctcaagtgatctgcctgcttcggcctccgaaagt

SEQ ID NO: 15190 - DNA, 1105 bp, Homo sapiens
attgatacagatagatctcagttggtctctgatcttgtttgtagggattttgttggatgaatgcaaggtgggatggtcttcagattgtaccaatttagctggcattgctaaccaactgttggaatctctgaaaataaaagatcttgaaattcctccccctctccccgcaaagagaaatacgaaggcagacaactgggtaaattgtcctacccctaactgccatccacagaaaagtaacattttgttttatttgattaactgtgcttgacaacattagaaacagtggaaaatcatctgggacttgggcaggtagaaactccagaggtaggactggaggaggggctgtgtaacctctctttcttactcttaagaataacctttttatctacccgagatttattggctccttaaaatcataactaaaacctgtagcctctttcagcagaaagcaatgcttagagtaagacttctactacactgccagcccgaaggcttgaacagaaggcaagtggaagccctaaaactttggctgttcctggcacgattccagtcccactctccctaccctcacccacagcttccccatcactgtctgcttgggaaccgtgagcattgttctcatcttgtgcttctttctgagttatcaggcagccggaaggccagattcccttgtcttccctcttttcatggactctgcattttcttttctgatcctgtttttcaccttgatcttcttggaacttttccctgagcccttttaaactcacggtatatcagcaaaattcccctaatcttcagtttcttctgtgatttccgccccccgccccacacattcttattctgactgaaaataggccatctcctgatgacactgcctccctgcagccctccgaaagagtacttgcctgcccctccatcccttttgtgttactaggcttcacagtagcatgtcctctttttctttgttgccatttctttacttttcttctcgcctccctaaaaacacctctgaatgtgatgtcatgagtttgtactatgcgctcctgatttttgctgcttaatccagtgtgctgtggaggattgaacctcttatgatggagttccc

SEQ ID NO: 15191 - DNA, 1050 bp, Homo sapiens
gtcagtaattttacaattaaagaaaaagttatctgaacaaagggagagtgcccttaaattgctaagagggagcattgctttgtttttttctagtttcgttgtgtcttacagtgttcaaacactgtactggaagtaaataattaagtttaaaataattttcttctccagtgtttgattatccatttctttttgttccaatttctgtatctgaaaaacaatattggcttcaaaaacgaacaaaaaaaaatttaacttcccccagattgcagatttaccatgtaaatgtgtttccaccctgttttcaagctaatgtgacaaatttgctacattataaagaacagaaacctgtgtacagattttggggatagcacacataaaatagtccaaggacattatcaactcaggtgcagaagttcttgctgaagttctattaacaattgtgtttaaaaacaccagatgggagcagatttaaagagggagattctaatggaaggttagttgggatttgtagggaagagagagaaggattttaattgaaaagatactagaccgtattcttacctttatagcgttgtcttcttttctttcttttctttttttttgagtcatattttcgttcttgtcacccaggctagagtgcagtggtgtgatctcggctcactgcaacctcagcctcccgagtagctggaattacaggcccctgccaccatgcccagctcatttttgtattttcagtagagatggggttttgccatgttggccaggctggtctcgaactcctgacttcaagtgagctactggccttggtcttctcaaaggttgggattacaggtgtgagccacctcgcctggcctatagtagtgtttttttttcttttcttttctttttttcttgagacggagtcttgctatgttgtccaggctggagtgcagtggcacaatcttggcttactgcaacctctgcctccctggttcaagcaattctgctgtctcagtgagtagctgagattacaggtgcgaaccaccacatccgggtaatgtttgtattttt

SEQ ID NO: 15192 - DNA, 1046 bp, Homo sapiens
cccgggaggcggagcttgcagtgagccaagatctgcactctagcctgggcgacagagcaagactccacctcaaaaaaaaaaaaaaaaaaaaaaaagtcaactttaaacaaagagacctgcctgtgttggcaccttcagcaaatattagtatctacccagaaattaatgacatttctttattttcattgtatttatattttttgatttacatatagcaaaactgaataatttttggtgcacatttttgtgagtgttaagacatgtatacaatactcctcccttatccatgaaaggtatgtttcaagacctctggtggatgcctgaaactgtgggtagtactgaaccctatatatatactatggttcttcctatgcatacatacctatgataaagattaatttataagttagacacactgagagatcaacaacaaaaaataataaaatgaacaattataacaatatgccaacatcgccaatactttggggctgttagtaagtaaaatacaggggacttgaacacaaatgctgcgatgctatgacagtccagctgataactaagatgacccaagtgactaatgggcacatagcacctacagaggggatgtggtgcacaaatggatgattcaggtactattcctggaattttcatttgaatgttttcagaccacagttgatcatgggtaactgaaatcacagaaagcaaattccaatgcggggcaccactggagtttcatataccaccaccacaattaggataccaaagagttccagctcctccaaaagctacctcagactttcttaagcttcctcacacttctagaccctggaaaccttggatctattcattatccctgtacttttgcctttttcagagtgtcgtatgaatgaacttgtactggcttctttcactcactgtaatgctttggaagtaggtctaggttgttgaatatattagtagttcactatttttgttgctgtgtactgttccagtatatggatgtactacagttggtttatccatttacgcattgaaaacatctgaat

SEQ ID NO: 15193 - DNA, 1046 bp, Homo sapiens
aagttgattgcctaaccgggtcagtgctgttaaaaggcggcatgatggaaattcaggaagtcaagtcaggagtatcttaacttgccccaaagagatggagaccatagaattgtgggcttagtgactggttcaggcagcctttaacatgcctgtaaagactattaaatgccgttaagtataggtgcactgttccatcatttactccacacgtttctgttgaacccctatgaggcactccgttgctgtgatacggtatcatctctcctcagtccccactgtgatattgtgcagccaccctttgcatggattccacaccctacctctgcacatcctgtttataccattccaggctgcccgcctttggggactccatcctcattccagttgatctgcaccctaaatgcccaccttgctcagccctacccaccagctttaggataccacctcttgccttcatgcagacaccactgcactgcgcagtgtacttttgacagtcccctcttgtcactgtgcttacgtgtagacctacctcaagtttggacttcgtttgtttagagaagcagctgaacgttaacaaagtgggcgtattagagtttaaaatatatgtagagtttaggccagattgtaggcccagtctggttccttttactgacttaggaaaaacaaagtttacccaggcacgtgtggttaaatataatgcaaaactgtggtccaagggtcttaatgaaatggatagattaatctgaggattttttttttgttgcttgattattattattttttttaaggtagggcttgaaaagaaggggagtggaactagaggggaagctcgggtatagccttgtctgttgtttatagtctgctttttaaaaatatataatcaactaaattgctcatgctgaatgatgttgatagttcccagaaggagcaaatttctcagatgggctgctgttgccttgggtgtagaatttagcaaggtgacttttggctattggatatccatagaaacagatggtcttgctcatttatgcattatgcattttata

SEQ ID NO: 15194 - DNA, 1031 bp, Homo sapiens
ctctcgtctctctccactgtagtgtaaaactgagtggaggaacttggtatgtgtgttcagttctctgtcagtcccctcttggcatgtggtgggtgtataataaataagttattgaatgaatgagaaggtggtgggagtgcaggattcccctggatagagatttgcaaatacaggcttttctgccatttgctctgtaacttgggttgtctggaatcttataacatttccttctttgtcccttaccttgtggctatcatttgtttactcagtaacttgcacaactgcttgtgtaccaagcgctagcaggcactggcgaaatacacgaacagtccgacaagtccctgcccaagtgtagcttacagtctacgggaagctgcactggtaaataagttcattgagcgccgtgaaggagaagtgtgcttaaacaaataccacatattctcacttacaagtgggagctaaacattgggtgcacatggccataaagatgggaccaataaataagacactggggactacctaggatggggagaggtggggacaagggcttaaaaagaacctgtgctgagtgagtcatgggttcatttgtaccccagacctcagcatcacgcagtgtgtctttgtaacaaacctgcacacgtgcccccgattctaaaataaaaagttgagggaaaaaaacaaaacaaaacaacttattctttgacttgggtgtgagcagcagtagcgatagggtaagcctatattggcctagttttcagctttttaaaaatatatggctagaagaggttgaaacttgtgattaaaatgagtcttttgagtgtgtgaaaagtattttcatcactttaatttttttaagtgctctagaactagctaaaatgggcaaaacgtactagaataaacatagctgaatgagttgaatttacaaactagtggaagccttctattaaacagtaatttaccttgtaatcatattaatgtctaatctgtatctttatacagaaaaacgtttcattgtgttcagttttagttta

SEQ ID NO: 15195 - DNA, 1039 bp, Homo sapiens
tggcatgtgcctgtatcccagctacttgggagactgaggtgatcaaggaggattgcttgagcctgggaggtggaggttgcagtgagtgccactgcactccagcctgggtgacagatccagaccctgtctcaaataataataataataataataataaattttttaaaatttattttagaagaattatttatagtttctctgtgaccacttccctgatgatacatatgttgccatacttaacaaataccaccttcccttgttgctgtacctaacaagttatcaccatcctgaattgtatacttatcatttccaagaaaaatatttttattgtatgtgtaatttccaattaaaacatattgcatattgtttgaaaattaaataatttatttaaattgcttcactctttcttgatacttatacctatattaaaagacattatacctataataaaaattacatcacctgaaaaaaaagtatgtgtatattaccacagttacaaagaatagaaaaaggggcctctgacagtgtctgccacttagcgctgtagatgagttagtttgtctaaatatgaagtcgtttttacttttcttttgctggtctcatttccattttcattgttttttgtttgatctaaaattttactgatatcatttttgtaggctcttgggatgctcttctggcataaacataatatcgaaaagtcattggctgatttgcccaactttacccctttcccagatgagtggactgtggaagataaagtcttatttgagcaagcctttagttttcatgggaaaacttttcatagaatccaacaaatggtaagtagatgagaccactgagttctattttttttctcctatctaactctcttttgcagcatacttgagatagggatatcatactcaaacataaatattcccatttttgataaagttcccctttagattcagcttagtacatgctgctctgtggatgggagttttccagttacaggagtaaagcacttctagcacttcccatcctgtcgtctgtgact

SEQ ID NO: 15196 - DNA, 1034 bp, Homo sapiens
taccagcactaattgcccctgttagcactcagtttcggaagcattgaaaagctggagactgctggggaagaaccattagaatttgcaggaatgaaagcttgcttcttgtgtgtgtgttttccggcttcggtcccaggatgactggaagcagaaacagttgggaacgctggctctattccctcttcgcatttgatcaaagccagtgttggctgggctggcataacaaatctcatagtaaatttaggaccaagagtccctaccaacaggatgtcagttgttgtgcatatgtttttttcttcattctcttattcttggatcattggttgactgacttaagtgagtcaagtattttttttttaaccttgttattagcccagaaggttcttccgtaatgatccacttaccgtgtggattgcattatcaaagtaccgtctttcttttcacagtctagttatggctcctccaagcagcagatcatagtttttccttggtgattgatcttccatgtctctatttacccagccttctctgcaaaacaaaatgaagaatggtattatctaactcgtgtttagtttcatagtccttatatccctttacaaactttttcactccgctagtcatttaaaatgtaccccctcatacctttcttttcttttttttttgagacagagtctccctctgtcacccaggctggagtgcagtggctcaatctcggctcactgcaacctccatctcccaggttcaagtgcttctcctgcctcagccctcagcctccctagtagctgggattatgggtgtgcaccaccatgcttggctaatttttgtatttttagtagagatggggtttcggcatgttgaccaggctggtttcaaaactgctgatctcaagtgatccgctcgcctctgcctcccaaagtgctgggattacaggcatgagccaccgtgcccggcctatttcttgagtttctttctttttctgcttcttgtagtgccacccctgccctgccacctagttttatgttctccatatgtta

SEQ ID NO: 15197 - DNA, 1055 bp, Homo sapiens
aattctttgctcgttcctccatgttggcgccacttcccagagagctccactgcatctcacactctgcccacgtgctggggaagtctcacggcctgcacatctcttgtgactctgggaaccgcctctcccgccggagcccccgagccccaccaatggcagctcttcccagtcagcagcttcagagcaggcagtctccttggaaggcccgactctgttcctgcatggcctgcagtttctactttgtgcatagagtcattttcagagtcaccgcgaccctgttggccttctagaaagtttcttttgttcttttctgagacaaccacctaagtgataatacgcttttttggaaactaatatatattgccagactgcatcataacctttatcatgccaagcatcctgatgcaactcacatttccctaaacatggggtacagttatgatttataaattgagttggcttaaatctccctcttctcccttcccaagtgttacaaagatcatttactgcaactgtcgttggacactgtagcttaaagggaacgtggacctcaatgctttctgccttcaacttttcagcattgtgaccccagggtggttgccaccccatcttttcctgaccccccccacccccccacctccaagaggttcggcccacatcactgtacctggtgcttgtaaatttggaattggtgccttctccttttggcaaccatggttatcaatcctttttctgttttagtgtcttatttcttctttcaagttatttgctagccaaagatgacatcactgagattaggagacaggggagagcttgctgcagattctgacagtgcagattttaaatgtcaggatattagaatagctggcgctggtttatgaaagctgcgcgttgttccgcgttctctcggtgtgcctggccttttatgtggcactctgtatgtcagtttgtgtccttcatgtgctgatgtgattacacaaacaccatgcactctcttttcatatcagagtacaggacagagaagtgatcaatgtattggtctagtgagactgaga

SEQ ID NO: 15198 - DNA, 1033 bp, Homo sapiens
tgtctggctaatttttgtgtttttagtagaggtggggcttcactatattgggcaggctggtctcgaactcctggccttgtgatctgcccaccttggcctcccaaagtgctgggattacaggcatgagccaccactcccgtcctagaatggctttttatagactaagtctccactgaaatatttttatcttgtcatatatcttgcccattgttttctctattttctttaatatacagagctggaagaaaaactggcagaaactctgacatgagagaattgcagaagggatgagacccaaaatcggcatataagctttgctaaatctctggctgaccgcaaaactatacatgagctggcagtgagcagagatcgcgccactgcactccagcctgggcgacagagcgagactccgtctcaaaaagaaaaaaaaagaaagaaagaaagaaagaaatgccaaagcaaatttggggtaagtggaaatgaccctagatggcatctcagttctacagatagaaatgaatagcaacagaagggtacatatgtgggtagacatattaataaaaaaccagatggggggctggtggcaacccagcactttgtgaggccaaggcaggagaatttcttgagcctgggagtttgaagctgcagtgagctatgatcgcaccactgccctccagcctgggtgacagagcaagactccgtctcaaaaaaaaaaaaaaaaaaaagttactatttatttatttgttatcattatttttttttctttttttttttttttttatttgacacggagtctcgctctgctctgttgcccagactggagtgcagtggcgtgatctccgctcactgcaagctccgcctcctgggttcacgccattctcctgcctcagcctcctgagtagctgggactacaggcgcccaccactgcacccggctaattttttatatttttagtagagacggggtttcaccatgttagccaggatggtctcgatctcctgacctcgtgatccactgggaggacctcgtgatc

SEQ ID NO: 15199 - DNA, 1051 bp, Homo sapiens
cacctggaacctcccactcaacaaatgcagctcgggccctaccggcccccatggccctgaggagggaattaaaatggggcactcccgtcctcaggatgctttgctccatgtgccagaaggcagccgtgacatactgattagttacaacacaggtcttttactatacacaggctaagatgtctgccctgtgcagtgtcccacctgtgtaaccttacaaggctgccccttgtgcagtgcaccacctgtgtaaccttacaaggctgccctttgcagtcctcctcctgctcttccttgtaagtgttgaagcagttgctcattaacggtgcaattcggatcgtatcagtgcatgtttgtcacttgagatgtgcaaagatccctacgctgtgctcacccagtgccctgcctggcaccaagtaggacaccaataactgtagaatgagcaacattgaaatgtaaatgagacttttttttttttgagacaaggtcttgctatgtcacccaggctggagtgcagtggcgtgatcactgcaaccttgacgtcctgttctcaagagatcctcctgcctcagcctcccgagtagctgaaactaggcacacgccaccacacctggctaattttcatattatttgtagagacggggttttgccatgttacccaggctggtcttgaactcctggactcaagtgttcactcgcttcagcctccagaagtgctgggattatgggtgtgagccactgtacccagcactcgaataagactcttgttaagagatgtttggaaccaaccccaccagggtgaatggaagacataatatctatctatgcctcagaatgtgcaggaaagagaacactgaattgattccgccagcccagactttcttctcttctctctgttgtccatcacaacaacctcaccccacaagacatctccactctcaccgcaagacagcaatggccacaaagggacccacttggaggaccttggcaggatactccccagacatgctggctgagtcctgctccaaactccggcttttggaggtgatgagct

SEQ ID NO: 15200 - DNA, 1045 bp, Homo sapiens
gtggggacttcggtctagtatttggacccgaggagataattctgtgtggaaaattctctcccttcggttggaaacagtaacaaactggaaacggatgaggtgttatggacgtgcttggaaatgcaagaaaccttcagattacgagctgttgacgggaccagttgtatttcacgtttttcgaattaagctcagaatcagttttcagaatgacatgtgatgcgtggtgcgtggtgtgtgtgcctgtgtgtgtgtatggatataattcattcatttttgtggcgtcagaaaggttatgtcgagcgttgtagcggcttcttaatttacattcacggcatacaactgaagaggagccattatttattttttttcctagcatttgctgcgactacacactgccggagcgtttggaaatgttgtttgctgttaccctgtatttgtctataaaattcttactgtagggaatggccaagtggaccatcagttcgtcctgagatcttctcatgtctctcacgtctttgaaaatggcctgtgaacagactgcatcatatgtaggatgtctggcaaaatagtgtacagcgttcttttctcaaatgagaggaaatgtgtaccttttcgccgcgttgtgacaatgtaaatgttaagaattagtctaaagatgaaaattctttggccaaaacaagataagccttatcgatatgaaaactggaaaacatcacatgggactggaaatcctgtgagtgggtgctcatgacggaaaccctgacagaccttggattccagcatcgctggtgaaaatcagaccttatcatggataagggttaagatgtaaggtgtctcacccagacgccatctgttccagctgtcaatgcagaagccaggaaaggagagagagctggccagggagaattccagctttttttttttttttttttttttttttttgagacattcatgtgaatttctctgcgaggggaaagaagaccaattattttccttggatgctgtcccttcttttggaattaataagatggcttcactcagtgag

SEQ ID NO: 15201 - DNA, 1050 bp, Homo sapiens
atatccctactcttgtttgtgccttgaagaaagtccttcatttaactgagacatctgagcctgcgttgcggattctgattctctaaatactcctgcaagaatccctttaatttttcactgtgcaactcaagaaggacctttctagggtattgtcaggatacgtatgctaatgatattgtcaggttaggtgagaatgattgatcactcccttaaaatccttttttatgatgttaaagctgtactttaagaaagataaaactgccactgtggcgttgcaagtctgagctagctcaagcaaacaaaggaaattgcgttaaatttgcccaactctattttctcatcttcatatagcaagactctccaaacagcaagtgatctaacctatcaagtattatgcaatagctgaatttccttgcaatggtcagtttaaagaactgttaacttagcagaggcgacgtctcgtggccaaggcccttagggtccactccatggaatcaggaccccttgctgctgctttgcgagtgttcatggaggaagaaaaatcacttggtgttctttttttgcatggaagagtcataataactgacttcagatacagagaaagtgggaagagtgagaaagaaggaggtgaggccagaggatttggaaggctaccagagagaagcagccgaggcctgattgtggaaatgatgcttagacttgctttcagcaggagtgatgaagccagaatgagggaggcccagacgcccgggagaggtacaggggataggtgccatgtggtttgcaccaccgcagcaggctttgggtcccaaagacgcgaatggaaatagaagaaaatgcagttttaaatagaaaagaaaaaaaaaaccgagaaaatgttatgtgtgcttgtgtaaaatttattattcataattaaaatacaaaatggctttctcatttgagaaagcctttattgactaagttctgcacaacactattccaggaaagggggtggggagacagaccaccctagggagaaggcagagttttttactattaagcataatacct

SEQ ID NO: 15202 - DNA, 1037 bp, Homo sapiens
gaagggctgtgaataacggaatgcagccagacactgaggccactaggtcaggtccttgggatgacagagggtagatttctttgttcttagacctaagttggcccttgttgggtggaggtggtggcgtgagagccttccctgccttctccaggttgaaggatatttctgtgcatctgggataggtctctagggttgagacgacaagcttctcaagggttggctcacttcattctttctatttctgcagtctggtctatgatgtacacagtaaaaaggagatcagtttatgtatggaaggaattagacctgctttgaattctggtctgtccttcagctaactatgctgttaaattactcttcctttctaagcctcagttttctcatctatgcaaaggtaactgtagagttcacagtcacgtggaaaagcctctgaaacctaaattctccctctggagatggatggtggtgatggtcgcacaacattatgaatgtatttaataccactggactatacacttaaaatgattacaatgataaattttatgtgtaatttaccataataaaaaagtaattgtgagacttaaaagtgagcctgggctgggtgcggaggttcatgcttgtaatcccagcacattgggaagccgaggtgggtggatcacctgaggtcatgagttcgagaccagcctgaacagcatagtgaaaacccatctcacctaaaaatacaaaattagccgggcgtggtggcacatgcctgtaattccagctacttgggatgttgaagcaggataattgcttgaacccgggaggcagaggttgcagtgagccaagatcgtgccattgcactccaccctgggcaacaagagtaaaactgtctaaaaaaaaaacgagcctgtgccaggtgcagtggctcatacctatagtcccagcactttgagaggatgaggcggggggatcgcttgaatccaggagttctcaaccaacctgggcaacatagtgttataagaccttgtctctacaaaaaatttaaaaattagctg

SEQ ID NO: 15203 - DNA, 1043 bp, Homo sapiens
ccccaggctggagtgtagtggcacagtctcggctcactgcaacctccgcctcccgggttcatgccattctcctgcctcagcctcccgagtagctgggactacaggcacctgccaccatgcctggctaattttttgtattttttgtagagacggggtttaactgtgttagccaggatggtttcaatctcctgatctcgtgatccacccacctcggcctcccaaagtgctgggattacaggtatgagccaccgcgcccagctgaacttgggatgtcttttcattcaattatgtctcctttaatttctttaagcaatattttgtagtgttagtgtacaaatcattcatctctttggataaatttatttctgggtgctttatttttgtgggttctattgtaaatgaaattattttcttacctttctttttgtattgctcattgctggtatatagaaacaactgatttttgtatgttggtcttatgccctacaaccttgttgaatttattacctctagtagttattttgtgggttctgtgggatttctttatacagaatcatgtcacctgcatatataatttacctcttctttctaatttgaatgccttttatttctttttcttgcctaattgctctggctaagacatttagtaaaattttgaataggagtgatgaaagtgagcatcctcatattgttcctgatcttaggggaagcttttcaccattgattatgaagttagctgtgttttctttctttcctttttttttttgtttttgacacagggtcttgctctgtcacccatgctggagtgcagtagtgcaatcatggctgacttcaacctctgcctcccaggctcaagcgatcctctcacctcagcctcctgagtaggtgggaccaaaggcacatgccacaatgccctgctgtttttttttattttttatttttggtagagatgggtttcgccatgttgcccaggctagtcccaaactcctgagcagtcagcccaccttggcctcccaaagtgctgggattacaggtgcgagcca

SEQ ID NO: 15204 - DNA, 1050 bp, Homo sapiens
atgtatcccaaatgaggattatttttaagctttataataaaatctttcacagcatagactttttttttttttttttttttgagacggagtcttgctctgttgcccaggctggagttcaggggcgcaatctcggctcactgcaagcgccgcctcccaggttcatgctattctcctgtctgtctcctgagtagctgggaccacaggcgctcgccaccacacccggctaattttttgtatttttagtagagatggggtttcaccatgttagccaggatggtctcaatctcctgacctcgtgatctgcccgcctcggcctcctaaagtgctgggattacaggcatgagccaccgcgcttggcccacagcatagacttttaaagaccatgtaggcaagaacagatctttaaagggaaacctcagtttggcttttgaaagttcatctgattgaagttaaactgatgaaacatactccatccatgcattaccaaaaacgttggagcacggcatggcagtagtatctaaaacagattggcaaactatgggtctaagaatagtttttatgtgtttaaaggattgtaaaaataagcaaagaagaatatgtgacccatgaaacataaaatagttactgtctggctctttatgggaaaaaagtttgccaactcttggcttaaagggtcaagaatgctttaccaaaaaacaaacaaccccctcccccctacaactgtaatgtttgagcaggagttttacaagataaagaattttgatcttgaggggatttgggtgaggatggggcggtgcagtgggagagagagtatagatactgttcatcacacccagtgcagtcggctctggtgggaacatagggtgacctcagtgtgtggtgaggacagtgatcatggccccttttacaagttgaagcttagttctggagtggtggaccatcagaagcttttaagtaggagaatgtcaatgtcataaattagagttaattgtgagaaattgaaataagtattccatttttttctgagatgtgctctcctgaacttataaa

SEQ ID NO: 15205 - DNA, 1034 bp, Homo sapiens
cggtgctgtgatgactgacactgtggatgggtagtcatgcactcctgtgcccgctgccaggaaagagctcataaggaggacctgggaagcatttgctgcacttctgaatctagcgcatgcagactcgaccctgtgggtcgagctttggtgagaagtggttggatttggaacgtatcttgaagacgaagctgactgtctttgctgatggattggatgtatggcatgtgaggaagggggtcctttatgatctaaggaattggatggtgccatttcctgagccaggcattgccagaggcagatcagagaggaacgggtaccaagggctcagtgttggacctgttaggtttgagatgcctttttgatgctcaagtggagatgttgagttggttattggatatacaggtctgggggaattacagggaaaggggtgctggagatatatttgagaattatgaaaagctgtttgagcatcaagcaggatgggtgagacttgaccactggattttgcaacttgaaggtctttggggacttggacaagactggtgtcaggaggcatgacaagtggaagttttcaggggagaatgggatgtgtgtgttaacagcttcttgaaagagttttctctaaagtagaatgatgggggagtgggggtgctggggacacattagcacttaccgtgctctggaaggcagggtgttcaggagggaggttgacagaggagggcctgggatccagtgccagagtagagggtggaccttgcccatgggatctggagggagggcagagtagacaggcaggccttcctttcagcagtgggaggaggagaaaataccagcttgcccctttccaaaagctgagagtaagggtgacaagggggaaagaggtattataggtatgctatggagttaaaggtaaagtttgcatgaatttcgaatacaaaatgtaatacttcatatccattgagttgcttcaaagtgcttatcctcagggttctctctcctgtgcctttgggggtactttggtgaaaaagtttgag

SEQ ID NO: 15206 - DNA, 1025 bp, Homo sapiens
gcatgttccattaaaaaaatgtggaaaatccccaaagcacatgcatatacagtagttaatcatgttttatcttaaatttattcatattatagaaatttaccttttgaaatttcatttttatttatttgagatggagtctcgctctgtcgcccagactggagtgcagtggtgtgcatgatctcagctcactgcagcctccgcctcctgggttcaaactattctcctgccttagcctcccaagtagctgggattacaggtgtgtgccaccacgcccagctaattcttgtatttttggtagagatggcgttttaccatattggcccggctggtctcgaactcctgacctcaggcaatccaccctcctcgacctcccaaagtgctgggattacaacatgagccactgcgcctggccttgaaatttcatttttaaaagctctaaaaattttccaggtgagaattgaccaactattattattttctgggtaagggactccactacagtaattaaagaaggataaggttggcgttgctttgctcctttttttattgaagtccttccttcctgatcaagcttccatatatctccttaaaacatatgacacacaggtatgccactaaaaaacttaatttgtgtagatttctttcttcagctgttactttttcatcttgcataaaaatcaagtaattaaattttaaaacatcctgaacatattcatttttggctttagcaatttcattcttcagcagatgtatttgactttctatatacatggcactttggtttggtttgtgtctgaccttatttttatttttcattttttttcaaaccagtattaaactgaaaataatagacgtcatacctcatggcccaggaatgagtgaataagttggaaaaccaagagtagtggcctgcatctctttgtccaaggcctactttccaaaatctctcggccctacccttccctagaaggttccccactgcaaggaaggcacaggcagcctgggggtgtgacctgcctcatgga

SEQ ID NO: 15207 - DNA, 1050 bp, Homo sapiens
agtttggggcctttgaacttggtctttgcttttggagctgtacttgtaggtgttgttgttccagcctgggaacgagacatgaccgactccagtgcggcctgcttgctgtcctcaccatcagtcagtgtggtccgtgtgtgaggctgcagttgtcctcttggccacttatttctccttaattctctgcatgtaatttaaaacattatcccctgaaacttagtttttcattgacttctaatatctttacttctccttttaattttcctattgagatacttaggatgacatgaaattctttggatctacatatggacaaacagaattgtgtcacataaggttcagtgtgctagctgtttaaaaaaaattaaaaacagtttgttttttttagagacagaatcttgccctgtcacccaggctggagtgcagtggcgtgatcgtagttcactgtaaccttgagctcctgggcttaagcagttctcccgcctcagcctcttgagtagctaggactcacaggcatgtgtcaccatgccaggctaatttttattttatttttatattttatttttattattatttttttgagacagagtctcactctgtcgcccaggctggagtgcagcggcacaatctcggcttactgcaacctccacctcctgggttcaaacgattctcatattctcctgcctcagcctcctgagtagctgggactgcaggctcacaccaccacgtccggctaatttttgtatttttagtagagacagggttttgccatgttggccaggctggtcttgaactcctgacctcagacgatcctcctgccttgcctcctaaagtgctgggattacaggtgtgagccattgcacctggcctttatttttttttagaggctgactgagttttgctgtgttgccaaggctgatctcaaactcctggtacttcaagcagtcctcttgccttgacctcccaaagtgctgggattacaggtgtgagctaccacgtcctgcctgctagccatttttttatgttcgtggtggtggtaaggagtggcta

SEQ ID NO: 15208 - DNA, 1369 bp, Homo sapiens
tggagaagggctggctgcttttacaacgcaggagcaaggctctccaagtaaacaggtactcacactgaagagctgctctgcagacagctagctttggtttctgaaataaaatttcacttttacattaagtggaaggggctttccaagtgggactgaactaaactgttctacttggtaacttccttttgaaaaatcagcattttaaaaaatgtagcccttttctcccatggcttcctatgtaaagtgaatcaccagggcgtcctgaagctctgctggttgctgtgagccactgtgcagacctgaccataaagtgaatgctcccagaatctcctgagtcctctcaagaaagggacttccactctaatgcagtcacttgtgtttccctgcagctcttcaagtccaaaatgtacagcgtgtcaagagagcatcgttaaagataaggtattctggggttttttttaatcattttgtcacatgttttcagctgggtaatacttttcacatagtttgcattcggcactctggcacaacacattctctcagttttggcagctgatgcggcaggctcccaggcaggacactgtgccatgtgatcacctgggcagacagtggattcagatccacttggccacttccctactgtgtgaactctgtgagctacttcaccccctcacctgtaataatcatatcacctgctaagaccgcagggagctggtgtgaggagtaaggggttgatgtgagcaaagtgctgagatgcctgtctgtggcagggctgtctgtggttgggtcacttccgtcattgcaggtctttatcccagacagcttctactcaactcttacactaggttttaccttcagactcgctaggctgaggggttcatttgagtttgtgctccctgccccccaggccccctgtgatatctttaagtcattagacatgagtgagattagccccttctcgccccctgtggctgtcctcagctagagcccgtgggcgtctctgcacattcagaggatggggctgcccagcctgccaccagcttctctcctggggcctggtccttctcatggagactgacagtcatccatgtgctgctgtaccctgccaggtatacttggagtttgaaacaattcttttcttttctttctctctcctttctttcttctttttcttttttttttgcgacagagttcactcttgttgcacaggctggagcacaatggcacgatcttggctcgctgcagcctccacctcccaggttcaagcaattctcatgccgcagcctcccgagtagctgggattacaggcacgagccaccacgcccagctaatttttgtatttttagtagagacggggtttcaccgtgtt

SEQ ID NO: 15209 - DNA, 2111 bp, Homo sapiens
cattccacaggccttccgctcaattcatagataatccgttccacaggccttccgctcagctcatagataatccattccacaggacttctgcttagctcatagataatccattccacaggccttccgctcaactcatagataatccgttccacaggccttccgctcagctcatagataatccattccacaggacttctgctcagctcatagataatccattccacaggccttccgctcagctcataatctgttccacaggccttccgctcagctcatagataatccgttccacaggccttccgctcagctcatagataatctgttccacaggccttctgctcagctcataggtaatcccttccacaggccctccctcaactcatagataatccattccacaggccttccgctcagctcatagataatccattccacaggccttccgctcagctcataggtaatcccttccgcaggccctccctcaactcatagataatccgttccacaggccttccgctgagttcataaataatccattccacaggccttctgctcaattaatatatacttcttccactgtacagcttcttaaagactattctaataggactaaagagaaaagataggaataaatagcactttttatctgactttatttcagaattaagctttgttttgcctattttgatttatgtagttaacattttccattgccttgattgactatcatttagtatgtcaaaaaatgaatagttattcaaaaaaggtaaaatttttatcttgtcctagggaattgcctcaaaatgttgatagattgcctggtcttattacagctctgtgacataaccatcacttacaacaggctaatttgtcctacagcattgaaatgcagctgtttatcttggagagagacagcttctcatacttcggttactttggcacagttttgcattgtgtgtttctgtgggggtgagtgtgtgaatgtgggtgagtgtgtgggggtaagtgtgtgtgggggtgagtgtgaatgtgggtgagtgtgtgggggtgtgtgaatgtgggtgtgtgtgtatgggtgagtgggtgaattaaagaggaaagcagagatgttgggggtggaggacacacttagaaaacaatgcatttgttgaacaaacacctattgggtacctactgtgcgccgggcagtattccaggagctggggactcagtggtgaggctcctctagtgggaaaaaatactaacaaatgtgtaacatcgggtagtgatcagttccatgaataaaaatcaggtggcatcaagggaagagaggtgatcagcactggcttgtctgaggcagccaagggacagtgggggagcatgtggaccctaagctggaactggcagggctgtggggttcaggagctgtgtggaacacaggtcagatgtgagggcagtggggcagccagagggtgaggggaaaggcactgggcagcccagaactgggagggtgagaggggccccggggcaaggcctggtgttgctggggtgggggaaggttgtactggggtgtgcctgagggtggagcggtaggattggccagcaggtggggtatgaggtaaaggtgactcccagtgcttgtggagaacctaggtgtcctgccgagggggtgcccagtgagtggagggtgatgggcttgggggagaatggggagtggagccatgcaggctgcagatgggggtgagtttggtggctcgcaggatcatggggctggagcgagtggagaggaggacagagctcgtgggggcctgggcacaccctcagaggctgcctagaggctggggtgggcttggccatgaagtgactgaagggaggcaccagggcagctcagccagggcgtgggccatcatccagttcctggtagatattgtggaatggtttgttttgtttgagagagagtctcactctgtcatccaggcctggaatgcggtgacacaatctcagctcactgcagcctctttctcccaggttcaagtgatcctcccacctcaggaaccataggtgcatgctaccatgcctggctaatttttgtattttttgtagagacagggtcttgccatgttgcccagtct

SEQ ID NO: 15210 - DNA, 1071 bp, Homo sapiens
aagaatgagtttaaaatttaatttcttgatattacaagtgtcaacccttgataagaagccacttgagatgagctgaagggatgcggagataaccctgagatgctcactgtggcactgcagggtgctggctctgctgctcctggcggcctcctcacctgcacgcagtagccaggtggccctgagcacagccctccttaggcgcagagattccctgttcacttgacgcaaataggtctcccctctttgtgtttagtgctgcttttagggtcgtatgttagccgttctgccctttgaaatgcagcgaggttcgctgaatgcctcacatgtttgctctcgcaggggacaaaccagcagatcaaggcccacgaggccagctccgccgtgcagcacgtcaacctgctgaaggagtggagcaactcgctcgaaaagaaggtgggctgcacactttcctgctgctatgggatttgtatcatctcttcagattatttaaagacaaaacctttttgtagttattaatgggttttggataaaagaaactatcaagagaatgtcaaaaaaaactctgtgtgatcttgagcttataaatgaaggtgttttatttttgttatttgttttttaattgccaagcaagtgtgaagtgcttttttaaagtcaatcacattgtgattattttagcatccatccagcacagagatgatcagatgcccagtccccaccctgctgttttttttttgtaaacaaagttttattggaagacagccatccttactcactctgtgttgtctgtggcttcttttgctcgaaagcagcagagttaagagacatgtggactgtaccgcttgagatactgactacttggctctttacagaataagtttgccagcccggacctgggtggttacccctctaaatgcgttaaacttctgtgttttttacaagagacaaacaggaaaaaatatttgatatgattacaattgattttgtcatttgacaccttgtgaaacttggtgcgctctccacatagacagggccacttcccaaagagactctcccatgctgttcttttttttt

SEQ ID NO: 15211 - DNA, 1074 bp, Homo sapiens
cagcagcagcttcaagaagcccactggagagatgaatatcgcctctggctgcccagtctttgtggcccaaactgttctagaaaatgggacatatattaaagatgatacaatttttattaaagtcatagtggatacttcggatctgcccgatccctgataagtagctggggaggtggatttagcagaaggcaactcctctgggggatttgaaccggtctgtcttcactgaggtcctcgcgctcagaaaaggaccttgtgagacggaggaagcggcagaaggcggacgcgtgccggcgggaggagccacgcgtgagcacacctgacacgttttataatagactagccacacttcactctgaagaattatttatccttcaacaagataaatattgctgtcagagaaggttttcattttcatttttaaagatctagttaattaaggtggaaaacatatatgctaaacaaaagaaacatgatttttcttccttaaacttgaacaccaaaaaaacacacacacacacacacgtggggatagctggacatgtcagcatgttaagtaaaaggagaatttatgaaatagtaatgcaattctgatatcttctttctaaaattcaagagtgcaattttgtttcaaatacagtatattgtctatttttaaggcctcatctggtctctgttttaataatttgtttgtcagaagaccctgaagtatatacctaggtcttttttttgaaagtctctaaattcagaatcattttttaatttaaagttctacaaataattgttactgcaaacattttattttaaaacgttgatagactgatatttcttggaagaaaatataaaatatcaaacactggttatcacttgtgataggaaagagaatattcaacctgttgttatttctcgttagaaatgtaaaccttcaaatatctgtcgtagttaatgacacgacttcacaattctgaacggagcctcgctcatggatgctgtgcatcattttcagatttataattgttttcaccctaaaatagggcatccgttgaactttggagttctaaacaaaatcctgta

SEQ ID NO: 15212 - DNA, 1090 bp, Homo sapiens
gcgggtgaggaggccccggtggccaagcagagcctgcgtttcatttctcctgctgcactgtgtctagtctgtcttgtgaactctcaccgtgaaaagaggctagaagtccaggatcgctgtaccgctcctgtaattaggtgatgactggatttgacaacttagtcccctcagacaagtaagataccctccaacagcaaattcaatgacttaattggaaaacacacaagctggcatgatgtccggtgatttctgtaagaaatgcctgtaggagaaggtctgtgaagtgtggagggcagtgtcgacgctgcacagcatctgcagattcgcagcctcttctctgccggtgcctctgttcggttctgttacccaaaaacaaagaccaaagaaggccaatctctcatttgaccctgtctttttaatctgcctgttttaaaagttgcgtctgtagtagccgcttgctgtgaagacacatcttgacagtccaagtgattttgtgaccagtgatttgggtcctgttttccgctcttctaagaaaaaacaaaaagaccgtgagttattgcccagcaataatcatgttgttactgtgagttagcaacatgcctgacttcctgatagcattactgttttctagttttgtttattgtatattatgtgtggttttatttggtatttatttgtgttttgaggtcttgcaatgtttttgtgtttctgatgctaataactaaagtttgtaagactgtagaatgcaaaactcggagatgctaaactgtcttattagaggaaaataaatctgattatggagtctcagtctctgatcacaccgtctcttgcaggctgggccccaggtgagtggcttccctcctgccggactccccgggctgtcctctcagtggctgggcccagtatggccgcctggccaagacctgtgtggccagaggcccgtgcttggtttgctgccctctgtcaccgtcttgaaatactttgcaattctcagcgaggggcctgccgtcgccttttccactttgcttacagttttgcctgcggcctttaacctgaagggaatcccaggggccaggctcgcaaatctgtg

SEQ ID NO: 15213 - DNA, 1999 bp, Homo sapiens
ctgttccgtgaagaagaaatagctgcatctaggcagtttcctcctctgtgaccacaatttacattgatttgttttataaacagatttatcagcttatgttgaataaaatcattcctcttaacaggtggtgtattcgaaggctgccagtgtaccgaaagttgagactgtaaagtcagacaacaaggatgacgacatcgatattgatgccatttaaagggatggatgcaacctagcttaacagtataatgctgcaaattttcctccattatcagccagaagtgcaacatgtatgtgcaaaagctaaaatggcttaacatcatgctacactttacactaaaaatctattactgtgagtggtctgttattaagcccaatgagacatctagggagtccatacacatcagtgagcagatgtagtttgcttatttatagcatgtttctttttgaaaaactagtggtggacacatttggatcacatttatacagttataaaaataaaggtttgattttggtcgttcttcagatgtttggctctgaatgacttaagctgaagtaactggctccttactttaaatgttctgccatcatttcacctgatgagcattcttggagcctgccagatattgttaggtcctggggctgcaaagaggtcctcaacaggatgtaaagcaaacttaattgtaattaatttattcagcccattaagaaagtactaaagttttatctctgtagttcctcaaattggcatctggtaatgtacattgtgaggtagactgataatgaaatgacagtgtaacatcttaaccaagaagtaaatatgacctcagtgtcctataaataatgtaagagcaggatttgaaacttggagagctgttttctcatttcatgtacacttgccccaaattgtctttgaagtcgtgtgcattgcacgttggatgagccagggaaattattacattaacaagcattttgtgtgtacgtagtagttactttgtactgagagaacttgctttggggtgcaattaataaactgattttatttgggagaaacaaggaagggtgcacttaactagcaacctaagcatgatttttcagcttttgcccttagggtttaaattacaattccaaaatgttagacatactgtattttttcgttcagtgtggctttaattttcccctcttgcagtttgttctgtaatgccttttacatttggacacatagtttatgctttttagattttggttgctttcttgccaaaataagtgttaactgtgtttcaaacttgattttctttcctttttcttttttttttcttccagaatgtcttatttaaaaagaaagctaaaagcatacttctaagtcagagcctctattttggtgtaagacttgggatattttttacttcacattgaatatagccaggcacccaagaagtctgatggccacctgagtgcaggtgacaaggacctgacagagcccatgcagggctttagatttggacacacaagagttgataacttcctcatgaactccttgcctgatctaaactcatattatgggttctgactgtttgagtaatcatcttcaaggttaaacctcttggcagttacccttttcacaaagtgcacagtgggaatcgagaatcgatagggttaattttggagcagtggcttataccattcacctctgtttttttgtgattatttcacagataatgagaccttaataacaaataggcgtaaaaaaattttcacattgaaatgatagaaacatttgatgtaataaaacttggttggcttgatattttaaggaattgaaacctagcaatcttattggagagacaagaattggtctccagctgcctttgatcaagattcgggtgcaagtggagcaggagccatatacctggagggaatgtgctttgtcacaccaaagaggatttttttttcttcaaacttgtatgttgcctaggtttcaaattctttgccgcaaggctga

SEQ ID NO: 15214 - DNA, 1015 bp, Homo sapiens
tcttttatatgtgggcaaaattaagaactaatatgtaaaacaaaatggagcacattcccatttttcttattgctttgagttgatatggcccctatgtcagtagtgctttggctgaacgtcacaaagacctaacacagtgccctaaacaaatagggggtttgtttttctccaaaaagaaatttggggtagggtgcggtggctcacacctgtaatcccagcactttgggaggccaaggcgggtggatcacgaggtcaggagatcgagaccacggtgaaacctcgtctctactaaaaatacgaaaaaaattagccgggcacggtggcgggtacctgtagtcccagctactcgggaggctgaggccagagaatggcgtgaacccgggaggcggagcttgcagtgaatcgagatggcgccactgcactccagcctggggcaacagagtgagactccatctcaaaaaaaaaaaaagaaaaaaaaaaaaaagaaaggaatttggaggtatgcagcgtctagctttggatcagcagttcagtaatattggagttggtggtattttaaggtagttttgtcttttctgtcatgtttgagaccctgtagctacaggataatgttttacagttacagctacatggttgcattcaaggaaggaggaaggaactgtactggcaactctgtccttacccccccaccctccttttttttttttgagatgaagtttctgtcactcaggctggagtgcagtggcggaatctcagctcactgcaactgtcgcctcccttgttcaagcgattctcatgcctcagtcttctgagtagctgggattacaggcatgtgccaccatgcctggctaatttttgtacttttagtagagatggggtttcaccatgttggccaggcaggtctcaaactcctgacctcaggtgatctgctagccttggcctcccaaagtgctgggattacaggtgtgagccacagtgcccggcctccccttttatgataaacaaaggcattacc

SEQ ID NO: 15215 - DNA, 1033 bp, Homo sapiens
cacctcaatcttcctccctcccttccttccactggccttatcgtgattgtaaaatagggcaacactacattccataaaatagaataagtgtccctatgagctgagcagaagttggctttagagacaggcaaaggctgaagaaggctgaggcaggcccggcacagtggctcactcctgtaatcccagcacttggggagcctgaggcgagaggatcactcgagctcaggaattcgagatcagcctaggcagcacagagagacccgtctctaccaaaaaaaaaattaaataaattaaccaggtgtggtggtgtgtacctgtagttccagctacttaggaggctaagatgggaggatcacttgagcctagaagttggaggctgcagtgagctgtgatggtgcccctgcattccagcctgggcaacagagcaagaccctgtctcaaaaaaaagctgaagcaaagaacaaagagtgtattggtcctttcagaattccttttttttgtaaggcagggacagggaaacagaacaatagaccacaatagactataccacatagaaaagtaaccgattagttaatgtcaggttacttcacactacatttttttctgtaaggattaaagcagtaggaactttgttattgtgccaattgaagttttttcttttcttttcttttcttttcttttttttttgagacagagtcttgccctgtgacccaggctggagtgcagtggtgtgattttggctcactgcaacctctgcctcccgggttcaagagatacttctgcctcagccccctgagtagctgggactacaggtgtgtgccaccacgcctggctaatttttgtatttttagtagagacagggtttcaccatgttggtcagactggtctcccaactcctggcctcaggtgatctgcctgcctcagcctcccaaagtgctgggattactggcctgagccaccgtgctcagccaggacagtttaaatcttcaatcaggggctggacgcagtggcacacgccaataatggcagtact

SEQ ID NO: 15216 - DNA, 1079 bp, Homo sapiens
cagtgaataagggactgaactagccttagaacctaaatttataacatcaaatagctttctttgcataagttcccttggagccagtcactcatagtactttccatatgggaaggataacaaaggaacatatggaaattcagcttgcatgtggtagatacctagtaaaatctgataagttaattttgttagtaccaaattcattttaacactaaattaatttttcctgatgttgctctgattctaggaatcttgaccaccagaaccttgagtttgggagatgggaagattcttagtttgtctttgaaatatttgatcataaaaaacacattattggccaggcatggtggctcaagcctgtaatcccagcactttgggtgaccaaggcaggcagattgctgagctcaggagttcaagaccagcctgggcaacatggcaaaaccctgtctctacatacagaaattagccagatgtggtggtgcgcacctgtagtcctagctacttagggggctgaggctggaggattgcttgagcccgggaggtcgaggctgcagtgaaccatgttcatgccactgcattccagcttgggtgacagagcaagactccttctctaattaaaaaaaaaaaaaagcacacacattgttgctactcttattttacatttttagaaaactgatttgttgtattactcagctaaagctaagcaattttttaaaatttagtttttaatttttattaaatactgactgcatacaaaagaatgttccatgtttagcatataaatatgtatatgagatgagcacccttatactacctgcttcaagaaatagatcttcaaccatacctttaaaccagtcccatattgtgcccctcctcaacctgattccccttcttcattgcccacctactgggtaaacactaacaaggattttgtgttattattttcttgctttgtccgtgtaattttaccacatatggatcactcatcaatgtagtgtaaaggttttttttggtctgttttttgtttcttttgtgtttgtttgtttgtttgtgactgagtctcgcactgtctcccaggctgg

SEQ ID NO: 15217 - DNA, 1030 bp, Homo sapiens
attggcttttgctttgcttccttttttttgtttttttgagacggagtttcgctcttgttacccaggctggagtacagtggcgtgatctcagcactgcagcctctgcctcctggattcaagtgattctcctgcctcagcttccaaagtatctgggattacaggtgtgcaccaccacacccagctaatctttgtgtttttagtagagacgggttttcaccacgttggccaggctggtctcgaactcctgacttcaagtgatccacccacctcagcttcccagagtgctgggattacaggtgtgaaccaccatgcccagccgcttttgctttcttttacctacattgtgttccatgttgatgtattttgctgtaattcaccttcactgctatgtccattttcaagaatatgtagtatcccattatgtgaatatgccactctgtatttattctgtgattcagagacatttggattgctttttgtattgcaaacatgactgctgtgaattgtcctctgtgtgtcctggcacacttgtgaagagtttcttaaatatatatacttagaattcttgtatcacagagtctgtctgcacatcctccttcttcattagagaaggccaaattattttcagagcaggtatgctaatttatatttccatcagtagtgtgtaagagagcacaagtaatgtagcatcctcatcaaaatttgattttctctgattttttaaaatttgtgccatcacaggagaattgcttgaacccgggaggtggaggttgcagtgagctgagattgcgccactgcactccagcctggcgacagagcaagactgcatctcaaaaaaacaaaaaaattgtgctatcaatttggtaaatataaaagtgatatttggccaggcatagtggcttcctccttaaattccagcactttgggagcctgagatgggaagatctctccaagccaggagttcaagaaccagcctgggcaacagagcaagactctgtatctacaaaaagattttttttttttttaatta

SEQ ID NO: 15218 - DNA, 1046 bp, Homo sapiens
ctacgcccggctaattttttgtatttttagtagagacggggtttcaccgtgttagccaggatggtctcgatctcctgacctcgtgatccgcccgcctcggcctcccaaagtgctgggattacaggcgtgagccaccgcgcccggccaggatttgtctttttgtgtctggctgattgatgcagcatagtgtcctcaaggttcatccatgctgtagcatgtgtcagaatttcattcctttttaaggccgaataatactccattgtgtgtgtgggacacacacctcacattttgtttatcttgagtatgtggctatttaaacatatgaatgcttagtctgtttgaaacaaatgtgtgctttggtttagatgcttttctttaccagattttaatgtcgctggtgtctgtcttccccaaggccagaaatgatggttacagtacacatcactagagtttccttaaaataaagattaatgactagtaactatttgcctatggttttgtaaaaatgtagacattttctgaaatgcgtgtttatagctgctgtcttttataatgatttgtattttatggttgagattgggctgggtttgtagtttgcgaccacacgtgagtttcattgtctgtgaagggcagaagctttcttgttcatctttttgtgtcccctgcctctagcacactgcctggcacacagcagatactcaacagataagaattagactgcatttaggaattataaactactgggtacacattctgttaaactctatcgtaattttatcattagcactttgatccatgttacaaaacctgaagatagaaagttggattatagtctcatttgagtgagtttaccattgaaaataaaaagattgtaaacctgttgtggaaaacaatgagttgtagtaagcatacctttgacaccacttttttatactcctaattcattattagttgtgtattttatactttatatatgtctagtttgggaatttcattgggattttcaaaacttcaggggtagtagaaagaggggaaggttaatttca

SEQ ID NO: 15219 - DNA, 1049 bp, Homo sapiens
tgagcttcacggtgagcataggaaccccctctgagggctcagtgcacttggcaacattgtaagagcctttaatcatttaatcgaaggtggtggttctgtattaccttgggtttttttttttttctttttggagacagggtctcactctgttgcccaggctcaagtgcagtggcgccatctcagctcactgcaacctctgcttcctgggttcaagcaattctcctgcctcagcttcctgagtagctgggactgcaggcgcacaccacacctggctaatttttctaatttttatagagacaaggttttgccacattggccaggctggtcttgaactcctgacctcaagtgatccacctgccttggcctcccaaattgctgggattataggtgtgagccacagcacctggcctctttaacagtgttttgttgagtttattaaaacaatttccgggacatatgttttattgttgatgtgtttgccattgtgaaaagttttattaaattggccacccattccaccattgcatctcccccacccgccagcctgctgccttttgatttggtaaactcatagaattttagaattgaaaataatcttagaaattttagggcagcggtctaatttttacagatgaaactgaagctcagaaagtttgttctatgccaaggggtccatagctagttagtttcaggacctgaactagaactaagggctttctgaactggcctgtcagtgtccttccatccagccacctgttcctgcccaggcaggagagccactctttgcttcttgtttcttttatctctaataaatagccttagtatttttcagttcagctgcttaacctgaatgttaatacatttttaataaggaaaaaagatctggattgaattcctggtttaaaagttgaactcctgaattataatttagtaattatgagtgtgacatatggttccacaaatctcttaagaggtttgtattgaattcaaatttagaaaaaaaaatctgtcaattatattgacagacttggattttatctgtgttactc

SEQ ID NO: 15220 - DNA, 1050 bp, Homo sapiens
caacgtggtgaaaccccatctctactaaaaatacgaaattggccgggcatggtggtgcacacttgtaatcccagctactcgggagactgaggcaggagaactgcttgaacctgggacggggaggttgcagtgagccaagatcatgccattgcactctagcctgggtgacagaacgagactctgttaaaaaaaaaaaaaaaaaaaagttgcaccagagccatcggagcctaggggcagccagggtcctccagatctaggcaatttgttgggtcctggcactacactgtaagtggaatgtcaacggatagggtccaaaaagagacttcagttaaaacagtagaaaacggaagaacgtcctcacctatttgtttttgccctcacccatgaatttctccagactggaaagttcaaggcataggaaaattgtttttagaaatccacacggacattcgagcgtatactgagtattcattatgtgtgaacattaacaaagttattttcatcttaattacgaatctgcaccagtgatgactgactctgcgtctctcctattcagattgtgtctgcagttcaatactgccatcagaaacggatcgtacatcgagacctcaaggtgagtagaagtgcctcactcagtgtatgctctgtctgtttgtgtgcagttctctcagtggtcattacacaaatgaggtatagattagccttattagcattttttaaaatcccacaataattgaatcctcttaatcaagttatgggaaagagcattaaaaataaagaaaaataaaggttattgaaagtattttacatttcagttacggtgactggtggttgatctctggagaacagtcatcacacagccaaacaaatgtgggcctccagaaatgtatggtcacgcccacagcatcctcagtgccacccggcattcatttctgctgctttcatcagtattctctcccgttaacagcagtgcctgtttgagacctctttcaaggtcctcagcctctgccctcactctggcataggatgaggtttcgtatcgcacagaga

SEQ ID NO: 15221 - DNA, 1448 bp, Homo sapiens
aaatgcctaatcctgtcataattctaattctattttggctaaatttcatttttgtcttgatgttttccctctaggctgaaaatctattgttagatgccgatatgaacattaaaatagcagatttcggttttagcaatgaatttactgttggcggtaaactcgacacgttttgtggcagtcctccatacgcagcacctgagctcttccagggcaagaaatatgacgggccagaagtggatgtgtggagtctgggggtcattttatacacactagtcagtggctcacttccctttgatgggcaaaacctaaaggtataagaagctgcacccatgtacttcactaaactaaaagaagtttcctaatattacatggcttaatatttttaacattatatcagtgcggggggtttcagggggttttttgttgtgttttgttaactaaacctaaaggttgacttactcgttttctttcctctgtacctctccaaaggaactgagagagagagtattaagagggaaatacagaattcccttctacatgtctacagactgtgaaaaccttctcaaacgtttcctggtgctaaatccaattaaacgcggcactctagaggtaatcatgtaggtggaaacaagcagtaactttggagagtctttagagtgaccttagatctttgcttgatttgtatgccatactggatatatcctgcggctttttaagcaagaattgaaacattaaaaaatattttttgagtttatgctttgaacgatagtcaatgaaatgttgaaaataaatttttgtaaatattacggttatcagaatatttcattttactctgctaatgaacagtttaccttttttagcaaatcatgaaggacaggtggatcaatgcagggcatgaagaagatgaactcaaaccatttgttgaaccagagctagacatctcagaccaaaaaagaataggtaatcactccatgcctgcatgttcatgtgtttttgtctaagtaacatatttctgttttgactcatgtctgtgcctaaaatgtgaataatggaaagttaagcacaagtcatatgaacagtttatctgttctgtcatatttaggaacgtaactacctgcagtttcctataatggcacccagtaactctgaaacaagtgcccatttatgttacaaaatatatgtaatatgtcatcttttaggtcaaatgaaaattattttaccctacaaaagaatgatttctggccgggcgtggtggctcacgcctgtaatcccagcactttgggaggccaaggcgggcagatcacctgaggtcgggaggtcgaggccagcctgaccaacatggagaaaccccatctctactaaaactacaaaattagccaggcacggtggctcatgcctgtaatcccagctactcgggaggctgaggcaggagaattgcttgaatctgg

SEQ ID NO: 15222 - DNA, 1028 bp, Homo sapiens
attggttcttactaggccaatctttgttttatcagctttcctgtgggaacaataaagttaatgacacagggagcataggttagggccagttgttactttggcacaaacacctgtgattcgttttctgagactagttttaaactggtcgtgctgaaggccagcccactttctgctgtaattattctgccttctgatgttattctcgaaaaatggccagattccaggcgtgactaatggttggtgtaaactaggcatgagaaggtttgattacaccttcaattgtatgattctatcatgatggtataggtttgcagtgagtcttaaaccacatagcactgacacgtagtgagtgctcaaacaaatgttagctttcattattaattatagactgttcagacaaggttatgcagaattttcttagtttgcactgactaaacctaatctttcaagttaataatgttgctaaaccacctacatagcagagacactctgctcctacgatttcatatgctttagatacccggacgacactgtttagactacttcatttaaagaccccagagaagtgacgtgctggtgttacagtaatgcaaacagaatcttttcttttttttttttctttttttctttttttttctgcgatggagtctcgctcttttacccaggctagagtgcaatggcacgatctcgggtcactgcaacctccatctcccgggttcatgcagttcttctgcctcagcctcccagtagctgggattacaggcacacaccaccacacctggctgatttttgtatttttaatagaaatggggtttcactaggccaggctggtctcaaattcctgacttcaagtgatccacctgccttggcctcccaaagtgctgtgattacaggcatgagccactgcaccaggcccagaatctttcaaataaattttagatattggatattactgtaaagtttcaaaattgtgaagtggcttattattttatccactttaccctgcatcaagtcacatagagattgag

SEQ ID NO: 15223 - DNA, 1061 bp, Homo sapiens
gaaggcaaagcctagagagatggcaggggccagacttcaggggcctggggatgtgtacttgcactccaagtcgaggagactgaactttttaccaaagacttggtgttctgtagaagtatgagcagatgagtgacaagatctggtttatatgttaagaagttctcagctgtaaggtgaatagattggaggtgttggggcaaaggcaggggacccagtgaagacaaggagcgaggctctatactgaggccctggtagaagtggagcagatgggccacctgaagagctactaggaagttgacaccaataagatgtcgttagtctgtgtatggggagtgagggaaaggaagaacttgccagtttccaggttttaatccttccaaaggatttctgcagaaagacactggaagagctgtattcctacttatccttaaaggaaagaaactgcccttgaattccaaggacatgattactgagctggaattccaaataatgtgtcccagtgagactcctgggggtagttttgtccggtaactgtgtgtgttagatgaaactgcagacttccagccactctatcttaccatgtctgttaacagttaatttgctctgatgaatttgcccatcttggagaagggggctctgctgactgttttttatcttggagtaaatgtcctttgattaggaaggttctagactatattgttaaaacaacattggaaggctgggcatggtggctcatgcctgtaatcccaacactttgggaggccaaggcaggcgtatcgtttgagcccaggagttcaagaccagcctgggcaacatgacaaaactctctctactaaaaatacaaaattagccaggcatggtggagtgcgcctgtattcccagccacttaggaggctgaggtgggagaaccacctgagcccaggaagttgaggctgcattgagccatgatcgtaccactgcactgcagctaggtgacagcaaaaccctgtctcaaaaaaacaccaaacaacataggatactgttatataacagctagttcctatacctgtaatcttattaat

SEQ ID NO: 15224 - DNA, 1029 bp, Homo sapiens
cctggccacgtccctgcgaggccctgagtggcgtggtccaggctgccccagcagccccagctctgctgccccatcaaggcagagcactagggtgagtgccaggcagcattccctctccaggcctacccatcccagccaggagcaggctctagatcctggtttgtttccccacccataataggaaggtgacataataggacctacgtgggcatcaagtaagttggggcctgaccaccacaagtgctcattaagtgccaccagctgttgtgggggtgatgacactgtgcctccagttccactcagtctgtgtactttattatgccacagacacatcctgtactttcctacctcccctttggctgtgatcccctctactcaaaacaaacactcttccctatcttcattgcattttgttgaaatcccatggctcttcatagctctcctcagatgcaggcccacccccacccgtgctgtttcctccttgtctcatcctgcctgtcacgttctcctgctcggcgggctccacctcttctgctgccctctaggagatggccagcctttcctgtgctgccactgttgtctcaccttacagtcttcctggctccagatgagtttgagagcttttgcttatctttgtaacccatttagtatctaacgtggcattttatacataggaagcttctctcatcagtattggtggatgtgaaccaaattgaatactggcaggttggtgacacggagagctatgtgcatatgcaaaagctgtagcccctcacctctggttagttggccataggatggagtgtacttaaggtacatagactattttactcccaagaatgctaggcactcactgtcttaattgaggccaccagatacacacatgagaatataaataacggcttgtggcaataatgactaaatgccaaggagtggctggtaaaccgcggtgttccctagagaccccggcctgggctctacttaggctgcctcttggacatcagaccaaggcttacattctgaatccac

SEQ ID NO: 15225 - DNA, 1192 bp, Homo sapiens
ctgatggtggttgggttttggacatgttttgaaataagaggcaactgcattttccctggagttggatatgaggtgagtagagccaaggacagcttcatgatttttgatctgaacagcaaaaaggccggaattgctgtttgttgagatgcggaatgtggctggggagatgtttgggaacaggaggggaagaagatgaagagagcaagctggaatgtgctgagtttgaagtccctttaaacactgagtggcaacgtctagtgggcagttggataaacgtgaggggttcggccaggcgcagtggctcactcctgtaatcccagcacgttgggaggccgaggtgggtggatcacgaggtgaggagatcgagaccatcctggctaacacggtgaaaccccgtctctactaaaaatacagaaaattagccaggcgtcgtggcaggcgcctgtagtcccagctactcgggaggctgaggcaggagaatggcgtgaagccgggagacggagcttgcagtgagccgagatcgcgccacagcactccagcctgggcaacagagcgagactctgtattaaaaaaaaaaaagtgtgagggttgggagaggtcgggtctgggagagaccataggaagccctcagcaggtggaaggctcctgctcaaagctgtgagacagaggagaaaccaggactgagccctggacacagcacggggagaggccccggggagaagaagtgaagctggcaaggcagcagcaaggagggagggccctccaggtgtcaggcaggtggacatcatgacctaaggctcaccttgcgggaactttctaacttgacttttagcaagtaagtccccttccctctctctgtccagtgcctttcagagtggagtcctctaacggagctgattgtgcccagtcacagacagtgaggacttccccagctttttttgcctggtgcaagctggtttttatatcccattaaagcatcataaagccaacccggacaagagaattgggatgtctctctgcacacatgagcctttttgtttgtttgtttgtttccccggagacggagtcttgctctgttgcccaggctggagtgcagtggcgtgatctcggctcactgcaagctccacctcctgggttcttgccattctcctgcctcagcctcctgagtagctgggactacaggcacccgcca

SEQ ID NO: 15226 - DNA, 1035 bp, Homo sapiens
gcatcagcagtcatagcaccaggccgaggcgagaccctccgagcggagtccggctggttaaagggcctgcacgggtctctcacagaagaaggaaagctggtcctgagggtggagccaggggaatctgggggccacttcagcattctttgttgccattggctttggttcagtaagctttgttgatttattttgttgttgttattgttgttagagtgatggggctgattgcttataagttctgaggttcttatttgcgtttccagctccctgggtattcattcatacctggtttctggctgtggtgaaatgtcttctgaccaagtgggttgataaacagggggcttcgctggagcgggggcagggggcgcggtcactgaacagagaaaaaactcaactcatcctcatctctgaggggactctttcccccagccagtgccttctgcagtttcctgctctatctatattccacccacttaacccacctctaagagttattttaaaacagcattctagaacccatctctcaagcaagagggaagtctccaatggctcatcctgtgccccgcctgcatctgcgggcacctgcagtgccgggacgctcacagcccgcccccaggacctgtggggggagttcagctgcttcggctgcttctgctgctccgcgtgcacatgggcctccttaccaccctggcagtctcctcctcttggaagttttaactattcaagactcaatggccaggcgcggcggctcatgcctgtaatcccagcactttgggaagctgaggcaggaagatcacttgaggtcaggaatcgagaccagcctagccaacctggtgaaaccccgtctctgctaaaaatacaaaaaataataattagccaggcatagtggcagtgcctgtaattccagctactcaagaggctgaggcaggagaatcacttgaacctgggaggtggaggtcggagtgagctgagaccacgccactggactccagcctgggcgacagagcaaaactctatctcacaaacaaaaacaag

SEQ ID NO: 15227 - DNA, 1042 bp, Homo sapiens
gtgttgtggccgccgccgccgcgcgtcgcggaggcacgtgtggagccccggcagcaggagcgtcgcaggtgagactccgcggggtacagggtggcagggcgcgggtgagggtgacccgggccgggcacggcgcgcagggcctgtccctccagcctcgcatgggcggcccccgccggcccggcctggccccttgttgcctctgcatcggctgggcggtgtttgcgtggacggccagctccgcgtccccagccccttactggggagccctgaatcctctgtcataccctgccacctagcccccgtgggggagactggggtgaggaatcaagcctggcttggaggtgacctcattgaccatttgcctctcccccgccggtggacacctcgcaaaggcgcttcctcatctcacatcttgggaatgggagtcaagctcctggagaagggtgatgggagggtcgggtcctcactccgggaatccttgggaccgaactccgccattgccaagcctcagtcttttcatctctgatttaggctcatagtccctgtctcttgtcctagaccaagaaaggcttcagaggccaggccagagtgcagcgctattgggctccctgtcaggcagtggcagagactgaggctgagctagccacaccccgcccatgcccactgctgggatgtaggcctcgaagccttctacctagaccctaggccctcatcctgcctcctgacttgctcatgcctacacacacccctccccaggtccttggcccttgccagacattagcaccatgagcttcgtggcatacgaggagctgatcaaggagggtgacacggccatcctgtcactgggccatggtgcaatggtggcggtgcgtgtgcagcgtggggcacagacccagacccggcatggtgtcctgcggcactcagttgaccttatcggccgccccttcggctccaaggtgacgtgcggccgaggtggctgggtgtatgtgctgcaccccacgcccgagctctggacgctgaacctgccgcaccgcacgcagat

SEQ ID NO: 15228 - DNA, 1014 bp, Homo sapiens
ttgtaacctctgccaccccccaccggccccagtatttttagtagagacggggtttcaccatgttggcccagctggtctcaaactcctgacctcaggtgatccacctgcctcggcctcccaaagtgctaggattacaggcgtgagtcaccacatctggctaatatttgtatttttagtagagatggggtttcaccatgttggccacgctggtcatgaactcctgacctcaagtgatcctcccaccttggcctcccaaagtgctgggattataggcgtgacccactgcacctagcctattttgtatttttcagtgtacacatcttacacgtctcctctcaaatttattcctaagtcttttattatttttgatgctatcataagtagaattgttttcttgatttcatttcagactgttcattgctagtgtatagaaatacaattgatgtttgtatattggtcttgtatatatcctgcaagcttgctgaactcatttattagctctaatagttttttgtttatcctttctccttaagtcttaatgtttaagctgaaattacctttcaggtcagaaagcaacattgaatgcagaagaaatggcggacttctacaaggaatttttaagtaaaaattttcagaagcacatgtattataacaggtaggtgtttactcttttcctgaaaatttgaatagcacatccagattaggtaggagtgttttcttacctgaatttaacaacattcatgtttatatcagaggtagaagttgcaagactttatcaacttttttttttctttttttctttttttttttttttttgagacggagtttcgctctctcgcccaggctggagtgcagtggcgccatcttggctcactgcaagctccgcctcctgggttcacgccattctcctgcctcagcctcccgagtagctgggactacaggcacccgccagcacgcctggctaattttttgtatttttagtagagacagggtttcaccgtgttaggcaggatg

SEQ ID NO: 15229 - DNA, 1047 bp, Homo sapiens
caggtgtgagccactgcgcccagccagttaacttctttttatttttttttttactttttttttgagacgaagtctcgcttttgtaccccaggctggagtgcaatggcgcgatcttggctcactgcagcctccacctcctgggttcaagcgattctcccttctcagccttccaagtagctgggattacaggtgcgtaccgccacgactggctaatttttgtattttaagtagagatggggtttcaccatgttggccactcctgacctcaggtcatccccccgcctcggcctcccaaagtgctgggattacaggcgtgagccaccacgaccggcttcagttaacttctttttaaagaaaatttctaaattttggaattattttattttacttatttttaattttaaaaattttaccctcctctcaagtttccaatggaataattttaaattgattgaaaagttgaaaagttagagaagaaaattgatgtgcccataacccagtctcccctgatcgtccataatcatagaacagtggtcagaactaagatattaacatcaacactttactgttaactgaaacacagacttggttggatgtcaccaggccttccactagtatctcttttctgtgctaggacctagtccagtgttccacattgcatttggaactaacgttttttaaatacctgtatgatgccagacatgttcatgtacataatcagaatactagagaggtgcacatttgtgtgtctcgttcgaatccccatcctaagactactgaaacagttttttgcgtagcaccagcaaacctgcatttcccctctgtcttcatctgcttgggctactgtaacaaataccacgggctggatggcttaacatttattttctcatagttctggaagtccgagatcagggtaccagcagggtccggttctggggagggccttctttctggcttgcagactgctgccatctctttgtgttctcatatggtacagagagagagggagtaagctctctggtgtctctttttatgagggcactaatc

SEQ ID NO: 15230 - DNA, 1069 bp, Homo sapiens
aaaagcaatgtgtctttatcacattttcccttccggagccaaacagtgttcatctgcctcatgacaaagctaatttcttactggtcaggctgttacctgtcttttccattatgtagtttctgattttatttctttgactaatcagcaaaatgtagggaaacatgggtcacaggcctttaaagctgggaggtttcaaactgctcccagggatcctgccccagagccgattgtggtggtgaggaatctagcccctccacttctctggggatcagagatgcaccattttcacctgttgctacatatttggttcccaaataagattttattttgagtcagggttttccctgctctcctagacctccctcaaagcgcgggagaaggatctgaggcatgaaatgcagccatggcccatttcgtcaaactgtggtctgcactcaagtatttgtattctagtctaaaaagcttttcattactcctgttcaactgatggataagccagattgtcggcgatcctacatttgatgttaaaaactgatcatcttttctaagattcttagttaaaatgtatttaatattaaaaattttcaggacaggatgtgtatagcacgtgtaagatgaagtgttgtcctgggtctgttttataggaggacaaagacactgattctaccaaagagcctctggatgaccttttccccaatgatgaagacgacccagggcaaggaagtgagtgatgggtgatgcaggcatgttaccgagtgcagaagagaggtgttcctcctagaacacggtcatagcaatcagtggcagccttagtgcatgcggcctgcctggaggaagcaccaccagagcggggttgcctttggttttccaaaataatctgtgttgtgatacgggaatatgctagagcagaccctaggatacagcggcatgcacgtgcagttcaggcgtggtctgcagattcttacagggtgaagaggtcagaattacttatcctgcttgtttcatggcgccaagaggagtctcatggcactgagtggccatgttgccatccctgacactgtagtcacta

SEQ ID NO: 15231 - DNA, 1035 bp, Homo sapiens
gcctggtgcgctgtgcctccttttggaatccgggattcaacttgccctttgccccttgtgtgctccccgaaccctttcacccctgttgaaggacgccccgggggagtggtgggctctcagttgtgtggtagaagagttcctttggctcagtgcctaggatgcagttgggggctggagccggaggcagggtgtcctgttgggacaggattgaggttgtcggggtggggcgaggggaacctgagcaaggaggaggacgtggaggaagaggagagtacagggcctaatgacgcttgaagagaaatgcggtgatatgactacccacacgcataagtgatttctttaaaaataagttttgaaagttgataaaataaaaacacacaaataagaaagtaagccccctgttataacaacactatttaaaatgaggccgttccctttggctctgtagtttgtcagcagcttggtctgccccatgactatgcagcagggtttcgtggacattctggacattttttgactgttttcctgttggtgaatgttgagattgtttgcatattttcttttttcttttttttgagacagagtctggctctgtcacccaggctggagtgcagtggtgcaatctcagctcaccgcaacctctgcttcctgagttcaagtgattctcctgcttcagcctcctgagtagctgggattacaggcatgcgccaccatgcctggctaacttctgtatttttagtagagacggggtttcaccatgttggccaggctggtctcaaactcctgacctcaagtgatccttctgtctcggcctcccaaagtgctgggattacaggcatgagccactgtgcctggccaattgtttgcatatttcactgcaggaatttcttagtcagagatatttgcatttagctcttaattagattgagacatttcattgcaaaaaaattttttttttgagatagggtcttgctcagtgatgcgatcatgggtcattgcaacctctgactcctggcctcaagcaatcttcctgcc

SEQ ID NO: 15232 - DNA, 1075 bp, Homo sapiens
actttaggtagcttattttattttattttttttacacggagtttcactcttgttggccaggctggagtgcaatggcacaatctcagctcactgcaacctctgcctcctgggttcaagcgattcttctgcctcaggctcccgagtagctgggattacaggtgcctgccaccacacccagctaatttttgtatttttagtagagacagggtcttgctatgttggttgatcttgaactcctgacctcgggtgatctacccgcctcagcctcccagagtgctgggattacaggcgtgagccaccgtgcccagccttggtagcttatttttaaattgcatttgctacaattctcctgcctcagcctcccgagtagctgggactacaggtgcatgtcgccaggcctggctaattttttgtattttagtagagatggggtttcactgtgttgcccaggcttgtcttgaactcctgagctcaggcagtctgcccgcctcagcctcccaaagtgctaggattgcaggtgtgagccaccgcacctggccactactttttggaactctattttgtacttgctgactttcacaaaaagtttgaggcagcttacaataggatgtaataggatgaaagaagaaacaacaatatattaatacgtggccagaattagtgtgcttcagaggttgtagaagccttattaacctttctcacgtttttcaggggaaagccttgccaggcagttactactactcaattgagaaagatgtgtgctaagtctcaaaagcaagtacttgttctcagtcacatcagtagtgagtagcacgcttaaactgagagtttctggttctggggtgtttctgttttactccaatcaagaaagattcttcgttcctccatactcaacaaaatggagggagactgggtaccaagttcagacacaacaatatatttacttttgtttgttgttttttaaaatattttttcagtatacatgtagcatatcatcttcttacagcaagactgtgcaatagatcatatacttgctttgtagatgggaaggctgggactgcgtgaggtcacgtaa

SEQ ID NO: 15233 - DNA, 1677 bp, Homo sapiens
acctggaggcagaggttgcagtgagccaagatcacgccaccgcactccagcctgggtgacagagcaagagtgtctcgagaaaaaaaagaaaaaagaaaaaacaactatacctgttatctgtataatgagaaaatgtgatttcaattatatatatatatatgtatatgtatgtatatgtattttttttttttttttttgagatggaggttgcccaggctggagttaggtggcacaatctccactcactgcaacctttgccttccgggttccagcgattctcctgcctcagcctagaaggcattttaatgctttttaaaaggttgaaaactactaccatagggaaaaacattgtgcctccctgttgggaagttacagcttcagcagaagtgactgccaggaatgaatgtgacagcttttgattaagttataataaccacatacaccagatattcggctcagtttttctcaatattcataagtaacattgaaaacaaagagttatgtggtcaaagaaaggacaaactggttaatgataatcgtcccctgtgggccctgggcgttggtgtcacacagaactgagaagcaaagcgggtggtgacagaccctggtaatgtgcagggagcgtccggatcggagtctcgacctggtgggtggtttgtccagggaaggacagttctcttctttaggtacacacggtagggactatgattaaactacttgacagcggcacctctgtgacctcattttcgtgtgacacatgcagatctggaagccgccgtcaccgtgagtctcagttggctctctctcacggtcttgcctctgaaaatgcaactgcattgtgcacagaaatccttttctgggtaaaactgggtcttctataactgctgtccgtgtggcttcatgttcatggtgtgatgtgcatgtgtcagccaccagcaccaggtccctgttgggatgtgggagccccttgggctgtctcatcatttagcagttgtctttacagtggtcccatcctctgtaaagacacacagagccacatcacacatcctctatcctaggtggagcccggggtctgcctcccagctgcaccacctttgtctgtctgcaggtcgccagctctgctggggccttctgaagcagcctctctccgtcttgccattcttttcacactgctcccatgttaagatttctacacgtttcgaagacactaaattcttacctaggattattggggaatggaatatatggttagaaatagatgaatttttatttttaaaaaatgacaataagggctggacgaggtggctcatgcctgtaatcccaggactttgggaggccgaggcgggtggatcacttgaggccaggagttcgagaccagcctggccaacatggcgaaaactcgtctgtgcgaaaaaaacaaaaatcagccaggcatggtcgtgcgcgcctgtaatcccagttactcaggaggctgaggcagggaattgcttgaacccagtaggtggaggctgcattgagccaagatcatgccactgcactccagcctgggtgacagagccagaatctgtctcaaattacactagtaagacaactagaatatgccaaaaataaataaacttaagcactaaattatctgagatcctactgtatacagataataacgatgactgcatattt

SEQ ID NO: 15234 - DNA, 1050 bp, Homo sapiens
agccaaggtcctcaggtggcaagttcagggaagcaggcagactgacccagagtggggcagacccgctccactgccaaccccaggtgctggtctgggtctgcagaggctcagggaggaggaggcagctgggtcggaccccaattctgggactcctgggcccattgcccagctgtcagctgtcagcttgctactccagcagctgcagaggggagagagagcatgagtgagcgtgtgtgcacgcgtgtgtgtgtgtgtcacatgaaatacttttgaatctgagtgaaatgaatcttctgtgttctgccaagcatttagttgaggtgtattataaactactgtagtgtagcgctgagttttgaaatgaacagcaggggctgcactgttaatgacgatacgttagcattttagcatcctttttctcaagagcagcaaaaacttatgttttcttgtcctccccacatttttgaggtgttggtaacaagtgttatttttccattttaaagatgaggaaaatgaagctcgggctggttaactgacttgctcagcgtcccatggtgagtccgagcgggcggggcgcaggccctgccgtctggcgcttctgtcgagacgtcggctttccaacctggcaggacccaggacgcattgctgcctgtggaaattaattttcttttggattatcaactgcatgtttaaaatgggctgtagacttttaaagtccgtggtttcctaaagtttctgaaatgtctaaaatgtgtttttaagagaatgaaagtcatacctgtagcctttattttggtccctatgtttttcattgcataatctccttatatacagttacttgtaaagccttttacaccaagtgtcaaggagatttctaatacgttgccaatctttacgcttaaagtgttgacatttactttgatgaccattgggaatggaccagtctggattctgtgaaatgcaccatgaggcccagcacctgctttatgctggactggtagaagcaggcagaaggtcatcccagtcctaaagccactcagaaggctgctg

SEQ ID NO: 15235 - DNA, 2795 bp, Homo sapiens
ccagtgctgcccgctgtgtctagcagcctctaggatcttgtcagagctgcacctctctgtgaactggccattcctttcggtgctgctgtcctttttgggggggttcctgatttctgtatacatgtagctttgccagatatgtacttagtaatataaactgtattaataaaatccatttactgtgtaatacacgagtttaaaaattaagagcgattagctgttcactttggtaacaggtagttaagtgtcacacaaggtgttgttgcaatggcatgacggtgacctgttgacgtaactaagccttacagcaaggcatgtgccgcacgtgctccgtggtacttagagccctgggggccccgctcggactccgggtctccctaggatatgccccagtagcatttgctgtgtagtctgtgtgtgaaatttgggcattctgcttttctctactaatcttgaagtgctcagtgatttgtgtatttgtgtctttctaacttctaataaactcactccgactgacctgtgtcttggtgtctgtctgcttggtagaacttctcactctttatccatgaaacgccgcatggcacagctgctaggggtcatggggtgacagttcatctcaccaaggagttccttccaagaagaaatgctgctgtatgcacatcttcttcactctgtgttttttattttcatgttcagatactgccaagtatttcacttattaatacctgaatcaattaagatgagagctgggcactctcacctccctacaaggttgtctgaggatttttagttatttgtatagaatgggcattttatttaattttccaaccacctttgtagttaacatttaatgaaactgttctgtaaaatttactgaaggaaacagtacctccaactattgcatttagacgaaactgttaaaaggaagagcctctgtcagatccaaatggtttgggtcctgtactgtgttacttgtaccagatgcttatgtatctgttaaatgtggaagtcgattttgatgatattcttagaagctgctttaattttcctgagactttgtgtgttggcttttgtctcaaaatagcaggattcacattgcttttgggatgcgatcacttgtttgaatgagcttccttatgtccaaaggttttcatgatcattggattatctttaatgaaacttaaaaagaacaatttctagttaaagtatattcacgtacatggtaattggtggtttctgcaagactctgtcagcagtgagctgctggcaagcagggcggccttggtggagctcttatttgcacccggtgtggctcttgtgggaaggagggagaaccacctgcagcttcacgtttgttcacgtttttttcaggatggcactggatctttaaaacgcagtggttcctttagcaaactccgggcttccattagacgcagcagtgagaagctggttaggaagctgaagggaggaagttcacgagagagtgagccaaagaaccccgggtaactatctcttccagctctcccgactccctgcacgccggctgctgggccgcttctcttcctagcgcagccttcctcacccacagacttgaggaaagacactccagttggttcccgtattctcacaaccgaagggtttcatagttgccacgtaggtttttcccaggataggttgagaagtaattgggtaacttcctgttagtggctaaagggcgaatacctttaaaagaaatttatggaattttttgattctgtcacatgttctaagaaagccttagcaacgaaatgtgggcatttatattaaaatgttgagcattttgaacttgtttactctagatatgcattattttttaaattagcattagtttaaattctttaaaaattttaatcttttaaataaatcagatgttagctatgactatattaaatctcatacagtattataatagggagaaaaatggtttcaaataggatcagaacttttaagactttattataaggagattttcaaaacctcaggcttttcatatgtttaaaaaaaggtttgagtcatgggtcttagaggcttttgaaaaataacatttaagttgtcaaaggaatttggttcttaagatatcctttgtttttaatatggtgcacaaagttgacagattgtccctgccgcagtgtccagggtcacctctgggcagctgctcctggcttggacgtatttctcatgaggcagacttttgccagccactctgtgtaactctgacttcctaaatggtgaccgactttttagagactgattcctagtaaaactattttacaagtgatcccactttaagttctgtgagtaagaagtctgatcacctcaggatggtgaaaccgagttcttctggagaacatattggaaataataaagttatgtgcctgatcagttgtttcgttactctgtctttttcgttgttgttgttgagatggagtttcgttcttgttccccaagctggagtgcaatggcaccatctcggtcaccgcaacctccgcctcctgggttcaagtgattctcctgcctcagcctcccaagtagctgggattacaggcacatgccaccacgcctggctagttttttgtatttttagtagaaacggggtttcaccatgttagccaggctggtctcgaactcctgacttcaggtgatcttcccgtctcggcctcccaaattgctgggattacaggtgtgagccaccgtgcctggcctattttgtcttttaaaagctatttaaaaaaaaaagtatgtccactttttcatct

SEQ ID NO: 15236 - DNA, 1040 bp, Homo sapiens
ctgttgggacttggcagtccctgcccctgtgctggtgctgagagttcgcgacagtggccaggcactgccctcccagttgtccagatccactaatcctcacagacaggccagtgccccgacctgtcccccaacactcttgggaggcagccatctcgggaaagcttttccccagcccccttctcggtggctgttaaagaggcttgtagggtgctggacatgttgcttgaagcacccctaatgacaagaggaaagaaagtctcttcattttacagggtcctgtagctgacccagtgtttgccctccagtttcttggagtttctacatgcacattgacccctgggcctctcgagtgccaacctagatttagctgtgcagctggtactgttaggcctgaggccatttgaagctggcatcatttgaagtcctggttaagtgtaatttttctatttgttttttcatgcaggaacgaaataattgtctggccgactcgcgagctctgagtgccagccacactgacctggcccactgagagccagcagggctaggtaacctgtcttgggagtgtgagaccgccccgccctgccacgcccctcaccgccctgcccggaggcgccagccgcactccttggcttcctttcctagatagtgacgtccaccaaccttggaggtgccttttcaaaacacccgggaggccgtgcctcagcattctgttactcggcctgcagccccagtgccaggagccaccccgaccgcgacccggccaggctggctcagggaggccgaggtggcgctgaggtggcttcagcacgctggggattggctcctgctcacggatgctgttgcatttcctgcctgccacctttttgccatgacaccagactctcttttaaattgtaatattgtaataaggctgtaaattaagaatctggaaacataaagtacccctttcagaacgataggcatttagtgatctatggcagtaaagcctgaagcttagcggacactggtcagtgggaagtgaattccttcccagctggagc

SEQ ID NO: 15237 - DNA, 3225 bp, Homo sapiens
ggcgtttcactttttaaaagcttaagctttatggaatgagggagcacggtggactctgacaggaaccttttcaaatcaatgctgaggctgtatttcttagccgtccacaaactagtccataggtaaagagcatacaaaacagacgccgaggtgatcagtgattccaaaggctgacgctcagcagcgccacctccatgccagccaactaggctacgggatggaggggcggtctgtgaaacaccagccatcccgtgaaagctcagcttgccactgtcatgtaacagggtgggtggtggcacagcagaggctcacacttgtcaccttcagcctctagaagctccccgtggggcacgaaggctggggacagagtgtcctgaggttttgttacaaggctagactttaaaatacctttcaaagtttcatcccgcctcatgtcgcaggactgctgtgtttgtgaaagcgcgtttgtttccacaagacaagctccgtgtagtcgccagcgggtgcctggcccaggagctgccctgtggagccagcgttgtccccgagctgctcgcctgtggccgtggctccttttctgaggctcctgactccattcttgcagattctggtggatcaggagcttacattctaaatgctacatagaggtgttgaagaaaatttcataggttctgtaatagtggatgggattaaaagaaaaaatgttaaattatatatatatatatggctgggtgcggtggttcatgccagtaatcctataatcttagcactttgggaggctgaggcgggaggatcacttgagcccagttcaagaacagcttgggcaacacagcgagtccctgtgtctagcaaaaaaaaccatgtgtatatatatatatatgtgtgtgtgtgtatatatatatatatatatatacatacatatatatacatatataatttgatgggttgtgagaagccaaccccccccaaaaaaaggggggtgtagagcagcttcccctgacaggtgccgtggctgcccccgtagtgggctatgtctgtgcacaggcgacagggaggagggctccggagcttcccttgtggtgggggtgccttctccctgtgaggatgctgagcagagtttggaacccagacagtttcccttagtgacagttatctggaaaggaaaaagggcatttagaaggaataaacatagggctgaatatggagttgaattttaacctcttcagactgatgggtgcagacgaggttgtgtggggcctctgtggagcctgctgtggcttccagccatgggactttagggccgaggtggcctctgcagcactgtggctgtgggagcactgtgtgttggggtaagagaagccagggggcctccctgaagccagctcataaaggaaggttcgtgtttcagagggaggcggcaagggaatctgagtacctgagtccccgatgtttgaacccttccacccaatagaagtgcggtgatttcagccatttcccatctggcggtctgaatttttcccttcagaggagagaagtggtgggcccaggcatccctcctcctgtgtgtggtcgttctggtgagaggaaccccacgcgagagtcagcacctgtttcttcagagttgctgtcaaaataatcactgcgcccccgccccccgcccccccccacagcagccgtgtgtgcagcgcccgtccccagcaaccatggcatgggagcgtctggatctgtgggcggacagcatatctctgggtagttggtgcagctgtggcagaaatcaggcccctggggaagtcctgtgacatggatgcttccctgaagcagcagcagtgtgtggctcaggggtcctcagaggccggtggtgcccgcgggtggcacggggcactctcatgggcagcacttggtcttgtgtttacagtattggagggattcacatcgttgttttctggattaagctgctaggagtatcatgtacttagaaattcagtgtttatagtaagatgtattaaacattgctaatgatgtatcgttacaatgtataacaggttttccattgtcataactgtatggaattttcttggaggatgtcattagcttctgtttgcactgacttgtgagctgtgtgtacgctgtggtcagatttctgaatgctgtagagcacttaccagctctgaccgtgtcttgctggggccagcaggctgcgtgtgcagcggggccagctgtctcagggctgatatgtagacgtgtattctgtttacaattagttccccaactctgtggggaagaacttaagcggttttagtgttttataatatggtgaggcaatgagggtcagggcgcgtggtccctgagggagggtcttcagggcaagacccatggccctggcctggaactgtgctccccagggcgtggtgcctccctaaggggatggtcagtgttctgggactgactgccaggccagcccgtctgcagactcctgtggtgggagttccctgggacgggaagcccctcggccccttccctccaggggcaggaactgagccagcatgggcggggccggccgagcttccaggcgtgttttctctgttaaatgtacctctgtctttaagctgtctcattttctaatcgctggcatgtcttgcctagaaaagcatttggaattgcttatgttcaattacagaaataaaatgtcttacttgccattgtagaattcctgcacttttgcagaaaggctgttttgtaaaaatccaaccccaaaataactttttcccatgttcatgccagtgattcttaactttagggtcatagagagccttgataacatgatgaaggtttaaacggattgtcccaccctggaaaacggcaaacagaaaaattctgcacagtatggccccagcccttacctttcccccaaccagtgccagccccccttcctcccactgtaggagcacccacaggctcaccctgggcacataaggtggggggtgacaatttctgcctctgggttgtgggaggagtcaagctacttaacggttctgggcctgaatttccctacctgcaagtggagatgtaacagtacctatccctaggagttgtgaggagaacatacttcaatgtgtataaattactcagagcagtgcctggcagacagcaagaagcaggtcctggaactgcatccattgaacatttatttgtcaaaggcctggtctgtgccaggcagcatgtgga

SEQ ID NO: 15238 - DNA, 1949 bp, Homo sapiens
cttccaggctcccgcgacgacccctccgcctccgggcggccccttccccagccggcccccgcccccgctctctcccaggttggccgcgtccccgggccgccgcctcaggctcctacgcccgcggggagggcgggaggcgcgcggtgtcccggtgcgggggtcccgggagggcaggaggcacctgtccagggcgggcgccgggaggcggggtgcggggcgcgggctggtcccgggggtgggtgcggccctgcccgaggccggttcgtgctgggctagcgcgtgtggactgcgtcccgagagctggggctcgctcccgagaaagtggaaggcggagcgccttcctcgcaggctcggtggggagggcgcgtgctgtccgcggaagcgctggagctggcggccccgcaggggtccctcccgggaaccgggggaggcgtcggtgccgcgggcgggtggccggttccgaagccacctcctgctcggaaggagggccaggacccagtctgcgggccaggctgccccccgtttcccttcgtctataccaccctccacctcggaagcgaggtcgcagtcgcccactggacagtttgaaggagaccgcagatttgcacccgtttcccatgggcccagacacggcaggagttgcccaggccactcctgcagacattggggcgtgggcgtggggtccctgagccaggccatccgctgggcctcccgtggggttccctgtgacctgatcggaggtgcctttgcctcacaccagccccttggccaactgggaaggccccgagtgcatttaatcccactggctgtgcgctaacaggtgtgtccagtttctgttctgtggattttaccacgataaaaaaaaaattgggggagaaaaagaatttttgtaatatgactttcatacttaacacgtgttacagattcgtttaattccctcagtgatagaactaagcagacgttggaactaggttcaagaagtcaaagtagcactaattgactgggttcattgaagcttggttggaggcctggtggggggtgagcggccacagagcctcggggacaggacggaattcgagtgactctggggaagtgtctctggcatctacagtgtacggagccatcaccggtcactgagcgtgtcctggagagttgagaccagtgctgcccacctctccccagtatcgccaccatgaggagtctttttagacactttccgccaatcatcctccttcatcttttttaaaatttacttttaagttgacacgtgaaaattgtatttatggtgtaacgaactcttaatagcacagaaatactctacgtctgtatgaaccgtaaggagcacgtgagaaagtgtggccaagatgaggcagaggtttccaccaaagcacaatttctttctccctgctgtacacatgcactgatcttacggttctgttttatagtgaaccactgtgttcccctccttcattctctcttccagagcccttctggtatcagctgaattgtttagcatttttccctgcctttctttgtggcctctgctgaggcactgtgtggcagtcccgcggtgacttccgactgagtggagttgaaacacttgagtcaaggtggcacccctcgtggaagagaagattcattcccacgctggcgtggtggcaggatacccctccagagccccccaccatgtttggatgattaactgggatctgagcagctgagggaggtcctagcattgggtgggcttgggggacagagaaaccattctaataagatggactttgtctctgagttttgcgttgtgaattgtattggagcatggtcttacaggccagaaacgaccaaagacagtgttctggaggaacttagaacggggcagtaagggctggaagatttggaataaagtccagctttaggtgcaatagctcgaggggacatgtacggtaaca

SEQ ID NO: 15239 - DNA, 1083 bp, Homo sapiens
gggagtgccaggccagccggggccacacccggggccgcttgttccctgcccctcctcactgccaatcctcccgcatctgcccagcaccactgtcgccgctgcgggaagtgcttctgcgacaggtgctgcagccagaaggtgccgctgcggcgcatgtgctttgtggaccccgtgcggcagtgcgcggagtgcgccctcgtgtccctcaaggaggcggagttctacgacaagcagctcaaagtgctcctgagcggtaaggacgggtgtcctgcacagtcccgcgcgctccgccagccggctcctcgtgtctgtggcgatgctgtgggctgtgcacggggcgttctgcttctctgacgttctctcgccctccctcccttccccgttttcttctggattcgtttagaagcggttatagagccttcccttcttttcagaggcggaatgtcgtctaaaatgttggtgctgactccgctgggcacgtccatcaggtgggaggggaggccctgggcccaggcagcaccttcctccttcccccgggtggaacccggcgccggcgctcgggcgtttgcaaccactgtggctcctcggaggggccggagacctttgcccaatagcacgatgcagacccggttttgagccatctctggggacctggtgtgggagaagggcattctccaggggcatagggtgtgcctccctggaatctgaacaacgagcagcgccttctccccactgtccgtccacctctggccactgccgtcccagcctcctgtcccctgcctgcccgccgtggggtctgggaccacctgccttcctgcccacagctccatcctgtgtgaaacgggcatggtccctggctggacggtgggctttgttgtgcctcctttctgctgtcttggtcctgtcctgccagctcttaggacgtgtgagcagagtggtttattgttctttgatctggaccttggtgatgaattccctgcatcgtttgaaggatgtaaaagaatttctaggagctttgtaagcaagcagaacctgtctagagcagcgcctttgggtttacctcttaaacccttgatccatgac

SEQ ID NO: 15240 - DNA, 1064 bp, Homo sapiens
tgtgatgggtggagggcacgtccttgtgctcgtcttgtctctcttgcttctttggggtcccaggggttgaggatgggcatttgggggaggacttgagcttgagggatgtgaaccattgtcctctgaacaccagccagaagcagagatggagccctagcggcttccggggtacaagctttatgtcggggcagggacgtgctctgggggagtctggccgtggtcacatgtgggctgggtggggatgggattgtggccgctggcctcactgcctctctgctgccaggtagaggacagggaaggagggggactgcaggctacccccaaaccttcagctgctcagagtcctgctggaggggcttgtgagggtttggagtgggctaagggaatgggactggggccttcccaaagctcccttaagtaccctggaaggatctcttatttgggaatcagaagagctggtttttcccttaagtaacaaagaaagtctagttcttctcttcctttgcctgctaggaagctcacagcaaatgtgctgctcagctctgggccgcgtgggacttttcttctgctctaatgggaacgggtcattctttttgttccagttatgactgactgtagttgcatggttttgtttttagcttatattttgtagttcctgcgagccaccgcacaatctttgtgcaagacagtgtgggctatgagtaaataagtaagagtaaaagtggactgaccgtgccttggtcgtgtctgcttcagcctgttcatctggtccatggaagcggagcttgtgctgttggggggagtggctgtcagctgggctttccctggttcctggtggcagccaggctgggtggtctggcctctggaagtcctggcccaggaatgggcagccctcgtcagcctctgagctctgcacccacgctgctcccttcctgctggggtgaacactgtgcttggtgagactttctcagggcaggctctggaggctgccacccccaccacggtgtgtccttgtcctgcggggcctcagtttcccgcctgtgaacagtccttgggctgcgtcg

SEQ ID NO: 15241 - DNA, 1048 bp, Homo sapiens
gtggcagagcctcctctcatcctgatggtgtaaggatgcggattacaggatgtaattgccataatgcctggtaatggcaggcccagccgcgggtcagtgtcccattagcagccccacgcgggtgctgataagcttgaacatgcatcacacccagcggccagagacgagggcgtcttatcagcgccggccctggggaccgtgtggtctgattgcagagtgacggggcatatgattagggcattgtcgcacgccgtgtgccgggctgagggctgatgagcacaccatcgcgttggagcacagccagaccgcgcacgtgaccagtgtggcctcagcgccaccccaattaggtgccgagagcacggctggctgggaccctggtgggagcagatgggggtcttgcccatcctgctctggggtcccccgtgtgtgggacagcccaccccgtcacaaccggcctagtcctgaattaaagggcctgtgcggctgttctgggcacagccctgtggccgtgctcctttgggtcctgtttggcaggaggatttgaaacgtggagacttccagaaaagaaagaatagctccagtgctcagagctcccccggtccctgatgctaagccccctggtgccaaggagggttcctgacactgggaagtaagggtagggtgtcggcccccaggccggtgcgttggtgacctggagcccagcagagcggccctggctgccttttgtttgggagccgaggccggtgccgcttgccagccgcgctgcctgctgaccttgggaagttaccatagaaaccagcgcatcgggctggggacccagaggcggttctcccaaggcgggggcgctgccggctgccattacttccagcctgttaggcaccctgggtctcagcggcttctgcgaggccactgcaggtggcaggtcgtggttcaggttgtggcgggggacatcctggcaggtgggccctgtcggtggatgcctgacgtgggctggggtcggtggtgggtgacctcctctgtggggctgcagtaccctgaaccctcaggg

SEQ ID NO: 15242 - DNA, 1028 bp, Homo sapiens
aggcaagtgagggagccgaggcctgggggcttcagtggctggctcaggtccctcgcgtgctgggattcaagtctgggtaccctaaccctggcctgtgtgccgctcagaaccatgggcccatgcaggagcccccagctactctccacagctcggtgctgggcctgcctcaggagcccacactccctggctctggttttctgtctgcaccgcaggggctaggcacatggctgcaggtctagtgaaggccagcatggccctgtccccacccacaccacacactcagcttgactgttgactgctaggcggggcggtggcccggtggcttcccgagagtcagtgcagctgccctagcatgtaggcattcggatggaggtgctggcatcaccacaccaggctggccaggcccaggcccagagggggaccctgcctgccagagctagagtcaggggagaggcatggccccgtcctctggaagccccaggctattggttgacaaaagcaagtgctgaagaaccatggtgatgtcccactagcatgggtggggtgagcccctcagacctcagagtcttcatctgcaaaagaccctgccctgtgcagttccattggtgctggtggactgccggggggggtggatgggacgccccttcttggtgccctgacccttttgctgtccaaggcatggggtctggcctgagccatgggtactgggccctgcagagcctggatggtcctgccctgcctcagccagagctggtgccggctgtagaaaagattgcgaagaacgcaaattcctgtgcctgtggggaggtggccacgccctacagccggggctggggagctctgaggacacattcctgcgctggtggccccgccaacccactttccagatggagagcagaggggaagggtagcctgcccaggggcacacagctcagcaatgagactcccgcccccttcccttctcagttggcactggcaccttccagcgtattgttccccatagccccgtgcccctgagatcagtaaac

SEQ ID NO: 15243 - DNA, 1021 bp, Homo sapiens
ggtcctgctctgagacatcagaggaggctttctggggaggaggttttgcagggcgttcaggtagacagcggaatggaggaggctgcacctgggctggctcgggggcagggtgcctgcccttcactggtgtgtccctccatccagtggccaccagtaaccctgcaggagatcccgtgggcagcacgcgctgtcccgcctctgagcccggccttgatgctacaacagccagcgagtcccggggctgggaccttgtagacgccgtgacccccggccctcagcccaccctggagcagttggaggagggtggtccacggcccctggagaggcgttcttcctggtatgtggatgccagcgatgtcctaaccactgaggatccccagtgcccccagcccttggagggggcctggccggtgactctgggagatgctcaggccctgaagcccctcaagttctccagcaaccagccccctgcagccggaagttcaaggcaagatgccaaggatcccacgtccttgctgggcgtcctccaggccgaggccgacagcacaagtgaggggctggaggacgctgtccacagccgtggtgccagaccccctgcagcaggcccaggtggggatgaggacgaggacgaggaggacacggccccagagtccgcactggacacatccctggacaagtccttctccgaggatgcggtgaccgactcctcggggtcgggcacactccccagggcccggggccgggcctcaaaggggaccgggaagcgaaggaagaagcgtccctccaggagccaggaaggtaactcagggaggggccccgggcaccgtcccacgccagggcgctggcacccagccggtccctccccttccccattgggcactgcaagttccagcggcacccaggagaggtgacttgggtgcggcacgggagaggaggcggcagtgcgtccaccgcagggcggctatgtgggctgccgcggcccgtgcaactattcctccaacctactaattccgaccttcac

SEQ ID NO: 15244 - DNA, 1050 bp, Homo sapiens
cccctgacccaggtggatggcactgtccagtctagccgaggggcctgcaggtgcagggagctgccctgcccactcagacgttgcctcctggatgcaacgtgctactgccgcacatgcccgggccatgccaggctctgacgaggtgggcaggcctcaggctgtggtgaggggtcctggccatgtgcacattccctggggcagacagtgtttgtctgcctctacccagggcagccccacccgatattgctgcatgtgtcctgctgtggcgggaaggtttgtgtcccctgcaattcggaggttgaagcttcatttccagcgtggtagcttcaagagatggggcctttgggaggtgagcagggcgtgaggctttgcccttgggaatgggatcagggaccttaaaaagaggccagaggaagctggctcaccccttctgcccagtggggacgcagcattcaagataccatccttgaagcagagacagggccctctccagacaccaaattggccggcgcctagatctcgggcttccagcctccagaaccgtgagcaatacatttgtgccatttccacattactcaggaattttgttacagcagctgggatggactaagtccagacatcccagcttctccccaggcgtcctctgatcctcttgagtctggacccagcaggtctctcaccttgtggttggttgttccggctctgaagttctttaatctggaacattctctcccttttttctcttttctttatgcctttggtagcgggagagagtcggtggctgggggcaggagtcggcaaatgttttctacaagggcctggtaaagattttaggttttatggaccacaaagtatccactgcagcccaggcctgtggccgtggtgaggggcagccagggagcgagcgtgggcgaccgaggtgggcgcggcagcacctgcacttcatttatggatgttgaagtatcaatttcccataattttcatgtgtcatgaaatagccttttgatgattttcaatcatttaaaagtgtaaagatcattcttagttctc

SEQ ID NO: 15245 - DNA, 1042 bp, Homo sapiens
ttccctgggtcggctggttctgctggcctttcctggggctggatccccaggcctgtggctcctgaggtttgggggcaggagggatggagccaccacccagagccccaggcagcacagggtgctgtgtggagtggaggccgggtgggcagcagccgtgcttgcagcgctgtgtggagttgggggccgggtgggcagcagctgtgctcgcagtgctgtgtggagtggaggccgagtgggcagcagccgtgctcgcagcgcttaagcaagtagaaagtgactcgcctctgcctccgtctccccatgccccagtggggcagtgatgggggcttggctgtggccttatgattggacgaccgggcttgaccttgtgagggcactagggcacctgtcctccgggggggtggtcctgggtgggctagtggcccagaaagggtcggcagcacttggagtgggagcaccaaaggtgtggacactggctgagagttgtgtgtgttcctgtggggctgggccaggagtgggggagggctccctgagacaagccccctcaccgccagcctggctgccgccacctgaccttgggagggagcagcgtgtgccagatgaccagagggctcccagcactcccacggcccagcggggagcatctctggggagggcggtcatgaggggaggcctggggcagcagcagagggtgggggacgtggccctggcatcttggcgaatcctgctctggagacagggtgggcacagctctgtggtcagaggcctgggggccactgctggtgttgtgctggggcaggggatggagcaggggtgcctctgcctcttgggtgtcacctcctcccctggagcacctgagggctggctgtgtgtctctccagtcccgcagcgtggacaagcagcatgccgtcatcaactacgaccaggacagggacgagcactgggtgaaggacctgggcagcctcaatggggtaagtgtgagaggccctggcctggccttttaacagctcgacccttcagccctggcccctccctctcagtt

SEQ ID NO: 15246 - DNA, 1035 bp, Homo sapiens
gcctgacgcccagcgccagggagagccctacccaggttggtcttggggccaggctggtgagaccctgagggctcccagagggtggtgtgtgaaggggatggcctgggcttgaggagcccactccgggggacatggggcctgtctccccctcttgggtggagtggatggtcctggctgaggagggtggtggcaggtggttaccctgaggcccggtctgaagacatcttcccacaccagagcgccccaagggaccagtgcagcaggacggggagctccacggcttccgcgcccctgctgagcctcagggctgctcgttccggcgggagcccagctacttcgagatccccacgaaggagaccccgcagccgtcgcagccccccgaggtgccggcacacgagatgcccacgaaggatgcagaggcaggtgggggcggagcggcccctgtggtgcagagccacgcctccttcaccatcgagtttgatgactgcagccctggcaagatgaagatcaaggaccatatcaccaagttttccctgcgccagcggcggcccccgggcaaggaggccacacctggcgagatggtgtcggctgagaccaaggtggccgactggctggtgcagaatgacccgagcctgctgcaccgggttggccctggggatgaccgccacagcaccaagagcgacctgcctgtccacacccgcaccctgaagggtgagtgcccagctggcggccgtgccagtcccgggacaggcaggggaccggactttggctgggtctgcactgttgccatgcagaggggcccattcagctgggttgacttcccatttttcagttaattgcctaagagccacctgcctggtcaggagtccggtcctgcgtcttcccgttgcacttctttgccctgtgtgggggggccctgagggctggggtgctttgtcaactcagctaaggcatggggtgatgaggctgcctgagatcgacagctgtttcctttctctcggcctgacaaggtggggtcccctgtctcccccaggc

SEQ ID NO: 15247 - DNA, 1059 bp, Homo sapiens
gatcttcgataacctgatgctgaacccggtgtcccagctgtcgcaggccatccgtgagaacacagagcaccttgccgagaagatgaagtgagtcggcttcctggctgaggtggacgcccagacaccagcacagctgcatgagctgagactcagcctggctgaatccctcaagggcagcggtttcatgggtactcgtgtgcacctgtggagcagccctcccgtgtgcacgtgtatgtggctcccagcaggcagaccctgaactcagaggagccagcgcctccagggcggcccttcctccccttctcccctagccctcatcccgggcccagccctccccaccgccgagtgtcaggcacagatgggactttggtgcccttcatgcatcaggcctcagtttcccccttaggcccaggtgggctgggatgaacttcaccatggcagaggaggtctgggagaattgtgcctcagctctgtcatctctgtccttgtccccccatttctgcctccccctacctcggacaggatcctctttcagaacacagggagagcttgggaggacctggaagccaggatcaacgccgagaacgaggtgcccatcctgaagacatctaacaaggtgagcgctggggccccgtgccccttggcctgcccccagccagcctgcctttgcctggctggccccaaaccttgtcccagctcctgcacacagagccccggggcagggctgcagcccgtcagaagttgactccacctcccttcctgccacgtttccaggaaatcagctccatcctgaaggaactgaggcgggtgcagaaacagctggaaggtgagtgtggcccaagcctggggcagcaagggaggctggcagggccttgtggggaaccctgactcacagggtgggagcaggtgaactggatccgcagcctgaccctccctccccacctccagttatcaatgccatcgtggaccccagtgggagcctggacctgctcacaggaaacaggagcttggccagctctgcacagccggggctggggaagggccgcgtggctgcccaga

SEQ ID NO: 15248 - DNA, 1049 bp, Homo sapiens
ccctctaacgagcctgtcctgcccttcagtggaggctgggttttgggtcaggctgctctggagtccttcccatggaggaatcgctgctgtccccacaccacgggtgcgtcctgtgatgggttcgtgtctgcatcctgctcagcacgtgctctggcccaggattggctgagcaggagcaggacaggtgtcagttctgtgaaggggctagcgacaatacccgagcagggcgggggcagcacccagaggtcagaggggtggctggagttccctggaggggaaagaaggggaagtacctcaaaaggaaaagaaacagccaagcagcagcccaccttgctccagagaacccagcgttccaaggaggctgcagtagggcgtgggggcctgggagaagacaccccaggctgaggcctcggactttctcatggaccctttcggggctgcaagattggctctgggagaaggggcagcccagggccccagaccagtttgtctcttttgcttcagaactttccccatcgtggggttgtgttcaggggtccaggggctgcgggcgtgagtggtgcttggggcatgtgaagctgggttgctgcctgcctggggcctgggaaggtcagccagcgcagcccctcattgggagccggagatgccagagccccccagcccctcttcttcccactttgtccccctgctcctggggcttggggctgggacagtgggggtgcccacttgtagctggttcccccacacccccaggcccagcctgcaggcctcctgtctcccaggtcaagcgctaggtcccccagatcctcacacacccccacttacgcatccaggacaagtgccaagtactactctgggctcagccctccctgctaccccaggagatgggagcgtggagggtacaggaagcagcagtggcgtcccgaggcctcgcttctccgtgccgccgcagggcctcagacaagctttgcagtcttcccgattccttcggcaaaccacggacagcacgggtggaccgggcctccaggctgcacttcccagggccctgg

SEQ ID NO: 15249 - DNA, 1047 bp, Homo sapiens
aaggtgagacttgggtggggacacagtggaacatgaagtgtgccacgctgggtggatgacgccctcctccccccgccaccgagagctgcaggccacatgattccttttgggtagcactcgggaaagggcagaatgtacaggaacagagtgagattcgcagggcctggggctgagggaggggacgcactagaggaaggcaaaggggagcctcctgggtgtggggagcactttctgtcttggttttggtggtggctgcacagtggcccacacccgtcagagctcacctgcctgcacccaggccctccgtgcaccctggcagcccagatgactgcaccagcccaggggaggtggaggaatgccacacgcaccggtacctggggaccgggggtcctcggtgatcatcccgagctccaagacagaagctggactacagccgtgctgagtggaggggtttggtggctgggtgcccgcctcctattgctcctgcagactctggggtctcgggcgcccccagtggggcaatgtgggctgctgcagggaactcacgcgtgcctggcacccgtgcaggtcctggactcggagcaggaccctgcggagcacatccccgaggcagaggaggacctggacctcctgtatgacaccctggacatggagcaccccagcgacagcggccccgacatggaggatgacgacagcgtcctcagcacccccaagccgaagctgcggtgagccctacagggcggggcggggaggaacagccatttcagatgccccggccactctgcgaccactctggcagacccatgtccagccctggagacggggtgggcagggccagctgcctcgaagcctgggaaggctctggtggctggaaggaggggtgtgcggctgcctggcaggcccaggctacggctgcactgagccaggcagctttcctttcataggccagggggtgcaagctctgggctggggaggaccgagaggggtcccccagggtgctggctgggctgggtgtggcaccccgttgtaggggatccgtctctgggg

SEQ ID NO: 15250 - DNA, 1045 bp, Homo sapiens
ggaaaggcatgggtggcctggatcagcctggatcagcctgggtggtccggaaaggcatggatggtctggataggcctggatggtcgggaagggcctgggtggtccggaaaggcatggatggcctggatctgcctgagtggtctggaaaggcctggatggtctggatttgcctgagtggtctggaaaggcatgggtggcctgcatcagtgtggatagtgtggaaaggcctgggtggtccggaaaggcctggatagtctggataggcctggatggtttggaaggacctggatgggcctgggtggtctgatctgcctggtgggtccggaagggcctgcttcatctgatgtgcccttgttgttttgtcgagcatgttcacctgtttgctgcaggctggctgcagatcccagggctgccctccagcaggattggccagtggagctctccccagagccccttcgtgtttgtggcagccttgcctggagctaaggctgcgagtttcaggggtgtgtgtttcctgcagctgatgtcagggcaggtggaagaaccaggacggggcagccaggttggcccagcgcttagtgttgccagctccagaatcattctgtgccctgtgctgcagctggtgcgagcggggtgtgcgctgacacgggctcttctctggacccagctctgctctgccgttggattctgcagtctgtccctccaggtgtggtgggagaactgcgctttcagtgcaagaagggtcctggaaattaacgtgtcccccacccctgttccctgagccaggccatactttgaaggcctgtcgcactcgagctcgcagacggagattgggagcatccacagcgcccgcagccacaaggagcccccaagcccggtgagtggggccacactgatctcccagagcagaccgtggtctgactgggctgtggtgtggcccaaatctcccagcatgtcctgggcccagggccctgtccagctgtcctggagccactctgcacccactgtccagcacactgccacgcaggtaccccgggcctccctg

SEQ ID NO: 15251 - DNA, 1057 bp, Homo sapiens
cccagcttggtggggaagtggaaatgcaagccggacagggctgagctggctgtgtgggcgtcgggcacctaggatggcagagtgaatccctccgtggagctgtgccctctggcctgtcctcctgaccatgggtgcacagagacccctttgtccttccagcatgtcagcatgtcagaaggggcccaggcgttggtcctgggggccaggccagggctggcagtggttggagatgggtggggccgggacacacagggcagggctgtccggcagggccatccggcagggccgcggccccagggctgcgccaggttctcaggccaagagggagctgtgcccaccaggcggggctgtgccctgaggagagcttaactgtctgtttccttgctcttagccctgacgaagagtcctcccaaaagttcattccctttgtcggggtgagtactggccagctttatgtgatgggaaaccgcacacctgccaacttgtcgtttacagtcagaacgtttggggattgactcgatatattccagaaccttcccacagatacgagctggggatttgccttcccatctggcctgtctcaaagctcgcttccttccctgctggagtggggtgtggggccagaggttgttagttccccttagctctgccttgggggctgataaatggaagcagagacaggtcggtggggcgaggcctcagaacacccaggaggcttggccccacgtctcaggagaggagagactgcctgcccgggttggggagggcgcctctgtcctttaggagcccaaggccccgggagcttcccagtgctcacttgggctgcagcctgcagtgtgtgggtttcacttcctgccctgcccagggttagggctgcttctgccagccaggccatctccctgccagccctgggtctccacagcctgtttcctgccatcttttcgctctgttgtgtggcctccctcccgccaggtgtctgctgtgagacagacccacagggcctggcagacaggttgcccaggcagcggaagggtctctgggcctcggtttccccact

SEQ ID NO: 15252 - DNA, 1052 bp, Homo sapiens
ataaatgaagttgtatgtaaataaaagaagattgtaacccaaggacaaaggaattttgaaatctgtaaataaagttcagtaacaacaggtggaaaatcacatgattatctcaatagatgttgaaaagtaatactaataaattccagtatctttccttaagaacaaaagaagtcgcagccataaaaaaggatgagttcatgtcctttgtagggacatggatgaagctggaaaccatcattctcagcaaactatcgcaaggacaaaaaaccagatgctgcatgttctcactcataggtgggaattgaacaatgacaacacttggacacaggaaggggaacatcacacaccggggactcttgtggggtggggggaggggggagggatagcattaggagatacacctaatgctaaatgacgagttaatgggtgcagcacaccaacatggcacatggatacatatgtaacaaacctgcatgttgtgcacatgtaccctagaacttaaaagtataatttaaaaaaaaccgaagtatagaaacctgtaggttctggataagatgggaagagatggacatctccatagcctgacggaggggagctctcaagagcttgcagtggccaccaatggaagtatttcagatgcaagcagatggatgcatggtaccactatgacgtcagaaaaatcgccaggtgcggtggctcatgcctgtaatcccaacaattcaggaggccgaggcaggcggatcacctgaggtcgagagttggagaccatcctggcaaatgggatgaaaccccgtctctattaaaaatacaaaaactagctgggcatggtggtgggtgcctataatcccagctacttgggaggctgaggcaggagaattgcttgaacctgggagttggaggatgcagtgagccgagattccgccaccacactccagcctgggcgacagagggagactgtctcaaaaaagtaaataaacagtattctggaaaccgaagcccttatagtaaatcaagaaaatgagatgtgtaaatatctgaaaagatgacaatca

SEQ ID NO: 15253 - DNA, 1086 bp, Homo sapiens
gtatagttagaagacggtagagtgcgggtccgtctctcaaaaaaatgcacacacaaaaaacattaaacccaaaccatgtgagcactgagagagtatatgagagaatatttgggatctggaagtgataagtgcctttcgtaggccaaacacaaaatccttgaaggaaaagcctgacaaatctaactacagagtttttaaacatttctgtgcaatcaaagacacaaaaatgttaaacgacagcctggaagaaaatacttgtaatatttataacattcaaatgtttaccaaccagaatctatgaagagatgcttgaaagcaatgaggaaactatttttaaaactggatagaaaagtgggccaggcacagtggttcactgctgtaaatcccagcacttcaggaggccaaggcaggaggatcacttaaggccaggagttcaagaccagtctggacagcatagtgaaaccctatctctgcaaaaaataaaaattagcccgggtggcgtgccactgtaggctcccagctgctcgggaggcagaacaagaccctgtatctttaaaaaaaaggaggaaaaaaatgaattaagtctacgtacttgcagttcctaaaaaaaaaaaaaaggaactaaatgaaacagtgaaaaagttggcaaaaattataaaggtggatctatgtggagttggtgaggatgtaaggaaagagtaagtctgttttattggtttttcaaagagcccattgtgatcattattcaccatttttaaattttaatttagtcattaatctttcctaatttcatctttaagctttcagaccatttcttttgctgttctttttgtatcttttcaaataatttgcacggtcatggtttggggacctttttctaaagatgtatttaaagctccagcttctcgcagcacagctttgaccatacctcacgttttggtgtgtcctgatttcatcgttcgtttctcagccaccatgtctggctaatttcttaattttttttttttttttttgagacagtctcactctgtcacccaggctggagtgcagtggcgtgatcttggctcactgcagcctccacctctt

SEQ ID NO: 15254 - DNA, 1019 bp, Homo sapiens
gcctcagcctcccaagtagctgggactacaggcgcccgccaccatgcctggctaatgttttgtaatttttttttttttgtagagacggggtttcactgtgttagccagtatggtctcgatctcctgaccttgtgacccacccgcctcagcctctcaaagtattgggattacaggcgtgagccactgcgtctggcttttttttttgtttttgagacagtctcactctgtcacccaggctggagtgcagtggcacaatcgcggctcactgcaacctccgcctcctgggttctagtgatttgcctgcctcagccccctgagtagctgggattacaggtgtgcaccaccacacctggctagtttttgtgtttttagtagagacagggtttcaccatctaggccaggctggtctcgaactcctgacctcaagtgatccacccgcctcggcctcccaaagtgctgggattacaggcgtgagccacggtgcctggccccatattgttctgagtggagaatttgatcgttaagctctcagaataataaaaaagtagctgtcagtgagagatgttggaatatatggtccaatgaagcacatccctcgcgcccgacccgccctggcagtgccgttcccgcccgtgtgtgtgggttctgggtgtcaaaactgctgcagtggccctgcaggcatcctacctagaggtgggtccccagctgcgcatctggacgctggtcagcaggtgaggctgggatgccagaggaggtgccgtgtgcctggccaggtacccgggaggcggcttgggggagcactggctgcagggcctccttcctcctcctgctgaacttggagtgctcttgccagattatgggctgagtcctgctagggagggtggccccccttccccaggaggagcccaccctgagacctggttggggggcagcttagaccctaccttagactccagcaggctgtcttgggagcatgtaattatgttttttttgagacagggtctcctgttgcccaggct

SEQ ID NO: 15255 - DNA, 1030 bp, Homo sapiens
tcgtgttgctggtgtctccacccccacccccaccccagctggcctgctccattcctgtcccggtgggctcatgtctgagtgtgcggactgggggatcttggtggcgatggagccaagcccagggaggctggggccaccctcatagtgcaaggccacccagcacctcgcccctataccccacccgccccaccaatgtgcccccggcacccccgagcccaggccccaaggcttgcttctatgggctttgcaccaccctctaggctgctcccgcctgggccatgcagcgcacctgaggggtctgaggtgaccgctcctcagagccgcccggcagcctccctggggcgggcctcagcactgcagccccgtgatccggcctggcgtgggctttgctgctttctctgcccggtggcctgaggagctcgagtgcccgcctgcccccagagccctttcacggtcagggcctgagctctgtgggtgccattaggaggagggtctgcagatctgtgcggttgggggacccctggggcatggaggggaccacgcgtcccttcccgtccgtgccctgccaggctgtcctcacagcagcgtcgtcacaggggaggaaaccagggcagcggcagcggctcctggtaccaagcataccttaaaaatgagcccatggatgttgcagtgagccgagatcacgccactgcactccagcctgggtgacagagcgagacttcgtctcacaaaaaaaaaaaaaaaaaaaaagagcctcaaggcctgtgcagttggtcagcggtggagtcaggtatggggcacacctgattctgccctggctcatcccctgccttcagaggacagcaagggcgcagcgcacgtgggggctggccctgaggtgtggcgttctctgggctgggctagggcagttctgagggaggggcgtgttctgtcccattcctccaggagacacagtgcctgggccatctggccacttgcatgagggaacgtctgtctgcatcccctgggggccgctgtccccatcccttga

SEQ ID NO: 15256 - DNA, 1049 bp, Homo sapiens
gagctggccctttccaggaaagggagtagcgaggctgctcacttagagccacgcacctggggctgacagtgtgcctggcagtacctgtgtggaaagacagttacagaggaaacacatgaactcactataagccagcactaatggatgcacctttgttgttgattttggtgataaagaacattaaatttgaacccagtgaagcaatatgtcatctcccaaaacaagtcctctcatgagtgcatctgtattatagaaagctgcactcagctttttaaaaaaatttttttagatggggtcttgctctgtcaccaggctggagtgcagtggcacaatctcggctcactgcaagctccgcctcccaggttcaagcgattcccctgcctcagcctcccacgtagctgggactacaggtgcgtgccaccacacctggctaattttttgtatttcagtagagacaggctttcaccatgttggccaggatggtctcgatctcctgaagtgatctgcccgcctcctgaagtgctggcattacaggtgtgagccactgcgcctggcccagttattttgatttcatcagtatgaaatgtgtagaaattgttacattagtccctatgtaatatccttggtgtggcctcttggcctgcacagcctggagtattgactatctggacctttataggaagctcaccaacatgtattttaacccttgacaccttatctgttaccatttatttagatctttgctgatttttctcaccagtgttttgtacttttcagcatgtagatctttgcacagatcttttgatctttaaacatctatagatcttttgtaaaatttatattgtaagtatttaatttttcttggtgctcttgtgaatagtacttttacaattttgatttccatttgttagtagtacgtagaaagaggactttttttttttttttttttttgagacagagtttcactcttgttacccaggctggagtgcagtgaatggcgtgatctcagctcaccgcaacctccgcctcccgggttcaagcgattgtcc

SEQ ID NO: 15257 - DNA, 1027 bp, Homo sapiens
agttatatttagagatggcatctcactctgtcacccaggcttgagtgcagtggtaccatcatggctcactgcagccccaaactcctgggcttaagcgatccttctgccttagcccccaagcagctgggactacaggcacatgctaccacacctgcataattaaaaataatttttttttagagatggggtcctgtgatgttgcctaagctggtctcaaactcctggactgaagcaatcctcctgatttcttgtgtgtctttggttttggtatcagggcaatggcgttctcactgtcagctggggagtgttccctccttttctgttttctggaagagttgtgtagaattggtgttaatttttccttaaatgtttgatagacttcaccaatgaagccatctgggcgcagagttcttgttgttgtatttccgtagtatggatagggttacctgtttcttcttgaatgagctttggtgtttatatctttcaagcaattggttcatttcatttaagttgtcaagttctgtggcataaagtcctccataatactccttacaccccttctcgtgtcagtaggatccgtagtgatgtcccatctgtcgttcctgatgttggttacttgtggcttctctctttgtttctttgtcagtctggctatagatttcagtttattgatcttgttaataaccagcttgtaggctgggcatggtggctcatgcctgtaatctcagcactttgggagactgaggcaggtggatcacctgaggtcaggagtttgagaccagcctggccaacatggtgaaaccccgtctctactaaaaatacaaaaattaactgggcgtggtggtaggctcctgtaatcccagctactcgggaggttgaggcagaagaatcacttgaacccgggaggcggaggttgcagtgagctgagatcgctccattgcactccatccagcctgggcaacaagagcgaaacttcatctcaaacaagcaaacactcagcttttggttcctctgatattttcccctc

SEQ ID NO: 15258 - DNA, 1033 bp, Homo sapiens
cgcgcctttccaacacgagggaggcgcaggttcctcccgcccaggaagatgcggcccctggtgcaggcagcaagcagggtggaccccagctctgggaggggcctcgcaggcgccctgatatgagccctttctctttgggagctctgctgccgagcactttagggaagaatctgtgatgattccatgaaaaactaggcaagtggagaaaaaagacgattgttaatctcaggaagcaaaggtgttcgaaggaagagaagaaagaatggcctagtgtggcctcaccgcctttacctgtgtgtgcaggagcgtctcagaacagaccccgagtgtgactgagtccgctgtgtgcaggaacacaacacaacagaacagaccccgagtgtgactgagtccgctgtgtgcaggaacacagcagaacacaacagaccccgagtgtgactgagtccgctgtgtgcaggaacacaacacaacagaacagaccccgagtgtgactgagtccactgtgtgcaggaacacagcagaacagaccttgagcgtcatggaatgcacacagtgatcctggagggtggggtgcatgtgtggcaatgggaggcctggcctgaggcgctgagctggtgggaacctgaatgcggaagagcctggccccacggtcccagctgcccgggtggggtggctgcggtcatgtgttcttgcagggttcatggctcgctgagacattggatggtctgtgtgtgtcactgtgatcagatgtggatgtaaccccactgcggtggagcctgtcagggacacaggagccaacaaagcgagaacccggcggccagggtagggacagctcgacctgcaggagggtcaggccacattggatcatgacttgaagcagagcatggtggtccctgggttcacaccaccatagtgagcagatacagatgcgaaggggagaggagatgcacgtcccaaacagaggaattccaccctcgagaacgcccggctcccggcaggctgtgcagagcaactgagcacttttctctttatt

SEQ ID NO: 15259 - DNA, 1026 bp, Homo sapiens
aacgtggaggccaaagtggtgtgcttctaccggaggcgggacatctccagcaccctcatcgccctggccgacaagcacgcaagtgagtccggccttccctggggtgcccgcctggcgggagggtcggctggggagggctggcggggtccttcttccctagggcccatcggcatcctggcctcgtggggccaccctctgcccaactcactctggcgtctctttttctcccttccacagtgggcgggggtgtcctggctccgtttcctcgggggctgggtgaatgaagtcctcgcacgccccccggagtggtctgtctctcactggcatcctctgcaagcttgtcatggtgtggctgggtgtgggcatcattgatcgaggcttctttttcccttctatgatgacttctggagactttccaggctggtgggaccctgctgcctgcacttgccaatgtctctctctttttaattttgcggagaggcttctgttgggattctgagtagtgttttcaggaaagcagtcctctccttattctttacgattcaaacccaagtttagtaacctggctgggaggggctgctgtggccagcacagcgtgtgggaggaagccactggctgcatgggaatgccctcagccttggggacccagcttctcccccgggaacaggtgctcgcaggtggtggagtctcctgtgccgggggatgttgacttcagagccaggagccagaggcacccccacgccctccacatgctactgacacagggcctgccgagctgggccccacctgcaccagacacagtgtggtaccccactgaggcccttcatgtgtcggtgggggcaggcatgaggggcatttttggcttccactctgacacatcacctggggtgggatctgagcccaggctgaggctgtggtctgtagggtgacatttcccagtaggtgaggcatgtgactgcccgggtacccgtgtcgctggggtgggccaaggtcccacctgtaacctcccacgacccctaatggggt

SEQ ID NO: 15260 - DNA, 1045 bp, Homo sapiens
tgtggctggcccaaagggagctgccagttgaccatgggctttctctggctttgtgaggaactggacctcctagctctctgctcagaggaggggagcgttcaaggtggggcatggtgatccttgacctctgaccccaaagcctgtgtactccactgctgcactcggcgggctccaggcaccaaggaggagagctggggatgttgaaggtccacaggctacacattctggaggggtgtttggtgtggcccttggccctgcaggtgctgggtgccagtcagcagcacggctggcggttcttagtgttggaggctggcctatgtcgactctgcagggctggcccgctggagaagcagtggtggggagcggcctggctcgctggagaagcagtggtggggagcgggctggcccgctggagaagcagtgcccaggctgagcggccgcagtgtggccctgccagtctgtgtggcctggggagtcaggcgccaccgttgagttgggcatgtttatggctggcccagggtggatcctgtctctgtcctctggcacctgggggcacagtgtccctgctccagagagcctgtatcagtggtttagtggtttttgagggtactgtggcccccttggctgaggttctgctctcagacgccccagaggatggccttttgctggaagagccccagaaggggactccagacataacgtgattagaggtatcagagggcaggttttccagaagggcctcgttggggctgataggactgggtggagagcagtgtcccagctcgagcactggcccccccaggtacacagcacagcccctttggacggtgctccctggaaagctgcgtggcggcccctctgcagggcgttcctatgaactgagagcccagctgcagggagcaggcgtcatgggtgatgggtctgccgctggtccagggactcagagcgcggccccactcttgcctggcggctgggccttgcggtgattctgcagggcccacaccccccggggttgtgtcaatctccgtttctcctgcttctctgt

SEQ ID NO: 15261 - DNA, 1050 bp, Homo sapiens
ccccggcctgagggtgacctgctggtgtgggaggtctgtggtgggctgtatggggctgtctggccacgagatggggacggacagagggcggctgcccctcgccctcctggcctgggctcttggcagccgccgactcccccgctcctcttgctcttgcctgctgcttctggggctggcccggaccttgttctccctcctccttccatcttcatgccctggggagtctgggcctttagggtgcctggacttaaagggcacgtgggcaccagagtgtctgcaggggtacctgccaaggagccgccgggccgccatagggtggggcagtgggacagtgtccggcagcaggaggaggcacgcctcccaggactgggcctcctgcgtgctggcgccaggtggggctggtggggtgggccttggtctggcagtgtgcgtctgccgcggtgctgacaggggctccttgtccttcaggggaaatagaagaggaaatggagaacccggaaatggtggacctgcccgagaaactaaagcaccagctgcggcatcgggagctgttcctctcccggcagctggagtctctgcccgccacgcacatcaggtagcccccagcagctcccgccctgggcccctcgggctgccctcgcctttccagcctgcccgtccttctcttccaggggcaagtgcagcgtcaccctgctcaacgagaccgagtcgctcaagtcctacctggagcgggaggtgaggcccagcccggcctggtctgccgcagccagtcccgggccactgtttcctctacctatgacctctgctggcctgggcggcggagacgattttccctcctccctctaggcccaggctgttctggggggaagcggggattgcgtcctgactgtcacttccaggtgtcctggtgtgtggccgcccccaccctacgcgtccagagttgtgggccaggagcttggagctctttcctcttgccactgccacccagacagccagcgaggggaggtccccctggggagggtgtggctgaggcaggtgggggcaggggcc

SEQ ID NO: 15262 - DNA, 2058 bp, Homo sapiens
ctgctgcacgatgcagcccttcccccctttttctttttctttttttgttttttttttttttttttttttttgagacagagtttcgctcttgttgcccaggctggagtacagtggcgcgatctcagctcactgcaacctccgcctcccgggttcaagcgattctcctgtctcagcctcccgagtagctgggattacagacgtgtgtcaccatgtccggctaattttttgtatttttagtagaaatggggtttcaccatgttagccgggctggtctcaaactcctgacctcaggtgatcatcccgcctctgcctcccgaactgttgggattacaggcatgagccactgcgcccagccacttccctcttctttcttacctggggtttctgaacagccccaatatgggaatttaatgtaacaggctcagggtgagtacacttagcacctggcagaagcttgtgccactggcccctgggcgatcgtgcccctgcctcgcctcaaataaccctcactgatgaagtcctgataaacacaggctcatgtcacagataagcaagagtgcagaaacagcacacagcagtcacagacacacccaggccctgaccagtggcgcagtccggcaccaaatagaaaccacttgtgtttattaatttaaagaaacaggccgggtacagtggctcatgcctgtaatcccagcactttgggaggccaaggccgggggaatcacttgagctcaggagttcaagagcagcctgggcatcatagtgagacctcacctctacaaaagtaaaaaacattagccaggcgtggtggtgcacacttactgttgtcccagctactcaggaggctgaggtgggaggattgcttgagtcaagaggcggaggcttcactgaagcaagatcgcaccactgtactctatcttgggtgatagagcaagaccctatctccaaaaaaaataaaagatccaggcagagtaggagctgaggctgaggctggcagctggcctctggatagtcgtgtcagttcaagaggacgaaggccctgaagcatggctcgtggtcacacatggagcaggtgtcatgctggactttaaaggtagctcttgaaagaaaacacgcagagtagctttcagaataggagagacagggaaagcgggtaagggctggaaaagacgacccacaggaatcaggaggatgacctggaaacgggagggtgattggacgccaggcacacatgcagaagaaagtgcagccctggctgaggccaggtgctcaggctgggactccagggtcaggcccggacaggcctgcttcaaaaatcatcagaaccagcccagtgcaggacacacaatgccggacagcaaaaggttggcaaaggccatgtcctggaaatgccatcccagaggcagcctgggggccctggtgtgaggttgcctgagatggaatgctggcgggaagggccgcgcctgctgcgcgggtggcggccggcggtgctgagcctggaatgctccgtagcgctccagcggtggccgctcctccaaggttgtgcccagaactcctgatttctgttgctcttaaacaccttggataagttacatcttcacattgctgctgctgatagggatggctttgtagccgggcatagcacacgcctgtagtctcaactacttggaggctgaggtgggaggatcacttgaacccaggaggcggaggccacagtgagctgtgattgcactgctgcactccagcctgggcgacggagcgagaccatgtttcgaaaaaggaaaataagtctgctgggcgcagtggctgacgccagtaattccagcactttgggaggccgaggcgggtggatcacctgagctcaggagtttgagaacagcctggccaacatggtgaaactctgtctctactgaaaatacaaaatattagctaggtgtggtggtgggcacctgtaatcccagctacttggaaggctgaggcaggagaattgcttgaacccgggaaacggaggttgcagtgagccgagatcacgccattgcactccaacctgggcgacaa

SEQ ID NO: 15263 - DNA, 1088 bp, Homo sapiens
ggggcggcaggtgtaggcctgggctctgtccacatgggtgatgcgtgtaggctggtgtcccggagccttcccccacccactcctggtggtgttggggttctggggaagcctcagaccctcaggcaggacgtggtgatcagctgtccttgcacagtgacacctggtttccttctggcagttgtttttctttttcttttttttcagacggagtctcgctctgttgcccaggctggagtgcagtggggtgatctcggctcactgcaacctccgcctcccaggttcaagcgattctcctgcctcagcctcccgagtagctgggattacaggcgcccgccatcacgcccggctaatttttttatttttagtagagacggggtttcaccgtgttggccacgttggtcttgaactcttgacctcaggcctcccaaggtgctgggattacaggcgtgagccaccgagtctggccttggcagttatttttcattactttttcttttttttggacaaggtctggctctgtcgcccaggctggaatgcagtggtgcaatcacagctcactgcagcctcgacctcccaggctcagatgatcctcccacctcagcctcctcagtagctggaactacaggggcaccaccacacccccctagtttttttgtatttttattagagacagggtttcgccatgttgcccaggttggtctcaaacccctgaactcaagtgatctacctgcttcgacctcccaaactgctgggattacatgtgtgagccactgcacctggcctcattttttaaagttctttttgcctccagaaattttcttctgtgtgaatctgcccacgtttcttgtcttgcctgtgggtgccccacccttgaggcctgctggggccgtggagctccgacgcagtgctcaccccggatgctggcagcctcctccctccaccgggtgcttcggtagccctggtgggaggtcctggggctcactgtccccttctcagccctgtccctcatctccccgctgggcaaggccgcgaggctgccctcgagacgcagggctctgcccccgagggtgggcggggactcgcctccc

SEQ ID NO: 15264 - DNA, 1055 bp, Homo sapiens
tagtctcaagagctctctccatgctggacctgcagccgggcgccccagtggagggcagccccgcactccgtggtccttggtctggaacctcggtgctgcccagggctggaggggagctgcttgcagagtctgagcctggcaccctgcactgagctatggaggcggctgagaggtggacagaggacaattgtggagctctttctccaagtcctcccccaggagtcaggctcagccatgctcagacacacattctcctgagggtgtctcccaacaccacggtcttgttttttggcgagtaaaaggctgtttcgtcagaaaccctcctggccctggccgactgcaggcgtcaggtggcctcttcaccagccttgagttctccatcgtcccagctcccagaagacaggaaacaactggtgactccagaggcacgcccactccctggcccccggctctggctgtgccaggcttagccgcagctgccccagaaccccctggggtggaagaggggccaggagggagcctgtgcccccagaaggtccctggaggtggtctgcctgctgctgtgacgtggcagggccctcttgcaacagcatgtgaacccaagtatctcaaaataaaaagcttgggccgggcacggtggctcacgcctatgatcccaacactttgggaggctaaggcggatggatcacctgaggtcaagagttcgagaccagcctgggcaacatggtgaaaccccgtgtctactgaaaatacaaaaattagctgggcatggtgtcggtgcctgtggtcccagctactcaggaggctgaggcaggagaatcgcttgaacctgggaggcggaggttgtagtgagccaagatcgtaccactgtattccagcctgggcgacagagtgagactccgtctcaaaaaataataataataataataataatataaataaataaataaaaaggcttgatttaaatttacaaaccaaccttcccatctcttgtggccacagttcttggagccctgcattctgggtgggctgggaggccccttgcgtgtgcaccc

SEQ ID NO: 15265 - DNA, 1367 bp, Homo sapiens
ggcgtggggtctcccttccctgtacctccacctcaggacccccaccctccaaccgtcagccctcctaaaatacttctaaattaatctgttagaagagcatccctatgtgggggtggtggggcccccaaccatcagccctggggaggtggagactgtggcagggcagggaggagccccaaaggggccgggacacagcggggtggctagtatctgatgaaagcaccatccgggcagcagcgcacaggccagcgcagcagaggctggagacgcatctggaattcggaagaaacaaacatggggttgggtagggtgcctagacctgaagaggaggagggacagcagccagctgtgaggctcctgaggacgcatctgctgggggcaggagtgcagctttgtgtgggggcctctggccaaggggagagcttggccgggcgggaggagtccctgactgtccctggggccagcggcctctccaaggcggatacggatctctccaggcttaaaaacaaaccaagatgagcagaacatgttcagacaagaggacgagggctagaaacaaaattcaccaactaggctcagaccagggcggaatttgagggagaccctgctgcacatggttccagcggaggagaccccagtgctgagcccacgtgatgcctagcgaggcagcgctcaggggactgcggctgcggggccatgcccaggcacggtctcggggggctgcggctgcggggccctgtccaggtgcggggatgggaggctgcagcttcggggctgtgtcgagggagcaggccccgctctccttcctgccagatgcagtggaccagactgaggaactatctgaacccttatttaataagacaggtttcttaaatccatgccacagcccgggcgcagtggctcatgcctgtaatcctagcactttgggaggccgaggcaggaggatcatgaggtcaggagatcaagaccatcctggccaacatggtgaaacgccatgtctactaaaaatacaaaaattagtcgggcatggtggcaggctcctgtagtcccagctactcgggagacagaggcaggagaatcacttgaacccccgggggtggaagttgctgtgagccgagatcgcaccactgcactccagcctgggcgacagtgcgagactctgtctcaaaaacaaaaatggctgagatggccgggcatggtggcttatgcctataatcccatttgggaggccgaagtgggtggaccacttgaggtcaggagttcgagaccggcctggccaacatggtgaaaccacgtctgtactaaaaatacaaaaattagccgggtgtgttgagaggtgcctgtagtcccagctactcaggagacag

SEQ ID NO: 15266 - DNA, 1035 bp, Homo sapiens
cgcccgggcacccgccgtgcgtgctgacgctgtcttctctccctctctcccaccccggcgctgccaggcaacatgaagaagcgcctcttgatgcccagtaggggtaaggcctggagccgcgggcgggcgctgcgccggccccgcccgtgatgcctgtgctgtgctgctctgtgtccccgcggcgggcggcccagggcccatgcttggggcagtccacgtgagccaggccacagcccagttccccacattcctcccgacatcactggtcccttggtgaagaccccccgagcccaggcatctggccctcggccccctggccccgcctcctgtcagtggactgtcctggcacgtgtggccctggcgcccctgcctgcgctgtctgccatcgcgctgtgactgcccgcatgctgccagcctcagctcgtggggccgcccgtgctgtgcctgcaatccttccgtgcgcctgccaggcgggacagtggggagggtggtcgggggtgtctgtgtgggccgtgggcaactgagcttgtacacatgggtgccttctgtcggaggactggctcaggtgctctgtgccggttgcttggagcaggggctgcgggaccccaggccccttggggaagagcagataggaccaagcctagcatgaggaggccaggtgtgtggggcccgggtgtgcaagtgctgggcctgccagtgtggatgtgcctggagccccttcgccaggcggctttcactgacggtgctggccagggcagcagggccggtttggcgacctggaggtggatatgggtagtggctgcccagcccagccaaccctgtccccttggggcattctctcgaggctgctgggtgtcctggcaggcacgtcctgtggggtcagcacgccggctgcagcgcagggtgggcctgagatcgggtgccgggccccccatctccacctgtctggacacgcacccctggcctgtccttgcagcttcctcccgacatcccttggcggtgtctgtgtctcggccccagccccagccctccttt

SEQ ID NO: 15267 - DNA, 1051 bp, Homo sapiens
agcggcggcggatgaactggatcgacgccccggatgacgtgttctacatggccacagaggagaccaggtggggccttcccagggcaggcgggagggctccgcacagcgtcccggccctcaccaccacctctgcccacaggaagatccgcaagctgctctcatcctcggaaaccaagcgtgctgcccgccggccctacaagcccatcgccctgcgccagagccaggccctgccgccgcggccaccgccacctgcgcccgtcaacgacgagcccatcgtcatcgaggactaggggccgcccccacctgcggccgccccccgcccctcgcccgcccacacggccccttcccagccagcccgccgcccgcccctcagtttggtagtgccccacctcccgccctcacctgcagagaaacgcgctccttggcggacactgggggaggagaggaagaagcgcggctaacttattccgagaatgccgaggagttgtcgtttttagctttgtgtttactttttggctggagcggagatgaggggccaccccgtgcccctgtgctgcggggccttttgcccggaggccgggccctaaggttttgttgtgttctgttgaaggtgccattttaaattttatttttattactttttttgtagatgaacttgagctctgtaacttacacctggaatgttaggatcgtgcggccgcggccggccgagctgcctggcggggttggcccttgtcttttcaagtaattttcatattaaacaaaaacaaagaaaaaaaatcttataaaaaggaaaaaaaccaaccggtccttccctgtgtcttttgttcccagtccctctccctgactcaggccctgggccccccacccccatcgggcggccctaggctgtggctctgccgtggagctggaggcccctggaggccacctcagccaggacagccaccccagcctctgggctctgttgctctcccacctgcccacagaccttcccctgctggggcctggcgcggtgccctctgccctccccagggggcagcaagcggttgca

SEQ ID NO: 15268 - DNA, 1051 bp, Homo sapiens
tgcacgctgtctcacttgggtctctgtaggacacggtcctgggcacctgtgccccggaggtgcctgctgcagcctcacagcccaccttcctgccctgggtccccgagcgcgggggtggcgagttggacctggtagtgcgggagctgcaggcactggaggaggagctgcgggaggctgcggagcgcaggcgggcggcctgggaggccaaggtgagtgccagcctcgctctgggcaccagcccagccccaccttcgggggatggctgacctgagggcactttggacttgctgaatcctacagttgcatttgtcaagcatggcaggggacacacttagaggcacgtaccctgagggagcgggagggcacctggtgaggagccgcagctgctgcgagacagcccccgcccctcctgcgggaggtctgttgtctgattctttgcatgagggagggaagcccgtgctgtgtgggccctgctgctcccatgcgtccgccacacatgcatcacacggtagtagtcactcctccacacctgcctgggacccgtctaacctcctggtggccacctgggcctccaccctagactcagagctgcccgcttaacctgcgcaggttcatggctgtgaacacggggctgtgttggctccatctattttctttttctgaagagttttaacttaaattgcaggcatgattttccccttaaaattttcagtaagcctctctgaagagcatgggcgtttcccgcatgcctgcagcgcctgcacctgagtctgggctcagggaatgctcagggagcctgaggccagtgtcctggggggacagagccattgccattgtgtcccacgcaggctggaggctgtggacgggggccagagtggagtgccgcgcggcgggcctctcgggaggctgtggaaaaggagctgggagctctacagcagtgctgggagcgagacggtggcccggcccagccccatgggccacaccggctggtgagacgagaggatggggcagcaggggaccgggacctgcgggcagctgtggtgatcaggac

SEQ ID NO: 15269 - DNA, 1046 bp, Homo sapiens
cattcttcccgtagttctcgagccttggctttcagctccatcagctcctttaagcatttctctgtattggttattctagttatacattcatctaactttttttcaaagttttcaacttctttgcctttggttttaatttcttcctgtagctcggagtagtttgatcgtctgaagccttcttctctcaactcatcaaagtcattctccatccagctttgttctgttgctggtgaggagctgagttcttttggaggaggagagtcgctcactttttagagtttccagtttttctgctcttttttttccccatctttgtggttttatctgcttttggtctttgatgatggtgatgtacagattggtttttggtgtggatgtcctttctgtttgtttgttttccttctaacagacaagaccctcagctgcaggtctgttggagtttgctagaggtccactccagaccctgtttgcctgggtgccagcagcgttggctgtagaacagcagattttcatgaaccacaaaagctgctgtctgatcgttcctctggaagttttgtctcagaggagtacctggccaggggatatcaccaccaatcccacagaaatacaaactaccatcagagaatactacaaacacctctacacaaataaactagaaaatctagaagaaatggataaattccttgacacatacaccctcccaagactaaagcaggaagaagttgaaactctgaatagaccaataacaggctctgaaattgtggcaataatcaatagcttaccaaccaaaaagagtccaggaccagatggattcacagccaaattctaccagaggtacaaggaggaactggtaccattccttgtgaaactattccaatcaatagaaaaagagggaatcctccgtaactcattttatgatgccagtgtcatcctgataccaaagccgggcagaaacacaagaaaaaagagaattttagaccaatatccttgatgaacattaatgcaaaaatcctcaataaaatactggcaaaacaaatccagcagca

SEQ ID NO: 15270 - DNA, 1051 bp, Homo sapiens
ttttccactgtttccccagttggataattggcagctcaatgacagtcaagtggaaacaactgtctggtaagttttctttacatgtacaattgctggtattttatacacacttagactatacatgatgtactcagtgctgtgtaaatgtattacagtatttgggttctgcccttaaagtgctaatacattttttagaactaatgcagatagatatttatacaataaataaagaaaaccctgacatttaggttgttataccataaaggaatgccttttgtgacaataaatagaaaatccttaacaaagatagcatagtgattataatatgtagttgaggtaaaatatgaatcctgaccttatcatttgcatatactcatggttcgaattgtccatgaaaccctgtcaggttgaagaaaattactagggtaaaattattcagaagaataatatttattagcaattacataatttatatcataaagactggtattattttatgatgcttttgtcgtggcataactctagcataatattaattgacatcaacccttatttatatatagtttatgtttgaggactcaaatctaactagtggcaaatccaagtttatgtaaaaattaaatctcttctaatgagtgtaatttcatgtgcatttttatagcttctcttttatttaaaaaaaccttatgtgccagactctaatttactgttatatcttagaattatatatacaagaatttaaaaatgaactctagtagctattttgactatacacattgccatgcttggggattttaatgggcaagttatatagataagcattaatttttattccaaaagtaacatagtagtgcttcatcagtatatatacatatacatgagctccttcatgggttatctaattttgaattgatggtgaatctagtgaatgaaggtatgggaaaaatttaaggtacaatgaagtgtaatacatgctttttctcataattattatctaaattaggtattaatgaaattcaattttagtatttctaataatattatttctgtt

SEQ ID NO: 15271 - DNA, 1943 bp, Homo sapiens
tgtctttggttctgtttatatgctggattacattttttgatttgtgtgtgttgaaccagccttgcatcccagggatgaagcccacttgatcatggtggataaactttttgttgtgttgctggattcagtttgccagtattttattgaggatttttgcatcaatgttcatcaaggatattggtctaaaattctcttttttttgttgtgtctctgccagactttggtatcagggtgatgctggcctcataaaatgagttagggaggattccctctttttctattgattggaatagtttcagaaggaatggtaccaactcctccttgtacctctggtagaattcagctgtgaatccatctggtcctggactttttttggttgttaagctattgattattgccacaatttcagagcctgttgttggtctattcagagattcaacttcttctgggtttagtcttgggagagtgtatgtgttgaggaatttatccgtttcttctagatgttctagtttatttgtgtagagatgtttatagtattctctgatggtagtttgtatttctgtgggatcagtggtgatatcccctttgtcattttttattgcatctatttgattcttctctcttttctgctttattagtcttgctagcggtctatcaattttgttgatcttttcaaaaaaccagctcctggattcattggtttttggaagggttttttgtgtctctatttccttcagttctgctctgatcttagttatttcttgccttctgctagctgttgaatgtgtttgctcttgcttctctagttcttttaattgtgatgttagggtgtcaattttagatctttcctgctttctctcatgggcatttagtgctataaatttccctctacacactgctttgaatgtgtcccagagattctggtatgttgtgtctttgttcttgttggtttcaaagaacatctttatttctgccttcatttcattatgtacccagtagtcattcaggagcaggttgttcagtttccatgtagttgagccgttttgagtgagtttctgaatcctgaggtctagtttgattgcactgtggtctgagagagagtttgttataatttctgttcttttacatttgctgaggagagctttacttccaactatgtggccaattttggaacaggtgtggtgtggtgctgaaaagaatgtatattctgttgatttggggtggagagttctgtagatgtctattaggtccgcttggtgcagagctgagttcaattcctgaatatccttgttaactgtctcattgatctgtctaatgttgacagtgtggtgttaaagtctcccattattaatgtgtgggagtctaagtctctttgtaggtcactaaggacttgctttatgaatcttggtgctcctgaattgggtgcatatatatttaggatagttagctcttcttgttgaattgatccctttaccattatgtaatggccttctttgtctcttttgatctttgttagtttaaagtctgttttatcagagactaggattgcaacccctgcctttttttgttttccatttgcttggtagatcttcctccatccctttattttgagcctatgtgtgtctctgcatgtgagatgggtctcctgaatacagcacactgatgggtcttgaccctttatccaatttgccagtctgtgccttttaattggagcatttagcccatttacatttaaggttagtattgttatgtgtgaatttgatcctgtcattatgatgttagctggttattttgctcgttagttgatgtagtttcttcctagccttgatggtctttataatttggcatgtttttgcagtggctggtattggttgttcctttccatgtttagtgcttccttcaggagctcttttagggcaggcctggtggtgacaaaatctctt

SEQ ID NO: 15272 - DNA, 1037 bp, Homo sapiens
tctatctatctgtctctatctaagaagtcataaaggctgagtctaataagataaaattttcagtccattcttttggtccaaaaaggcttacattctcaggtatagcttcaacatcatatatgaatattactaagaatcttagtagataagctaaagtcagtatgagtaaccagtctgatatagtttgcaagaacactcttcatggactgcaccaaaaaaacctatggtagcaagagacagtttttattagaagtactgtctgttataccacatatggagtcttaaattagttttgggtgtcattttgaggcctagagtcatagaagagtgattaggagcttgtggggtataaaaataacttgagaattggctgaaagcaactagggaagatgggggtagtagtatgtgtaaacatttgaggcagtagagatgtgggacccaaatactgttccccttttactcaaattctgagatgagttgacatgttctgtgtagggctagagagtagaaaaatggccagtaggtggtagccacagagaagcagtgcgtacaaacaagtaagtatgcaaaatttgtacatacggtttcaggaataactagaatacccataaaatatccacctgccttaaaaactagaacatcattgataacttggaagcccttgcatacctctccatgatctcatttgtcttcacagctatataaatctcattgtatgattataccataatttattcatcctgttgttaaaggatatttgggtttccagtttttctttttttactaccaaagcactacattattaatattcttgtatatgtcctgatatgtaagtgcaaaagtttcttttacagcaatggctcttgaagagtggttcccagaccagcagcatcagcatcccttggaacttctttgaaatgcaaattctcaagccccctacccagacttactgaattcaaaactatgtgggaggagcccagcaatctgtgtttcgcaaaccctccaggtgactctgatgcacagtaaaatttgagaac

SEQ ID NO: 15273 - DNA, 1143 bp, Homo sapiens
tctagtcacaggtcctgcccacgtgcaaggggatagggagttacacaagggtgtatgtaccaggagacgataatttgtggttgtcttagagtctattcttcatgctctggattacttgaaaaatgggattatatttcttaaaaacctttggaaaacatgtcacttgttaagacaaatactcagttcttttggtggtataaagttagtggtttgagagtattcttccagactttttttctatgcatttagtaacataacttattgttttctgtgcctcattgtgtatcctgattgcttcttaaactgggttctaaatgataaaataacatccctatataagcatctttcttttccttttgtgtttgtataacattttacaatatataactttgtacccaataccttaaaaatcttttttcttttggaaccaggtacatcaggaacgtctctatcaagaatacaatttcagcaaggctgagggccatctgaaacagatggagaagatatatactcagcaaatacaaagcaaggatgtagaattgacctctatgaaaggggaggttacctccatgaagaaagtactagaagaatacaagaaaaagttcagtgacatctctgagaaacttatggagcgcaatcgtcagtatcaaaagctccaaggcctctatgatagccttaggctacgaaacatcactattgctaaccatgaaggcacccttgaaccatccatgattgcacagtctggtgttcttggcttcccattaggtaagaaaggacatgtatcaagtgtctgttctttaaatcaatgattttttatactgctctgcccacttccaagcattcagtcgagacgataaggataagacaagcattgagttgtggtaggctctgaattcttcacccatgtttcaacctgtacatcattgcttttatctattgtatttgcttacatttaaattaaagctttaatttgagcagttaatctctgcaaaatgaaagtttgcacattgctacattaagttaaaagctatgtagttgtagtaataataatattagctgtcatttattgattcctaagtgctaggcactgttgtgttttatataaattcatataatttacaaaaccttatgaagtaagtatta

SEQ ID NO: 15274 - DNA, 1012 bp, Homo sapiens
accacgcctggctaattttttttgtatttttagtagagacggggtttcaccgtggtctcgatcttctgacctcatgatccacccgcctcggcctcccaaagtgctgggattataggcgtgagccaccacgcccggcctctagttcttacttagatgtaatgattcctatcttataagagtctcttgatgtcttcatttttttttttttgagacagggactcattccattgcccaggctggagtgcagtggcataatcagggctcactgcagccctggcttcccagcctcgggtgattctctcacctcaggctcccaagtagctgggaccacaggccaccatgcctggctaattttttgtatttttttgtagagatggggttttgccatgttgcccaggttgggatgtctttattttttataaacgtttcttaaattaatgtggttggagttaaactttgatggctgttcctctcactgcttgaagccttaggcagtgggattttgatccatcatatatcaaaaatggcttatcttcactcagggcaccatgaggatgggctggctgtccgttagtgccttctgatttttgcggagtcaaacaattactaaacgggtggtgattccagattaagaaaatgtacctgtgattaaaaaaataaaagaagcagcctagtttcaaaacacgagcatatagtaattagatagctgtcatctggtgctgtgaaataaagccagttgattctgagagttactgaaacattatactctaaagtcattcatgttcaaattttaaatggtttactcagttttttagagtggttgctcacacacgtcagggcagttttaaaaatacactttttggctgggtgcggtggctcacacctataatcccagcactttaggaggctgaggtgggcggatcacctgaggtcaggagttcgagaccagcctggccaacatggtgaaaccctgtctctactaaaaatataaaaattagttgggcatggtggt

SEQ ID NO: 15275 - DNA, 1948 bp, Homo sapiens
gctcactgtaaccttgaactcctgatcctgccctatttgatattgagcttgggcatttggtgacattctccaaatagatgagtcaataatttatattaatgaatggagagttaaataaaggatgaacggttactctaaattttcttgtgacttggtatagaacatgctggtgtgagttgtcatgtaatcataacctttgtgaatttatttatgttttttaaattttccagaaatgatcctagataattgatagatcctgtggttcaactggatttctagatagaagctggattcatgtgatgccagaggtaagagtaagagcaaaatcttcgtttttacctcatttggatttctaatcacttagcaagacttgggactcggtgttattagtggatggaatttggtaattaaaaaaaatccccagttctaaccttaggagaattttcctgtttagggatgaggagccagtgctggtttgcccttcctcagtcatttacagtttgccatgatgaaatgcatgttaagtccgtgtttcagctgatcagcctgattaaacacatgctctgagcagactaaagctaggggcaaacacctgcaattgaattctgcttgttggaattcatactgggatttagtctgtaatcccaggtaattcttaaatcttaataaattatgaatttgagactaatgttttgttgtgctttgatcttttgtgatatctctatatccccaaaaaatcacttttgtgagttagaactagggtcaggaatcattaatctaaaagttcaaacactacagaaaaagcactggcaactggtataattctataggcaatttagcctggcagttttaaactaatcattattttatcaatctatacatgtagattaaaggaaacacagagttggttaaatcaattttgtgaagactatacggtacaacactatagaatcacttaaaagttatgatacagttttatgtttattgaaatagaacggtattcatgacacatgaaaaacagattatatagagcaatatgtttctgcttaaatatttttatatgcatatgtttgcttaagaaaactgaaaggacatatatactaaaatactagggggttattttctctagaattgggttctacaagtaatcttttattattataaacctattttctaattttattgtattcatgtattgtaatattttaaaagttattttaggtaacttaggacaagcttatattctttacccgtgcctgcattttcagcagagaattaggtagaaagaagggtgaaatacaggaaatacaaacaactcaaagtaacatcaggacttgaaataattttttagcttttgttgtcttttgcaggagtaaaatttcaagagactgaaaccagatctgagtttcgctgttccagtctggacctctttggtgctgtaaatcctggatatactgtagatgagtactgcgtttttcttttatggtaaggcttacgttgagattgagaagctttgccatatatatgagtctttgaaaattcaggtttgtgacttcatggccagctgctaaggtgctataaatttcactttttttttttttttgagacggagtcttgctctgtcgcccaggctggagtgcagtggcgggatctcggctcactgcaagctccgcctcccgggttcacgccattctcctgcctcagcctcccaagtagctgggactacagttgcccgccactacgcccggctaattttttgtatttttagtagagacggggtttcaccgttttagccgggatggtctcgatctcctgacctcgtgatccgcccgcctcggcctcccaaagtgctgggattacaggcgtgagccaccgcgcccggctaaatttcactttttaaaagtcagttgaggccaggcgtggtggctcacacctgtaatcctagcac

SEQ ID NO: 15276 - DNA, 1343 bp, Homo sapiens
agtactggcacattagttgttacagctccgcaaggctttatgcacaattatgtaatccccaaagctctgaaaaccgaaatttacaaaatttagcaccccaactggtttggtagccaagtgcaggttatagggagctggaaggggaagggggtcacagtaggtggcatcgttcctttctgactgcccgccccccgcatgccgtcccgcgatattgagctccgaacctctcgccctgccgccgccggtgctccgtcgccgccgcgccgccatggaattcgaacgctgacgtcatcaacccgctccaaggaatcgcgggcccagtgtcactaggcgggaacacccagcgcgcgtgcgccctggcaggaagatggctgtgagggacaggggagtggcgccctgcaatatttgcatgtcgctatgtgttctgggaaatcaccataaacgtgaaatgtctttggatttgggaatcttataagttctgtatgagaccactttttcccatagggcggagggaagctcatcagtggggccacgagctgagtgcgtcctgtcactccactcccatgtcccttgggaaggtctgagactagggccagaggcggccctaacagggctctccctgagcttcggggaggtgagttcccagagaacggggctccgcgcgaggtcagactgggcaggagatgccgtggaccccgcccttcggggaggggcccggcggatgcctcctttgccggagcttggaacagactcacggccagcgaagtgagttcaatggctgaggtgaggtaccccgcaggggacctcataacccaattcagactactctcctccgcccatttttggaaaaaaaaaaaaaaaaaaaaaacaaaacgaaaccgggccgggcgcggtggttcacgcctataatcccagcactttgggaggccgaggcgggcggatcacaaggtcaggaggtcgagaccatccaggctaacacggtgaaacccccccccatctctactaaaaaaaaaaaatacaaaaaattagccattagccgggcgtggtggcgggcgcctataatcccagctacttgggaggctgaagcagaatggcgtgaacccgggaggcggagcttgcagtgagccgagatcgcgccactgcattccagcctgggcgacagagcgagtctcaaaaaaaaaaaaaccgagtggaatgtgaaaagctccgtgaaactgcagaaaccctttgggaacagagggaaccatggggcaggaagcccacgaaaattctaattggtcttctggttcttggtgacatcaggtgaggggcgcccaaatgtttggcttcatgagaatcaccga

SEQ ID NO: 15277 - DNA, 1054 bp, Homo sapiens
atgctggagggatgctgataatcccactcctctgacttctgactctgtagatatcctgctccagtgatggctctgtggggctctgggacccagagtcaggacagcggcttggtcagttcctgggtcatcagagtgctgtgagcgctgtggcagctgtggtgagaaagcaatggagatcccactggggggtctctggaagggctaagggggctttgggagacggtgcatggagtatctaatcccagaggcaaaatgagcataaaaatgagatacctagagattaggcaacataggaagaccccccatctctataaaaaataaaaataaaaattagctgggtaccatggtacatgcctgtagttctagctactcaggaggctgaggcgagagatcacttgagcccaggatttcaaggctacagtgagctatgatcaaaccactgcactccagcctccagtgtaacagagtgagaccctatctttaaaaaaaaaaaaaagagaaaaagaaaatgagatacttgggattggattatggtgttgaggctaagggttggtgtaaagggagagaggagagcatgaaaacacagcctcttggtatcatgaacttgagccacccgaccccactgtcctgagccacccaaccccactgttcctgagttctcctccctcattgacatcttccatgctcctaatgctccacccacctctgtggaggaagttctgtttcccatgtcctgctcaatatgactctgctctgatcttgtgctctgtgggcaggaggagcacgtggtgtctgtgagccgggatgggaccttgaaagtgtgggaccatcaaggcgtggagctgaccagcatccctgctcactcaggacccattagccactgtgcagctgccatggagccccgtgcaggtaacaaaacgtcagccacctccccttccctgctgtctcttcttttctcccctgctccgtcccttcttctgactcagtctctgtgtcttatcagctggacagcctgggtcagagcttctggtggtaaccgtcgggctagatgggg

SEQ ID NO: 15278 - DNA, 1033 bp, Homo sapiens
tgttatcccagtgctgtgggaggccaagtcaggaggatcccttgagcccaggagtttgagcccagcctgggcaaatagcaagacaccatctatttgaaaaatgtaaaaattatctgggcatggtggcgcacatctgtagtcccagctccaagggaggctgaggcgggaagatagcttgagcccaggagtttgaggttgcagtgagctgtgattgagccactgcattccagcctgagtgacagaacaaaaccttgtctcttaaaaacaaacaaacaaacagcctggagattggtctaacttgtaactctaaaactgcctctactccgtatactttctcctacatgcacatccatcggcaggcttgaggaatgcccgcagatgcacatccctccgtaccacaaacaacagaacgaatctcatacccttaatcttattgatgttgatatcaatcatcacaattagtcctaaactactgagtcatctcatcttttacacttaataaccatgtatctccactctgttttgtctccatctacctaccttttccaactctagaagctcttccactgtgccctctggaactgatggccagtcatttgtcaaattctctgtgtcctcaacctcttctctgaacgttcccttcacatttatgctcttcagacttggtttcttatgaggactctgcttctcctaccacctcagtagtggtggcattttcccttccacacccagtgtcccactgggcctggaggtggtgcacgtgtcctcatactgtttccagaccattatccctcatccctagtacccttctgctttgaaagaaactaccatacgaacaccacgtttgtcataaatcttatttcagtattcaggtagatcatactaacacccgcttcagccacttatttccttggtcatgttctggagctgcagatcctccacatctcagtttcagacgtcccactctcgactaccaccacctcctgttcttccagttcattttctttagtatgctaaatccaacagttcatcc

SEQ ID NO: 15279 - DNA, 1062 bp, Homo sapiens
cttatctgtccctgacaggaaactgtgtttgcaatgctggtagagatcacagagcgagccatggcacattgtggctcccaggaggccctcattgtgggaggagtggggtgtatgtattattgaaaagtgttcctctttcctattcttaacactatgcgtcttcctcctggtactctaaatcattaagcgtttggagtaggcttcccaatccttgcccctaatcccctatgtcattgttctaagtgagtgcacatgacgtgttctgctggaccatgaagagatggctaaaactaagctaatcctgttccctgcctctttgtaggtaatgtgaggctacaggagatgatggcaacaatgtgccaggaacgtggagcccggctttttgctacagatgagaggtaaagacactttccctttggtttcttttttacttctcctgttatagtgattttccacccttagatcccaattttcatctctcttgcatcccagattctgtattgacaatggagcgatgatagcccaggctggctgggagatgtttcgggctggacacaggaccccactcagtgattctggggttacacagaggtgagtgattcacctcttggtgagggtagattattgggacatagacaaaaacagcagggaagagtccaggaacatgagggcagagaagaatgaaggatgttaagggctcgctctccaccatgtttcttctgtttttccacaggtatcggacagatgaagtagaggtgacctggagggactaataagatcaacagaatcagagtagatagttccttaatcggaacccaaaggaccccgtgcctcaatctctatcctgatgtcatgggagtcctagcaaagctatagactccaagcaaggcttggggtcctttatggaaccccaggatgactcagcaataaaatatttttggttttttggttttgtatgttggtgattggattgtgttgttcaggaccaatgtagatttggtgctggataaattcttgttggagcttgctgctgtggaaccaagaatgaggtatctttttttt

SEQ ID NO: 15280 - DNA, 1029 bp, Homo sapiens
caggaaaggaatgaatgggattgaaaaggattgaaatcttcaaaataatgaatatctgaaagctcttgcattattttgaagcttattttttctataaatcttagcaattgaaactaacagttgctgggtatggcaactcatgcctgtaattccagcactttgggaggtcgaggcgggtggatcatctgaggtcaggagtttgagcccagcctggccaacgtggcaaaaccccatctgtactaaaaataacaaaaattaatttgatgtggtggcaggtgcctgtaatcctagcaactccggaggctgggcaggagaatcacttgaacccaggaggcggaagttgcggtgaaccgagatcgcaccattgcattccagcctgggcaacaagagcaaaactccgtctcaaacaaacaaacaaacaaaaaacaaaaaaaaacaactaaaggacactacctgatttattattttggggcaagtacatgttttgtttttatattactgggaatgattatgtagactttgttattctaagagtttagaaatataaataactttaaaaaatactttgtaaattatagaaggtattttattttatcttatttatttatttatttatttgagatggagtttcgctcttattgtccaggttggagtgcaatgatgcaaccttggctcattgcaacctctgcctcccgggtccaaactattcttctctactcccgagtagctgggattacaggcacccgccaccatacctggctaattttttgtgtttttagtagagacgggatttcaccctgttggtcaggctggtcttgaactcctgacctcaggtgatccacctgcctcggcctccctaagtgctgggattacaggcgtgagccaccatgcccggccagaaggtattttaaatttataggtgaagctaaagttgtttgggttaccttatatgacctttttaaggttgggattggattcttttccaacagaacacttgattatcattagaaatagttcagcattgtcccc

SEQ ID NO: 15281 - DNA, 1057 bp, Homo sapiens
aacggatcttgctgtcacacaatgcaggtaacagagagtgggacaacaaaaagtaatcaaggcgccaaccaacattcttggatcgagcattcatcatataagtccaaaaggtgtaggcatagggtgtgttggggtagaggtgcctaaagctgtcagccagtggcacagcctgcagtaattccccgaagccttggcgctcttgtggcgtgaagccagcattctttttgttccccttggggttgcgaaggtcaatttcttcatgtgccacattgaggtctccacacagcacaaggggctttcgggaagccaggcccttcaggaacttgcgaaaggcttcatcccagcgctgccggtactccagtcgtaccagacctcggcctgcattaggtacatatgctgttaccagcacaaacgagtcaaattcagccacaatcacccggccttcctgatcatgctcctcatcgcctatagaaatgaaacagaattagcataaaaaactataagaaaagggaaagcaatcaagaggtggggcagagatagagaattagcaattggttttgaagagttcaggcattaggcatcaatagggtctcacctatgccgtaagaaactttgagtgggcactggcgggaaagcaggcccacgccactgtacccttccttgtccgaaggagctgaccagtattgatgagagagtccaggcagctcctgaagttcagctggtagtttgttctctgaacatttggtctcttgaaggcacagtatatctggggcttcttcctttacccactgtaagtgaaaagaaaggtggaaaacgtattatcaattcagcagaacatttattgaataatctatatgctaagtcatagatacgcacgggttaaacagtctcttggcctaaggagttcgagtcaagcagcacaatattcaaacaattctaagctagataaatgaaaacaaatatagagaggtaagaaagtcttacatgctatgccaaggagatgtgttttttctataggcagtggatagcaagctaagatttttaagctatggttaat

SEQ ID NO: 15282 - DNA, 1028 bp, Homo sapiens
aactggaaagtcaaaaaaggatgagcgtatacagagaatgtaaaggtgagagagcctagtgtttatttaggagaaaaggctttgaagcatgtgcctcaggaatgttatagctgtctttctcgtttctcaataaaaatattgagatgaaatgatgtcgtttcggagaatagagagccttggggactgggtgtgttatcctgaggtcggaggggaattggggacctgaagtttaaacagtgctctttctttctcaaggattcttgagggtatacagttgggggacagagtatcttaagtacagagaagtcgagtgacttaatagacagggagtgggggatgtggaacagggactgtgaagatttttaggattaaaaatttttcaaacacaagtttgaaaatacaagtctttttcttttgtatagcaaaagaatcatcaacctggggcctgtgcatcccggacctctgagtccagaaccccaacccatgggtgtcagggttatctgtggacattgcaagaatacttttctggtgaggaaggggtattgggaaggggaggggaaaggagactaagagtcatttcgagtatatttcttagagtaatggtaatgacccctgaaaggtctgtcctatgggaacatgttctgcatccccaccccaaggttctcattgagggagaccctgcttgtgctattatttttgttttctttctccatagtggacagagttcacagaccgcactttggcacgttgtcctcactgcaggaaagtgtaagtgattagggattgagctggtaattgatgtatggagtaaaaactacaaggccatagaaagcatccatttctatttgcctccccacaggtcatctattgggcgcagatacccacgtaagagatgtatctgctgcttcttgcttggcttgcttttggcagtcactgccactggccttgccgtgagtacccttgccccaacctctttcattctgcagcctcatctccataggctaagatttgggaaactgctaccctaa

SEQ ID NO: 15283 - DNA, 1050 bp, Homo sapiens
ggcctcattaccggccaccaccagaccctgcggctcggctggggttggaagccttctaccagtgtccattccaggtctcctcctttctcctccagcaacccttccctcaccggacccccgcaccctgcatccacctcgccaacccctctgcctctcaccctctcacttttttttttttttgccactgaggtctgtcatcctcacctgtagaaagggggatgcacaggaggaagaagatagcaagtgagagcacactcccaccactacccccacgccccctacccggctcgcccctcatgggtcgttgttatcgatgccggggaaagccagtcaaccacagccagaggattttgttccgccgcaaaaggagcgcggtggcgatcggcgcaggattatctctctaaggcgagttccaaccaacttaaagcttattggacgactagagttgcaaggagtcttgcatttgctgaaagatcaatgacccaaccccagaaacgtgcgcccttcgatagctcagctggtagagcggaggactgtagcctgtagaaacatttgtggacatccttaggtcgctggttcgattccggctcgaaggagctgccgtattcttttgcacacgcacgcaccaaaactacgtggctgcatctctgcctggtcaaaggctttgccagccagcatccacactctcccaggagaaacctagcaaggcctttccggattacccagcttcccacagcctatgctgtggccttgggagtctgctcattcttcaagtcattgctttctctactatcttcaaattttttatataatctgggatttttatctccaagtcattgatttttatggccattaggtgacactataactgatattcttatgaaactagatgaaatatttgaataacatgttagaaaattgaattcatgtatattaaaacaatgtcttaacaattatttacatttacatataagttctatttctttccttgctcataaattttttgcatctcactgttttgtgattttattttttattttcaggagttca

SEQ ID NO: 15284 - DNA, 1074 bp, Homo sapiens
taccttaaatatttgcctcttctttatgttagaaacattcaaattattctcttctagctattttgaagcatacagtagattatcattaactatagtcatcctcctgatctatcaaacactaggccttatttcttatatcatttcttatatttgtaccccttaaacatcctctgttcatccccattgcattttgagcacacagatgcatttgctaagatttcagagctcacacaaaatgaattattatataggttagtgtctctttaaatgaagttgttatataagttttgtgttacagcgatgtcgggtatagattttgtatagtcttgtccagataccagctctgacattttctatttgaggctcttactataagagttgtacagggccaggtgctgtgactcatgcctgtaatcccagcactttcggaggccaaggtagaggggtcacttcaggcgaggagtttgagacctgcctggccaacatggagaaatcctgcctctaccaaaaccacaaaaattaggtcgggcgcggtggctcatgcctgtaatctcagcactttgggaggctgaggtgggcggatcatgaggtcaggagatcgagaccatcctggctaacatgttgaaaccctgtctctactaaaaatacaaaaaattagccaggcgtggtggcacgggcctatagtcccagctactcgggtggctgaggcaggagaatcgcttgaactcaggaggcagaggttgcagtgagccgagatcacctgcactccagcctgggtgacagagtgagactccatctcaaaacaaacaaacaaacaaacaaacaaaacacacacacacacagacacacacacaaattaaccaggcatggtggagtgcacctgtaatcccaactactcaggaggctgaggtaggaggatcacttgaacctgggagtcagagtctgcagttagccgatactgcgccactgccctccagcctgggagacagagtaagatcctgtctctttaaaaagaaacaacaacaacaacaaaagagttggacggttattcatccttgctatgcctctgtttta

SEQ ID NO: 15285 - DNA, 1098 bp, Homo sapiens
cactgcaacctctgcttcctgggttcaagtgattctcctgcctcagcctcccaagtagctgggattacaggcacccgccaccacgcctggctaatatttgtattattagtagagatggggtttcaccatcttggccagggtggtcttgaactcctgacctcgtgatccacccgcctcggcctcccaaagtgctgggattacagacgtgagccactgtgcctggccaataccctgaactttctcacctgccttctcctcatagctaacaggcctcacctcttccattccggagatgatccttggacatcttttcagccaggtaagtgggtgtaggagatgtagaagagtcgacgggagcagcagggaacttgaatgcttgggctaacttccttagctgggacaggatttggggaaggaagaaggcttacctcttttcctccagtaattgttgttttctctttccatccctaatttttctccttgttctctccttcaggaagagctctctggaaattctgagttgatacaaaagtacagaaatatcattacacatgcacccaacctggataacattgaattgtactggaacagctacaacaagtgggtgggctgtgtgtgtatgcatgtgagagaaatgcagaagcagtaattgggcgtcatgggggaggcacagaggaggagagggaagtctgggtagtgtgcaatgtgcaaggaatgcagcatttagtgtgcaatgggggcagcttcaggacagagtcagtgggaaggattgcaaggggctgtcccccttctcttgtttacctcctttggattattggactcccagaagtaagatgatcttgtgtcctgtgtccttcctccccttttgttgccctctgaccagggatctagggcacaagtgactataggggctgtgcttggggcctgcctgcccctttctcctttggtttccacctttaataaccaagatttgaccgtaatttttagacaaagatagttccatcatgggagagatagcttatatctggttagatagcattgcccacctaaaattcctactcttttaacccctttctagccgccgagacctgaactttg

SEQ ID NO: 15286 - DNA, 1942 bp, Homo sapiens
aaccatcatttaaaccataagataaccatgaagtgtgaacatacgaatctactataacttggcagtatgttttattcaagtgttaggggaagcaaaacccagtgtataatatagaaagtacagaagtagagcagatgatacactatatgcaagtactagtgttttgagataaccttgatgaaacaatgtgcttttgaaagtagtcgcaggatagagaaattgtgtatatttaatgtgatcagctcaggaacatatgcctggcctgtcagcattgactgaccaattttatttcaggggaaaaccagaaaacatacttattcctactgacagttgacctttttatttattaggggaattcagctacactgatgtcaaatggagtttcagtttctggaccctagttcacatcacattgaccaaaaaaatgcatttcataggaatttagaagcatccaagaaaaagtaccctgaccagaaaaccagtcgacagtagtaaacatatgatgtagaaatgattgaccagtaaatgagttacatataatatgtggattatggtctgagtacctcattcacactaagaaggagcactctgttggagaattctagtgtttggagagaacttggtataaagtaaaaatgtagccagttgaactgcagagtaaaagaacgtagacatacctgaccagacaaaagctttccaagtgttaggagacaggaagtaaataaagtagaaaactgcagaatttgtgtttgcattagtaactttcaagttaaatctcaattttgaaaagcagggcttcttcattggagttaacgccctttgtgagtagaactacaaagcatagtaagaggaaggggagaacagtgtaagggggtgaatgcaaatgacaaagggattagtaggaaggagttagaacccaagataaatgcagataggaagaggaaagcatgtttggattgtttttttcaagtggcactcagaaataaaagtttggagaaacatggctctgaagctctgacaaatttgcatttgcaaaaataactcctacaagactttcagaagtctaggaaaattgtggcttttggattattacattaccaaatttgtggagtttaataggtttcaactgtcaatgtgcattaaaatttcctgggagcagggggatgggcttttaaattctgatgtccaggtgtgtgctccaggcctactaaatctctggggttgggactcttcgttgttttttaagttgccataattccaatttttggcccaaattgtgaactactcaccaaaggcaaaacaaaacaaaaaaccctgtgtgataaagaggggtgaggattaggaaaggacacgggtttcaagaaacggtggctgggtggctggccaataagtttagtagagggatgactgtatatgtcagaattaagtgcagtaagaggatgtgtgagtggtatgttttcatcaaagaactgaaggcagctaaaagggccaaggtgtaccctcattaaagtctaggccccagagtaaagaaggcacccaaagagtcatctggtggttagggagggggaaaattccttgttatcaacgcatgttacagtgagctgttaaagctatagtactgtcagtaacacttcgtggcgatggaagtgttttatgatgcattgaccagtataacaactggtgactttactgagccttgagatgtggctagtgtgaagagttagatttaaatttttatttagagacgtgtgacgtgagactactttattggatagttaagtgctgtagaatattgagaagtttccacacaagtactgctagtggttactaactcaaacgtacatgaacaaatgtgactccaatattttgtgtgtcctgagttcattgatgttttctttcctagaccttaggctttaatattgaagatttccctagtgagggc

SEQ ID NO: 15287 - DNA, 1037 bp, Homo sapiens
ccagtgttggtgatacctcatccttgaaaggcttagttcatttgtgttttatacttcagtttttccagcatagcagaaaatgccgcttataatttttgtgcacacaaaccttggattcccctgtaaagttgctattgtttcatagcatgcggcactggccttttttcatcctactcattacaggcaaaactcatgtcttatttatgaggattttatagatcattttctgtaacaggtgacaaaagcagaaaagaatgaagaggctgaagtatgaactacccttggagcccatatacatgatataggcaatttcttttgtatgttaattcagtcaaaaatactacccacttgatgttttctaatctgatgtgagctcatgttacacagacttttagtaagtaacccgtgactagaaaataaactggatgcttaggagagagtgtcagatgtataagatgctaataaaacctgtttaatattattgttagctgtaagtttttgggaaatactgaacaaattagtccacaatcaagtgtctacttttcccttcactgtagggcctctccctgcacagagcagtctgtttagctgtgaacaccacaatctgcagatgttcaagtcccttacataaaatggcatagtatttatatgtaacctatgcatattctcctgtatattttaaatcatctctacattaaaatacctgataaaatgtaaatggtatgtaaatagttgtaactttttttatttatatttttgttaactttttttagttttttttctttgctagtattttcgatctgtagttggctgaatctgcatgtgcagaacccatgaacatggggggccaactatacattttattctaggaaagcaggtattgaatgaagctgtggagagcgctttttaatattaggttggtgcaaaagtaattgtggcttttgccattacttttaattagctgcagttacttttgcaaatagccgtagagcatgatcacagattgaaaatctatacacacatatggtagggttgtt

SEQ ID NO: 15288 - DNA, 1047 bp, Homo sapiens
cccggagtacctgagattataggaatgtgccaccacacctggataattttttctatttttagtagacactgggtttcaccatgttggtcaggcccgtctccatgtcctggcctcaaatgagccgctcgccttagcctcccaaagtgctgggattacaggtgtgagccaccctgtccggcaaaacagattatttcaatctgttcacatttttaagatgagaatcagctgtggtccattaaatggtccatgtaccaaatgatagctttattattaatagattaacgtctactctggtgtagtgttgacatgtattactaggttttttgagacccaggaaatgtcactgtttgcagctaatgtcttatggtcagaatttccatttaagaagcttccctttgaaaacctcttcttagtacatgtcttgtaatgcttttactttggaattggggtagacattctttgtctttttttttttttttttttttggtggtggaggagacaaaagtttttactctgtcgcccaggctggagtgcaatggctgtctgcaacccccacttccttcctgggttcaagcaactctcgtgcctcagcctcctgcgtagctgggattacaggtgtgccactgcatccagctggtgtgttttgttgttttttttttctttttcttttccttttctttctttcttcctttcttttttttttttttaagacggagtcttgctctgtcactgaggctggagtacagtggaatgatctcagctcactgcaacctctgccttccagattcaagcaattcttctgcctcagccctcctgagtagctggaattacaggcgtgtgccaccatgcccggctaatttttgtatttttagtatacacggggtttccccatgttggtcaggctggtctcaactcgtaacctcatgatccacctgcctccgcctcccaaaatgttgggattacaggcatgagcctccacacctggctggtgtattttgtcttaatctgttcaggtgattaatgtctctagagtgttttaatttctta

SEQ ID NO: 15289 - DNA, 1033 bp, Homo sapiens
gtctagtgagagtgtggtggtatctcagtcaggatttaattgcattttgtttaaaaatattgaatgtcttttcatgtgtttttcagcttttttttttttttttttttttttttgagacggagtcttgctctgtcactcaatctggagtgcagtggtgtgatctcaagagccccgtctcctgagttcacaccattctcctgcctcagcctaccgagtagctgagactacaggtgcccgccaccacgcccggctaatatttttgtattttttagtagagacgtggtttcaccatgtttgccaggatggtcttgatctcctgacctcgtgatctgcctgcctcggcctcaaagtgctgagattacaggcatgagccaccgtgcccagcccagccatttgtttactcttccacacatgtattcagattattacccatttttgtattaggttgtagaattagttgtaggattcgttatatattctggaaacaagactctgagtacaacatctgatactgttagaaaattttaactgtttcttataattccaccatcctgctctgtagttataggagatatgtaactatccatttgtgctaagtcgttttgtagagtttttaaggattatgggttttgtaatagacagtaaattatagattactggactctggtaattacatataagcggtagatggaagtttgtggaggcaacaaactagaacattgcttgctgttcagtagaacatttaagttcagtggccacatgtgactagtgactatagaattggatagtgcaggtctagaatgctgcaaaaatcagttttactgggtagaataagtctagagttgtgtaagttataagaaatgtaatgactaaagcctactcttcaggaaggaaataacccagactgcagttgtagagcgaatgttgaaagagtaaataggagaaagtcatctgtagaaataaactggtatttgtgatgtccttacagcaggcatatgatttcacctccaaattcacgttcatcacaggcaca

SEQ ID NO: 15290 - DNA, 1467 bp, Homo sapiens
caggcgcccgccaccacacccggctaattttttgtatttttagtagagacggggcttcatcgtgttagccaggatgatctcgatctcctgacctcatgatccgtccgtcttggcctcccaaagtgctgggattacaggcgtgagccaccacgcctggcctgattttttttttttttttttttaaatacggaattttcctctcgtcaccaggctggagtgaagtggcgtgattttggctcactgcaacatacgcctctttggttgaagcaattctcctgcctcagcctcccaagtagctggggttacaggcatgcaccaccactcccggctaatttttgtatttttagtagaggctgggtttcaccatgttggccaggctggtctcgaactcctgaactgaggtgatctactcgccttgacctcccaaagtgctgggattacaggtgtgagccactgtgtccagccctttcctcagatttttacagttatgtgtgaacattttgaaaactaaggagttctgtaattcttcatttttatttttgttgaaatttttgaaattcttaaaaaataaaaatcagctgggcacggtggctcacacctgtaatctcagcactttgtgaggccaaggcaggtggatcatgaggtcaggagttcaagaccagcctgggcaatatggtggaaccccgtctctactaaaaaaatacaaaaattagctgggcgtggtggcacgcgcctgtagtcccagctactcaggaggatgatgtaggagaattgcttgatcccgggaggtggaggtttcagtgagttgagatcgcgccactgcactccagcctgggtgacagagtgagactccttctcaaaaaataaaacaaaataaaaatcaatggagaacttccagttgaaaataaatcaggacattactagtgaactcagcccatttattcctgaaattgcaattttttgaatttttgcaatcagaccttggtaatgacctaatgcagtaggatataaataactccgacaagcttagcattccagtaatggaacattaggcatagatgggttaattattggtcaggtgtcttgaaggcactgaaacccagtgagtttgtctgaagcatctgccctttaaccctttctgcacatggtaattgcttgaccacatttaaaatatactcatgccagcttctcctatagggattcttacacaactggtcttatgcagactttcttaagtactagtatatttttcagtgctttctatgtgttcttttgtccagtcagagttgagaatcattaataaaagattaaggacgtggttgtgtttctgtgtattattatcctatttctttgtcatggctcaattcagaccagtttaataaactcacacttttgttggtataatttcagggatgtcatggactcttagttgatgttttttatgagtgtatcaagttttagcagtat

SEQ ID NO: 15291 - DNA, 1048 bp, Homo sapiens
agtgactgttcattccttaggaggacacgttactaagagtggaattaatccgtattgtgagtacgtctgtctttactgttgcctccatcttgaatttaagtcctcatagtaagtatgggtattttattaattttaggcaaactttggaagttgggatttttgtattttaaaaataagtagttgatgatttttgtagcaaatttaataaccagaccataaagaaaatgagaaatcatatccttaaactcataacaaccattgctagcatccttgtatgcctggatgcttttctactgagtttttcctttgtggatctttgagagaattaaggcctgatacacatgaaaaatgccgtggggtatgaattccttgcatcttgattagtactagctatgtactcagacttgtgaaaataatactagctatgtactcagacttgtgaaaattgagaaaatggtcatttaaatccatttctgtcttattccaaagggtacccctttcaatcacatctgtatttttctgcaaatgtccatttggaacattggactgtggtttgatgggttttttcccttatggtcagtattctgtgttggcttacggagcccctcacccctggtaatttcttctcattaaacctatggagattatattttctattgataaacctatttgtgaaaaatagttgcttaaaaccagattatacctccacttgtaataatgggaaatcttaataaccagcagtagtatctgaaaccagttaggcctcaatgcagatttttgttttaattcctctttttagtgtcctcagactttctggcatacttaatagctgaaaggctgttggtggatttcagtggctactgtttgttaatttttattgcttagtgttaaaatattaagaagtttttgtaaagatatactttagaaagtaacaaagacagacttttgaatttcagaaagatttggaaggaagtgaagttttgtttgagcttttaaatcagtactgcctgttaaatgactgtattaagcatcagaatgataggagtca

SEQ ID NO: 15292 - DNA, 2176 bp, Homo sapiens
gatcttggctcgctgcaacctccacctcacgggttcaagggattttcctgtgtcatcctcccaagtagctgggattacaggcatccaccaccacacccagctagtttttgtatttttagtagagaccgggttacaccatgttgcccaggctggtctcgaactcctgtcctcaggtgatttgctcgcctcagcctcccaaagtgctgggattacaggtgtgagccaccgtgcctggcctaattttaggtttttaaagtctatccttttcatgacagagcttttcatgacatgttgagtttaagaaagaaatagcacctaaggttctcatttgttgaggacattttttttttgaggtagaatctcactctgtcacccagactggagtgcagtggcgctatctccgctgactgcacctctgcctccaaggttcaagcatttttcctgcctcagcctcccgaatagctgggactacaggtgtgtgccaccataccccgctaattattttcatatttttagtacagatggtgtttcaccatgttagctaggatactgtctcgttctgacctcatgatccacctgcctcggcctcccaaagtgcctggctggaaatgtgactaaactactgcttcacttttgaagtatttaaccttctgatttacaaataatggaggctggaatatttgaactgtatgtttgtttgtttttgagacagtgtctccttctgttgcctaggctggagtgcattagcacgatctcggctcactgcaacctcctcccatgttcaagcgattctcctgtctcagcctcccgagtagctgggactacaggtgcaggccaccacgcatggctgatttttgtatttttagtagagatggggtttcaccatgttggccagagtggccttgaactcctgacctgatgtgaactgcctgcctcagtctcccaaagagctgggattacaggtgtgagccactgcacccagccccagatttcttaatgttaaatctagttcatgtaaattagtgccattttattatctaacagcattattcgactattacatactagtaaatggtgatagagtaggatccctgggttagcttgcattaaaaaaagaaaaattctagaccccttcaactagaagaggggaaatatgatgatgaggggcattgacctcaaaatatttgagtatatacaggtgcattaagacttggactattattactaatgtgattaaccttttaaaatttctaccaaatggattttctgttttaaggaatatttgtttggcttaaatgagtttttcctacagaaatcccaagcttgtatgtacattgtagtgaatttgggaaatacagagaaactgtgaaaatgattgtaaagattaatcacaagcagagtacccacagaacattttaagatattttgatgtgtttctgtactgtccgttcttaaatgatttttatgtagttcatttatgtctcctatgtattgtacgttttcagatactatttttttgactcaaattataatttgcacatcacttgaagttgtatttttaaaagactattattgctggacatttattactattgggttgttagttgttagaactcggttataaaaattcatatagaatatgaccaagtaatttagatctgtatgaggcaaaaagcaaaagtagacctattcattctacaagtggtttttacaccttccagatgtaaagggagtaacaaggcaagaaaatgggatcagggccgagtgcagtggctttcacctgtaatcccagcactttgggaggccgaggcaggcggatcacctgaggtcagaagttcaagatcaccctgaccaacatggagaaacctggtctttgctaaaaatacaaaattagccgggcctggtggcgcatgcctgtaatcccagctactggggaggctgaggcaggagaatcacttggaacagggaggcgtaggttgcagtgagccaagattgctccattgcactccatccttggcaacgagtgaaactccaactcaaaaaaattaaaaaaaaaatgtgatcaaggagtttgttttacttatctaaactattgtactactataaaaggatgctggcaacctgttacatgaaagaactgagggactgttcttaggatttctaacaacagtctgcg

SEQ ID NO: 15293 - DNA, 1034 bp, Homo sapiens
tcttgctctgttcccaggctggagtgcaggggtgcaatctcggcttactacaacctccgcctcctgggttcaggcagttctttgcctcagccccccgagtagctgggattacagacgcctgccaccaccaatttttgtctttagtagagacagggtttcaccacgttggccaggctggttttgaactcgtgacctcatgatctacccacctcggcctcccagagtgctgggattacaggcgtgagccttcgcacctggcctagttgaggttttaagatacagtaataaaggaaattgtaaggcagggttttgaatttccaaatctgaggtaatatatattttcctttgtctctagtgtgagataatgtctggtaagtgaaagtgacagcatgtttaatttttttctcctggaccattggataatgtgttttaagtataatgtgattaacccatgtggagaggtggccagggcttgctgaaataaatgcccagtagaaacatcttgtactttgtttaacttgtatacttttgcactaaataagccaagatatactgaaaacagttgggttgaacggcacctatctcctgtgacctgaactctatcaaagctggcatacagtgcccagataaaaaaggaagctgaagtcttgactccatgttcaaattcattttggctcagctctcagcaaattccagggctctcacaacctgtttgtggaccacttgaactttatttatgtaaaaaatcttcagataatgcaaactgccgtaccttttccaagtagaattgaattacttgagatttaaagttaatgtaatggtaatgaagtatttttataaatatattttcaaaattttagctagattgacaatccaagattggtttccctccattaaaagggtgaagaggcatgatagcacctcacacttacaatgaacagttggaaataaaatttacagtttggctatatcccaactagatagagtttttacttattttttgcttttaagctgtggctgggatggtgagagtg

SEQ ID NO: 15294 - DNA, 1647 bp, Homo sapiens
gtagctaggattacaggcatgcaccaccacgcttggctaatttttgtatttttagtagagacgcggtttctccatgttggtcaggctggtcttgaactcctgacctcaagtgatccacccacctcggcctccaaaagtactgggattacaggcgtgagccactgctcccagcccatttttgaaatcttttatactgtatttttactgtaccttttcttttttgaagtacacaaataatattgtgttagaacttagactcagcccttgttttctcttttgcttttttttttttttttttttttgagatggagtctcgctctgtctcccaggctggagtgcagtggtgtgatcttggctcagtgctacgtctgcctccgggattgaagcgattctcctgcctcagcctcctgagtagctgggactacaggcgcatgccaccacgcctggctaatttttgttattttagtagagactgggtttcaccatattggtctggttggtctcaaactccgtgttgggattacaggcgtgaaccacctttcccgccctgtgttagaacttcttatagtgttcagtactgtgcatgctatgcaggtttgtagtctgggagcaataggctatacgatacaggctaggtgtgtggtaggctacactatctagcttggtattgggtaactacactcttacgacattaacacagtgacaaaattgcataacgatacaattctcatgcatttccctgtcattaagcaatgtgtgattaattggtttactgatgaatgtaattccaagaatagagctaagggaagaattaaagagtcaactatgatttagaatcgtatatcattagattgtgagttctctgactttggcaattcaaaagctccaccattggtaagtgagaaaggataccttaaatggaatttttagcatcttttgagggacctcgggggaaattaaatgacatgaattagttttttacatcgagatgttttaagaccttaattttttatttgttgcattacatcactcatacattgaaaggaaacaattttgattataaaagtgctttatagagagaacttgcgggcaggcgtgggggctcacgcctataatccctgcacttttggaacgtggaggtcggcggatcacctgaggtcaggagttggagaccagctatggtcaacatggtgaaaccccatctctactaaaagtacaaaaaattatccggatgtggtggcgggcgcctgtagtcccagctactcggaaggcagaggttgcagtgatcgaagatcgcaacactgcaatccagcctgggcaacaagagctaagcttcgtcttaaaaaaaaaaaaaacttggaggaaatatgcagataaaaatagtatttactcatttacttatgtcatcagcactcagaggtaaccaccatcaacatttttatgttttgttctctgtcttatgtagctacaggtatatatatatgtatattttactaatatgtaattattatagtgttagaacctctacgtggtagatgttttccagtcagtaagtattctaccatgtttttgtttaatggctgtcaagtatcttttgtcacagatttatataaaagattcagttccaagcaaacatggaagtacttg

SEQ ID NO: 15295 - DNA, 1610 bp, Homo sapiens
gtgtgagcaactgcacccgcctggtgctatcttttaattgtgaaaaaatttcacatacacaaaagagaatagtataatgaacttccatgtacttgtctcactttaataatccttggccagcctttttgtttgtatctacatctccccatccacccccttcccatgttattttgaagcaaattcttgatacatttcatctgtagatatttcagtgtgtattttaaaaagaattaggacttaaccacaattatcccaccaaaaacgtttaataaattaactattttaatactaaacatatttagaggcctggcatggtggctcatgcctgtaatgccagctctttgggaggccaaggtgggcacatcacttcaggccaggagttcgagaccagcctggccaatgtggtgaaaccctgtctctgctaagaatacaaaaaaattacctgggtagggcagtgcatgtgtgtaatcccagctacttggaagtctgaggcagaaggatcccttgaactcaggaggcagaggttgcagtgagccaagatactgccactgcactccagcctgggtgatattgtgagacttaaaacaaaaacaacaacaaaaaaagaccaacaagtccatttagtatcagaagtactaccctgagaactgagtaaggcattcctcaatgctgttttatttctacggggataacatggttggtggggtctttttgtttatttgttcttttgctaacagtcctgtatggaattttggaagtgttgtttactaaaggtaggttttgaaattttcttaggagttgggggtcttatggttatactcattggtgataaaaatcaaaccttttactattctcaaatttagatataatctcctgttttggctgtttaagagaatactgtaataactttaagccaaatatccttgttaaaaattattctgggctgctaggttattattttgttatacctgtctaaaatcttatccataatttagaaattttaaaatctctgacaaattttgcatttgacaccaagactcaatttggcaaaaaaaactgatcttaactgatgtgagattatttatgttctatgtgtgaaatttactgaaaatttatatgtattcctgcagaaatatttgatgtggtaactgtgctctcccagatgctacacaacaaaaaaagcatagtatttctaaaatctgagactatttttcctaatacgtgtgtcttttttttttgagacggagtctctgttgcccaggctggagtgcagcggcgcagtcttggctcactgcaacctccacttcccgggttcaagcagttctcctgcctcatcctcccaagtagctgggattacaggcacccaccactaccacgcttggctagattttgtatttttagtggagacagggtttcaccgtgtaggccaggctggtctggaactcctgacctcaagttatctgcccgcctctgcctcccaaagtgttgggagtacaggtgtgagccaccacacctggctgcaagcattgtagaccagagtagacttaaagtatactttgttacaactcatgctcagtctgaggtcactgataaaattgaaactttctgta

SEQ ID NO: 15296 - DNA, 2560 bp, Homo sapiens
tccctccccactagttttgttcttaaaagtgatagctagattgatcctaaaatgtattgtttgaaggattttttttttgggggggagatggagttttgctctctttgcccaggctgtagtgcagtggtgcgagctcggctcaccgcaacctctgcctcccgggttcaagcagttctcctgcctcagccttccaagtagctgggattacaggcaccagccaccaagcccagctaatttgttttttatttttagtagagacagggttgcaccatgttggccaggatagtctcgatttcttgaccttgtgatctgcccgtctctgcctccccaaagtgctgggattacaggcgtgatccaccacgcctggccattgaaaaatgttttgcctgaaaacaaacaacctaatggctgcctttttcagcattgaagtcaaaaatttttctgtgatttacagggcatcccacgtgatttgttgtgtcccttcccttgctgttaatatactgtgcttcagccacactggccttcttaactgtattgaacacattggatatgtttccactttagggcttttccttggaattttctctgactcatacagtttggttcctcagttcctctgagactttttactcagaagctacccccttagtgatgtgtcttcccttatttagcgctttaagctccccttctcctaaatactctttagcacttatcaccaactgtagaatttgtttttttctatgtaaagacataagagatatgtccagaaatacatatgccaaacaattaacattgattgcctctgggcaagaagtgggatttaggagatttgaaacttgtgtactatgtgcttaagactattataatgatcaatgtggtagtattttccttctaattaaaaagcttaaaaatgtacatcaactcttgtgattctgtgtgggcataaatagcatagctagtctgtgtaataggggtttagtaagcagtgttaatagttgaagaaactgctttaaaaggtttagctgtgatagagtcgagttagcatttgagcacatagactaccgtgttgcctgtatcaacatttgggagagcttgaccattttaaaaatatgtattctctactgagaaagcatggctatttgtaagaggtagagtgaattagagaactttttttttattatttctacctaatctgattctgactttaccagtctgaaatattcttcctgttttctaattatattgacctatggctcctgagttgattttaaaactgaaaaaactccaggagttcattgaaccagatttaggcttttctggctagtcttgaataacatttaggagtttagtagagtacattttgaacaaaaattttcctccagtcctctaactaaaataggtattctgaagaggataaactattcataatgcattgtcactccctatattgatcctttaaataaaatcttcacataagtgggttttctagcttcagagcgagaagaaaagttttctcatgctattacccttaagtttgtggaattcatgctagagttatggctatgctgtttaaaatggagtttttctggtttttttttttgttttttttttgagactagagtctcgctctgttgcccaggctggagtgcaatggcacgatcttggctcaccgcaacctccgcctaccgcaacctccgcctcccggattcaagtgattctcctgcctcagcttcccgagtagctgggattacaggcgcctgccaccacgcctggctaatttttgtatttttacaagagacagggtttcaccatgctggccaggctggtctcgaactcgcgacctcaggcaatccgcccatctcggcctcccaaagtgctgggattacaggcgtgagccaccgcagcttgctaaaatggagttttattactcctttgaaaaggaatactagtcaagtgactgaagattgatgtggatttgggagaggaggtacctcatctttatcttacctttgatccgaataaagtaatacatgctcatagaacatttttagaaaatacagctatccaaagataacatttggggtgttcttccaggctttttggggcttatataaacttcaaaaagcactgtcatacagcatatatatttaagtaataattttaaatttaacctgaatagcttatgttagtagatacagatctctgaaaaatttgtagtagttacatagtattatatactctataatactacatggtacattgtatacttgtactatattttattttaccaatacactgttgtactcgtccccattttttcttttgtaaacaaagctttggacagtcaaaactacagttgtgcatatctttattttcttacatttaagccccagaaatataattattcaagggtatgcacatcttttttgccggggaggtgggcagagtatgcactttttttttttttttttttgagacggaatctcactctagcccaggctggagtgcagtggcatggtctcactgcaagctccctctcccgggttcatgccattctcct

SEQ ID NO: 15297 - DNA, 1041 bp, Homo sapiens
catgagccactgcacctaacctggaataattttttgaaggcatattcggtactgttgtactagggtaaatcacaaacttgcccccttataccatactcggatgaaaagtgaaatctagttaaagtgaacaccagaggtacactcaaaacagaatgggagaaaaagcaaaagattcctggaagttatctagaaaaagaatgggaatctttattttttaaataagtgcaagttttattgatgctctctattgtatgagagctattttttcttctttgctgctgtcagtgtacggaagctgttcactataggttcagtttgatttattccttgttaattctacaaatttattatttttatgggacatgttgtgtttggggatataaaaaatagtttattatgtttaagggcttcgcagcttagtgagggagacacatgaatgaaataatgtccatatatgatgagaggtaaacacatatcctatagaagcatgccaaaataagctgggggcgttggtacctgcctgtaagcctgtagtcacaactaattggaaggctgaggcaggagggtcccttggcccaggatttgagagactgtagtgtgtgatgtgattatccactgcactccaggctgggcaacataatgagaccccatctttttttttttttttttttttgagacagtctcgctctgtttcccaggctggagtgcagtggtgccatcttgggtcactgcaacctccacctcccgggttcaagcgattctcctgcctcagcctcccgagtagctgagactacaggcacggaccaccatgcacggctaatttctgtatttttagtagtgacgaggtttcaccatgttggccaggctggtctcaaactcctgatctcatggtctgcccgcctcggcctcccaaagtgctggaattacaggcatgagccactgcacctggccttaaatttttctatttttagtagagacagggttcagtagagatgccatgttggccaggatggtctcaagttcctgacctcaggtgatcca

SEQ ID NO: 15298 - DNA, 2445 bp, Homo sapiens
ggtcttgtggtttgatcactcactggttttgagaatagatgagtcatctctagtatagatcttcatggtaggccattcaccttcagtctattactcatagcaaaaactccacggacttttttaagtttaaaacccatgaatctgcttaggttttataatctcagtatttgacatttgctcactatttcatctctatttgttggcccggtttttctgtattttctttgcccaaactgctcattatcaagatgaacatttgggatatactctttttgagaccctcaagggcatattgacatgaatttagttaattttagtcatctattgatgttgaagaattgtgaagacagtcactggtagaggtgattctatggaggctatcccatcccagtggaatgttaatgctttaccaaaatgtgttagctgcagtagacagatgtttctgtcttgggggtttagggcacaacatttctgaggaactctgactcaatctgtcccttctcctttcacagggcagcaaggcgaaccccatccctactcactggagctcagctttgatttttaacctcccttccccacccttccagaacacacacattccattccaaaactgattttataaagacattttaaacataatgatgcaacttggtgtgcactacagcaaatgtacaggtgttttttttttaattgtttccaaaaccgggacctggatttaagatgtaatttttaaaatttctatttctattttttctgcagcagttgggttagaggaggaggagccttttagcctctcataaactgacctctctacttcctcgtgtatttttaagattgattgatgatgtggaaagggctttgcttgtctgctactgaaaactttatccttgcggtttttgtggaaactgcttttggaaagagaaaagaaatgaactttactgacttgacatttttgcacctcccgtttttctaatctgggctatttttatttttgtttttttacagtgagatttttttgatcttcagctacagtaagttattccaatttttttttaacatttttcctgactttccgctgatttcctttttattgttgttactagttactattacttattattattatattaatacttatgatggtgatgatgatgatgataatgacactgatgatttttaaccggattaaaatcgagtttttctgaatgtttctaagaatttctccggcctcctgattgactttggagttttgcatcttgggagagaaagcgaaggcattagtatttttaagtggtttgatcacgtaaaccttttctctcccaaccccacccttgccctcatccccttccccacactgaaaagaattttactggctgttaagtctatgaccttatttttcctgatctttaacttaactgttttagagcatctctggacgtctgtatttttaattttttttatttttgtttttttatttttaatctttcatttgttaaatttttaaactgtgctgcaataaaatgtgtgtggtactacttaacacttatgatcgtgatggcattttccctgaaagccatcttcctcctgtttcccttgaaatcccatcctgcttttcctgtacactacccctcacaaaccacaagctgcagcaacatggatgcccagcctggagcagcagcagccaggatgacctggagccaggggggccttcggaacagatgcacacccttcctgggtgatggtaagaggtgtgaggtccacttggattcattacaaagactaggaaataaacccgtttaacagtttagctgatgtgtataggtcatagcatctggaagtgtttgaaacttttgtgtgtgcatcttgaggtgtttcccaagggggaccacctcagttatttgtaaactaatggaataatatgagttgctaattaacttgggctgattagaacattttggatacttggaaagagcagctgaagtttaaaatgaaagtggcttgttttaatgattagcaacaagaaaacatattggggagtccctttttttagattgttacaaatcagtaaacattttctgtcatttaacatattccttgggtttgtgacatttttggattatattctatttagactttttatctcattaatatttcacaagagtcaaaccataggagatacaacataatattaaaatgctgtctcactggagggcttttaaaaatttgaaaaaaggtaggctttttgacctcacaaagcagggaaatctgtttaacctctacatccaaattaggaactgtctaaggctgaccccttttacagtggtgactcaagacccagctagattttgggaattctaatgtgaattcatagagttctaatgctagattaggaactctaatgtgttctgatgttaagaaggagtgtattctgtgttattcacagga

SEQ ID NO: 15299 - DNA, 1020 bp, Homo sapiens
ggcgctgggtttttcgggaagcgagagggggtgtgggagagaagatgtgggaatccttccccctaactaaccgggccctcatttattctgcttgttttgggggattaggttgaagccgggggcagttttataggcctcagcctctgtataggtttaacctggtgtcctctaggccacgatcgccagggaaaatgtccttttttcgctcttcctgtgttaacggctgctttcctttcattttctacgaccgcgaggactacgggatcatgaaaatgaagatcgtgatgctcattaatatagtcgaagttaacgtagcgccgatgccttctattacctccgttcttcttacatgtaaaaagtgggggaggggaagggggaaggttaccaagtagatgtatcgcgagcctttaaatcctggatcgtgccgcgtggcctacgagaaaggtttaacaaaagattcagcattttactgataactttttattttatttctctctatgagcaaatgatggagctcgaagtagttattttcacttacatttgtaaaaggaaatattgtgatataactatattaatatttacagctgacttttcatctgcaggttacaaaacacttgaaatatataagttagtggaactttgcttgaggtaggtattaactctctttctcagacggaaactgaggcagaaaagtgttggttgctagggtcatattaagtcagtagcagcactagtaaggaatttgaccacgaggtcagtcgagtggtttttacctagttaatggaatacctagttaatatagttctaaaactactgtattgcaatctttgccaagaacctgatgacggaaaccacgaggtaactggaaattcccaaattgcgcttaagaaaaatactacgagacttgagaattttttaacgtaacttcctaagtgtaagatgacaaaatttgactttcgggatattctggcgttaattttcccgtccgcctaaatgtgggcaaaaattcacagctacgtt

SEQ ID NO: 15300 - DNA, 1046 bp, Homo sapiens
cataagaagcagtgatactccctggctcggttattttctccatacaatgcacacatggtacaatgatagaaggcaaaattgccactgtcttcttttttttctcatatatctaaggaagatatatcaggttgtgcctcatgtaccgcttctagtgaaatgtagaggaaggctcaaaggagtcaacatttatatctggaagggacaagtcatgccttgggcctagaataccctgatgagaaaagagaagaggaagggaggccatatctacaacacagcctctcggcactgctgctccttattttaactttgtcttgcattgtcctgtatttatcacagtttctgttgaacagcttttcaagtatttggggagtttatcttgccatcctccccttctggttctctgcacccacctgtcccactgcagttccttccgtgctctgtgactttaagagaagaaggggggaggggtcccggattttatgtttgtttgttttttctccttagcagtaggacttgatattttcaattttggaagaactaaaagatgaataaactgggttttttttgttgtttgtttttgtaaattcacctgtgaccgttcattttcagttcttgaaagcaagcctgcttcctgcctggtaaagtgctaaggtactggagaaaaatgcctttagctagctagttttacaaatgaaactttcatcattctaaactttcatcattagattgagagacactagacatcacagtaaaccaaattcatgttatagcaagctaactttataagagactttttactatggttccctcagagacttttagattggaatagcacttgttccttcatgaaaacaaatcttcagtcatctccttgtaaatagcatggaggacagcagctgcttgaagggaaaccttcagccttcctattggggtagccagatcttcagggctaacaactgttgggaaagggaaaaaaacagcatcactcagttgaacactttgatacttggtatttgtcaggttaggtactggggatgctaaatgaa

SEQ ID NO: 15301 - DNA, 1026 bp, Homo sapiens
tttcatttttgatatttacttagacttaaaactcattgaacaaatgttacttttaaagtctctttagggcaggcataatggctcacacctgtaatcccagcacaattagaggccaaggtgggaggaacacttgaggccaggaactcaagaccagtctgggcaacatagcaagaacctatctctcttttttttattttttattttttaagataatgtctttttaaatagtttattttaaatggttccttcacatagtttccttgagtttattctccttgagggatgatttttgtatcttgcagatcctttttctgtggcttcttagtatgttgtactgcctcagtctttcaaaaaaaaaaccaaaaaacagcttaagttatcttttatgtagtgatttagatcatgaaagttatttgaaatattattgctttgggggaaatacttatatgctaatgattcagtttctccctgacagccaccttttgtggtgacattggatgaggtagagctgatccactttgagcgggtccagtttcacctgaagaactttgatatggtaatcgtctacaaggactacagcaagaaagtgaccatgatcaacgccattcctgtagcctctcttgaccccatcaaggaatggttgaagtaagtaaatctgccatcagtctcccatttagcccatgagccctgttttatagaatttgaatgtggtatgttgtgcataaaatctactgatatacttaaagtgagactgccttttggttgttacagaccaggacttgaaaacttgagatctattagataacggagctgttcactttttcttgaattcccaacaatagcttgtgcatacttaacacaaagaaaatcaaaatctaagatcttttttgttttcagtgttgcccaggctggtctcaaactcctgggctcaagcgatcctcccacgtcggtctcccaacgtaccaggattacaggcacaagccactgcacccagtcaatgtagagcatatttacaatagcttttga

SEQ ID NO: 15302 - DNA, 1049 bp, Homo sapiens
aaaaaattgtagctcctgacgagaggttagaggttagaaggataaaaactatatttattcattgtcaaacattttagtgtccaaaagattcaaagcattgcccagccgtttactaggttagaaaatgaaattgcctcttttaaataatgtgtcttcattctccttttaattctaggatggcccagctactgttctcacttctgtgaagaagaaagtgaagaatgtggggattttcctaaaggtaggaagaagatagataagtagtataggaagtttaggatataaagaagttaaataatattggctaaaataattaaaatttcattttttgattatgactttttccatagaatgaagatgaggaagaagaggaggaggagaaagatgaggcagaggaccttttgggaagaggttctcgggcagcattacttacagaaagaacaagagtaagtttactattttaaattacattgatctcggctgtcatatggctcacgtgttgtgataaattggattttccattcaccagaatgaaatgactgcagaagagaagcgaagagcacatcagaaagaactagcggctcaactcaatgaagaagcaaagaggcgattgactgaacaaaagggagaacagcagattcagaagtaagagttttcactgagcagtgagatcatctgagggttctgtgggactgcagaaatttctcagttgtttttttatcccactccagagctcgcaagtctaatgtgtcctataaaaacccatctctgatgcctaaggaaccacatattcgggaaatgaagatctacatcgataagaaatatgagactgtaataatgcccgtgtttggcattgcaacaccgtttcacattgccacaatcaaggtactgacattcagtgcatcaggtttcatccaaactgttgcttaaaatagtaattgtatttgccataaataatctgcattcatcatgtctcccacttttgactccttcagactctgttcagttactgacatccctcttgtcttgtcattctccttcctctttca

SEQ ID NO: 15303 - DNA, 1109 bp, Homo sapiens
ttacttagccaaccatcataaattcactgcacacagaagtgctttatttataacttcttatttctttacatagaatattaaaagacaaatgcaagggtttgggattttataatggtaatcatttttacttcatcaaggacttttacgtgaaactggccttttttcctgagtgtgtagtaatggagaagtagtttggcgccactaccttgactcatacaaagggactagcagttttaagtgccattactatttcactattggtgagaactaatggtaaaactttttaccaacctgaaggaaaacatttcttactgaaaatcaatgagaaaaggcatataatttctatgtagtgacttctttgcataatatattttgttgtggtagagaaatacaacagaacactcagttgctatcatatatccttattaacaagcagaagccttaaaaatgtggaagagtcttatgtatgcatttatcttgactttataggggaagtcagaattatagctcagaatgaccagtgttttggctttatagagctattgaagagtatctgatggttggagaactcacacatcttgatttcaaaacttactacaacgctgtagtaatcaaaacatcacggtactggcctaaggataggcatatagaagagtggaataaacgtgaaaattcagaaataaatcctcacatttatggtcatttaatttttgacagggatgtcaagataattcaatgagaaatgaatagtcttttcaacaaatggtgttgtaataactagatattcaatgtaaaagaatgaagttgggttagtcctcagaccatacaaaaaaattaattgaaaatgaatcatagacctaactgtgacagctaaagctatgaaacccttgtagaagaagtataaagtaaatctgagtgaccttgaattaggcagaaccttcttagatatgacaccaaaagcacaagaaaatagataggccaggcacagtggctcacacctgtgatcctagcattttgggaggccaaggcaggaggatcacttgaggtcaggagttcaagaccagcctggccaacatggcaaaacctagtctctgctaaaaatacaaaaa

SEQ ID NO: 15304 - DNA, 1050 bp, Homo sapiens
aattagctgggcgtggtggtgggcacctgtagtcccagctactcaggaggctgaggcaggagaatggcgtgaacctggaaggcagagcttgcagtgagccaagatcgcaccactgcactccagcctgggcgacagagtgagactccatctcaaaaaataaataaataaataaaaataaataaaactgcaggcaaggcatggtggcttacacctggaatcccaacactttgggagcctaaggctatcagtcactagttaaaaactcttcatgattctaaattgctataaaaatgttaaatatagtaataaacccagtagttgtccaagataacattctaactttgttttccattatgagcaatatagaacatattctaattattccagcagcatataaagtaagcataaaggcaaaacaaatctcattttcttcaactatgaccctttttcttctaggctatgagaaatataataccatgagggcagacccagccttatgtttcctagaaaaggctggccgaccagatgacaaagcaattgcagcagaacatcgagtgttggataacttctctgacatagtagaagggtaagcattagtatttgttcttttaaaactctaacttgtgccgtgaaataactctagccttgactgaacccaatgggattcttaattgtaattatactcaaaagtgatagatccttagcaaaaataggaccagcagaaaggactccataaactgcataaaccacatgttgccataagatacatctgagggtgaaaatgaatgtcacttgtaaatggcttatttgatgttctatttggtttggtttacaacactcttctgtacagctacagtagctgagaggataactggtctcttgaaagataacagccagcagctctcatacgttgcttctgtggaagagccttaggcgctttcagccctggtttatcatctcccaatggtacctgacacataaaggtacttattttgcctgaaaacatgtcccaatgatgagttgccatgctaatactgagccaccaggtag

SEQ ID NO: 15305 - DNA, 1042 bp, Homo sapiens
ctcaagtgagtgctccttgctactgtgatgggacgtgcaagagtaagctcaagtgagtgctccttgctattgtgatgggacgtgcaagagtaagctcgagtgctccttgctattgtgatgggacgtgcaagagtaagctcaagtgagtgctccttgctattgtgatgggacgtgcaagagcaagctcaagtgagtgctccttgctattgtgatgggacgtgcaagagtaagctcaagtgagtgctccttgctactgggatgggacgggcaagagcaagctcaagtgagtgctccttgctattgggatgggacgggcaagagcaagctcaagattgagtactccttgctattgtgatgggacatttgagggcagagcactcatttctaagaagcattgaggaacttatgtgtatttaccagctacatagttcaaggtgatctattatagaaaataataaggcctttcttttttctgtcctaatgcttataggatttgttaaatggaaaactgaaattagcatattttaagaggaaaacacgaaggcacaggaaagatagttactgtgctgggagttacctttaaaagctgtgactctgcattcatatatttgtcctgattttgtattactgtagtgtgaaagagatttctcactacctcctaccacccacatcagtaaaaagagaactactggagacatagctgtcctgttcttgcatctcttctgtgaattggagatttcagcatctaccattagctttaagcagtgttgacagaaaagtgatggcttgccacataattcttgtcataattgagtgtcctctctttcccttccatgtcctgtatcttctcctttcttactagcttttactccctgggattcttaaggctttgtggtgtaattataataatgctttgtatttgtaccggatttttcagcttttaaaagacagttttatgtttcttatttgagcctcagtaactgtcaggacaggtattatctctctaatgtttacaaataatgaaactaatgctcttgtagtg

SEQ ID NO: 15306 - DNA, 1025 bp, Homo sapiens
cattgctgttgccctcagcaaccacttattcttgaatgtggggccattctagatttatatctctgaactgaggtgcagacttaattctttcattcatggaaaccttattttaattatattattaaaagattagagagggattgttgggtttgggatatgagattatttagtatttatctttgaattgttttatttataatcttttcctaatattattgtgaaataaaaatgatttgtgatatcctttaaatgatagttcagaaatgacttgaagaaataagtgatcagtcctcccctctccccgcccaggcagataaaaggtaggccaagagtagaatttgaatttttttaccgttaggccagagaccaatattgggtatattagttgtaatttttctgaggtaatggagatgtatattaatggaagcatagcaaaaagatactaaagtttattttggcagaattcttggtttttctcacccctttcccaccaaaagaatacattttaaaaagtaggtgtaggttcaataagatttagtctgagcttgattcttgagggattaaagaactagtttctagcccccctgcttcagagctggattttatttaggccatttaactacaagcaagttgaaattgtagtatctttgtttctataggctggctcttcccaaggggcctcttctgggctctctgtagttaaagttctgagtgccagtgaagtggcagctttgtcatcaccagcaagctctgctcctcattcggggggaaagacaggaatggaggaaaaccgcagattggaacaccagaagaagcaagagaaagcaaatcggattgtagcagaggccattgcgagagcccgtgcccgcggtgagcagaacatacctcgagtcttaaatgaggacgagttgcccagcgttcggccagaggaggaaggcgagaagaaacgcaggaagaagagtgctggggagaggctgaaagaggagaagccaaagaagagtaaaacatctggtgcctccaaaaca

SEQ ID NO: 15307 - DNA, 1034 bp, Homo sapiens
gatatttctttttcatatatttgggttttatggtgatatacttccctgtctttgatagcttttcttttttccactagtttcatgaacttaaaaccctagacatggattttgtgaacctactttcagccattcataagacatgttttcaagataggaagctttttaccatctcatgttagaatcaaaggataccatttagtttctgtgaggatcgaatggtttactccagataatgcgagcaagtataattcattaactgttttttgattagctactatatgtgctatgtcctgctggttcttaggggatccacagataaataaaacatagtccccaccatccaagaactttctcccagagaaagaggagctgggccatggtacagagttgtggagggtgtacattgcatacattcataacaaatttttatatatttagtatggcagttttccaggcatcttgagaagtgggcaactttttacaatttgcgcaaaggaaccatttgggccttcagaggatatattacagacttaggtcattataataaaatattaaatataagtgttttaaggtataaacaatggtgtgggtatttaaaggaggtggagggatcaagtcatcacaagttgctcagttgttaaagcgtcagaggttcagggctcacttaatggagtagaagacctttgagggttggtaggattttagctgcgagagattattggcattgggatggagaggacgtgttccaggcagaaagcacagcatcataagcaaagtcacacaggtaggaatcacattaagggaattgtgtagtctagttggactggaatgtaaaatatatgtaagagatggtaagaggaagttgggaatataaattggaaacaatgttgaatcccttgcaattgaccttttttatcttaaatatgagaaagttttcttgagaggggacttcagaacaaaaatcccattatagattaatatgttaactagaataaaggttgcaaaacttcctgggtaaaattgtatgatcactt

SEQ ID NO: 15308 - DNA, 1048 bp, Homo sapiens
ggcacagctcgttttctccttcagggcttgtcgggcctctcggcctgcagcttccgccctaacattgctcctatcccgggcatccacaccccccaccccccgcatcttcccgtcttggccatccccaccctggagggcacccccgctagctccttacctcaagtgcatgtacctcatttccattttggggtctccagttaccagaaatcttccgcctctgctgtatggaccttactggcaccaaccccggcagtatgagcaggtaatgtacccgggtcccccccacccccaccccagtcgcgttttcctctccatcaacccctcacttcctcacctcgccctttcccttttttcatgagtgcagaatctctctagtttcttctttaccccctgaaaatacatgtctttagctgtcgtagttgcctattttgcttttccgatttattcacaaggtcttactttaccagccttatattcccccaaatgaccatacccttgattgaggtgtgagtgctttctctttcagtaattggaaaacagaaacagagtagccacacatttggcagtgagaatggtgaagacagagaaaatggcctaggatcttgatctacttaggaaatctgagtggctccaatttggtcctatgtctttccatcctgatcctttgctgaccctaaattgtgattgcattcactttggatgtttatttttcatttctgtataagatttgagacccttcgtgtctcacgaatgtcttcatggtacagttttaaaatacttctcttttaaaattatgttggtgattttcattttagccctttggattattttattttcaaggtatttctcatttaaattaagctgcttctacccatcttatgtttcagtaacatgtatttatgtctatctgcaactgatcttcttgaaaggatacagtttccaacaacaagatttgttctttgaagtaaataaaatagtttattcttttctgaacctttgagcagctagaggttaagtggtcatgagtggtactttctaaaagtgcaca

SEQ ID NO: 15309 - DNA, 1024 bp, Homo sapiens
gtcaggagttcgagaccagcctggccaacatggtgaaacctcatctctactaaaaatacaaaaattagccgggcatggtggtggacgcctgtaatcccagctacccgggaggctgaggcaggagaatcacttgaacccgggaggcagaggttgcagtgagccgagatcgcactactgcactccagcctgggcaacagagtgagactccatctcaagaaaaaaaaaccagcaacaaaaaagagaaactactttattgatgttttttcctcctgagcccctgctggtcttattgaatgtgtcaccttgtattataattgtttttatttgtcactgttgtcatactgcctactctttaccctcttcccacatacatacacaaatgcactcttacttactgtgagttgagggtagggattatgtcttacttgtttttggatccctaatgctagcagattacttggcatgttacatactcaatacatattgaagtaataagaagcatttgatgttgaacttagaggataataagtaagattttggtaatgcaaagaaagaaattaaagatgtgtataatttgaaggcagcaatattaggctcagattagaaaaaatacgacaatagtaatttgtctttttttggctagcaagtatatgtagacaaatggtagaaaataagacaggaaatataagatattgtcttaagtaattgggagcctttgaaaattttccagcacaagtttgatttggccataccgtgttttaggatattaatctggttgcagaatggattagtagggtgagtagagagattttttatgaggcttttctcttacataagcaactacataagtaagggagatggcagcagaaataggagtcagatatatgaatcctaacttgccacttagtttcatagtcaaacattcaactctctaagcctcagttttctcatctatacactaagaaggttgacagagtctttggcagctccaaaatctttgttatatattgtaagagaatcaatg

SEQ ID NO: 15310 - DNA, 1035 bp, Homo sapiens
aacctccactttccaggttcaagcagttctcctgcctcaacctcccgagtagctgggactacaggcatgtgccaccacacctggctcatttttgtatttttagtagagacagggtttcaccatgttggccaggatggtcttgatctcttgacctcgtgatccgcccaccttggcctcccaaagtgctggattacaggtgtgagccaccgtgcctggcctaaataaataatttcgtaagcatatacaatccacttcccactaagaattagggtcaaagacattctatttgaacacttgcaattacctagatctagttggcctttggttgatagatcctctgcctcggaatttcattgagtttttttcttccttgcctttgggtgtctgcttgccacttcctaagaattcttgtagaaggcagtttcctctacttgcccaagagcactgagtacttctctactatcctattattagcttctatctcttagtgtaacttcaaaacttttaagagcagtgaagttggtcagggacatgtggccacttattattacctaaagaaaacatttgttccctgttcattttattttaggggccagatctaacattgtagtgtctttcaccagatagacttctactgtttcatcaaactcccttcttaactagacctagactttctactccaatcaggctaatctacttactgaatgtgacatatttattcctagttccatacctttgcacatgccctactctccactaattatacttaaaagtccaaaaattttttctttagtaacagacttaggtactgctaagcagttattaacacaatattccttagttttcatatgttggttattcatatgtctatttatatgtatatttatttttatgtatgttactatgtaaatatggtttgcagttgtttttgtgtggaatcttgtctttccgtataagttgtaagctccttgagagcaggatccatgtcattcctttatttttataaattattccccctatcattcctttacagtg

SEQ ID NO: 15311 - DNA, 1719 bp, Homo sapiens
cctcattctttgtacctgaggaacatagattctctgcagctttctcaaggggaaccctctccagcttccctggtgtgacccttcttccccctcctctctcctctccctttccctttggtaggtgcacctgagcacctacatttggcattgcagcctagccaaaaagggctggcagctgtctctggagggcccagtgccactcctctggggtgacctttctgctcagctggtgggtatgggtcccctatctttctagaaccagtatgtggcattcctgtcaaatggcctgcccatgaagccctggaattccagctccacctccactaccactccaagcctggccccaccagtgctgtttggcctaggaactgtggctgggaaggtgcctccaacaatgggatccagggaagccaaggagaagacagcccccctcctatttcagcctcctgcacccaaggcagtgcctgagaagcccatcatagacaagaagtagcaaactgtacattccttcttcctccccctgctccagaaggtgccggtactgaagatgctccagtaattggtgacccaaccctaggaagtagggagaaatgaaggaagggcataggaaaattttcccagtaaatcccctgatggtcacattaaggtaaaggttttggctggtcagtgtgccaagacctctccagcttctcattcatgatgacctctcaaagttgggaaacaagctgatttcttgccaagaggtctcccaggagatatttgggaaatgtgaagttcgtatctttaaggagcatttttggtcagcatggttgatgaactaatgatgagagagttaaggaatgttgctagaacatagggcttgctggtacctatgtgactaagaaagggacatgatgtaagggaaaaggcctcaaattcttgtgaatgtggacattctcgttaatattcttttgggctaatagtgacatagtgtgcagaggtgtaccagggatcatgggggatttcctagcactagtatgcttctagttttagataactccctcctttattccctggccccttgtattttccttatcttcctctttcaagacccctacccattttgcctatccgtaggctggggcttgtgtctttgtcattgtctggttcttaagagtcccagctccaggtggcgtcctccctgcctctccgtcttgtaatgagttgtagtatttactcttaacataggatcatttggaacaggagttctgaggaggagagagtgagggttttgctattgactgacttgaacgatggcttctcctcaagctgtaggctccagagcttcctaacctagtaaaatgtcaagaacagacgggagatattagtgtctttccctctatcattaaaggtgttttaaccaaatatttatgtgtttctccttatttcatgattacatagccagctggggtgtgatatgggcattccccaaaattgagattcccttcccacctacatctcctgccaaagctgaacatatggtgttgaaatatttactttattcagccttgtcctaagacaaccttcagttaatgtaacttctctgtggaaattgttccctgtggagtttgtatttccaaaaggtaggcatttgcccactgtgtccagtcattgtctagattttctctacctagaaccttccaccaccaggcttttctgtgggttttgtttggaggttgg

SEQ ID NO: 15312 - DNA, 1033 bp, Homo sapiens
agcatcctagaatgtgagacttggaaggaaatttaacagctgcctgggccaatgccctcattttagagatgaaaatgctgaagctctgcgggataaatttgctcaaggtcatgtagataggtagaagcagagctgggactagaactccggacacctgagttccactcccgccttgtgtgactccctttatgtgactcaggagaacaaggaccttctttgggtggtctctgtccccaggggctctgccagctggctcagggtgtgattattcctgctaattatacaaggatgagtccacataggaataaatcacaccagggaagtgtttggccttgacacattgtttatgattttagagagaattatagaacgttctcatttatttaaaaattttatttcttaggctgcaggcaacagcaattgatagcaggggaaatggtccatggaaaagacagaaatggaaaaatttgccctttaccaaaaggacaatccaatggagaattggctctgattattctttctctgcaggactcatttcagggaatgacatcgagagcaggaatgggaaatacaaaatggtgtggggttgcctcctgcttctgctcccttggtaaatattgctaataaacacatcactctcttcctctgagtatagatgtggcctcagaatctttcttaccagcatgctccgcatagtctctaccaattgttagctcttgataatggagatataatctgtttgccctccctgccctggggaataataggagaaaagaccctgcagatggctttagaaatctggttagcaagagtcaggtcaggtcccacacagccccatcataaaaagtatcactgacctggttggaccaagactgttcttgctacaggctgctccagcggtggcaacaacaacaccatggagtgtcccttcttcctcacagttttccttcaaacgctggctttgtggagggcattgggcaaaaaaccatagtagggttcttcacacttgttcttgcccatggggccctcagca

SEQ ID NO: 15313 - DNA, 1071 bp, Homo sapiens
aacaacattaatctccttgtacatctcgatcagagctatagggtgacaaggtgcactatcaatggtcagtaattttttttttaatggagactgagtcttgctgtgttgcctagactggtctcgaactcctggcctcaagtgattttcctgccttggcctccttaaatgttggggttacaggcatgagccactgtgcccagcctgcaataatattttgataggaatctttttttctgaggggtaggtatcaataatgagcttaacatattcagcaaactgtagggtaaacagatatgctgtcatccaggctttgttgttccctttatagaacacaggcagagtagatttcgcataattttttttttaagagacaagatctctctccgttgcccagactggagtgcagtggtgtgatcatggctcactgtagccttgatctcccaggttcaagtgatcttcctgcctcaggctcctgagtagctgagactacaggtgcaactaatttttgtgggtttttttgtagagataaagttttgccatgttgcccaggctggtctcaaactcctgggctccagtgatctacacagctaccttggtgtgtcccaaagtgttgggggttataggtgtgagccagcatgcctgtcctgacagttttttttttttttaaagcactttaaatgtattatcccactgcgttctggcatccagggtttctgctgagaaaatggccagtagtctttttttttttcttttccctcagagtgattggacttcagctgatagtgttattgaggatcacttgtacattatgagttgcttctctcttgctgctgtcaagattctctgtctttcaacagtttgattataatgtgtctcagtgtgagtctctttggatttattttacttggagtttattgagattcttggatttgtagattagtgcctttcatcaaatttgggaagtttgcagccatttcttcaaataatctttttgcccctttctctaacccctctttgggaatcgtaatgcatatgttggtctacttaatggtattccacaagttccttggt

SEQ ID NO: 15314 - DNA, 1050 bp, Homo sapiens
gaccaagccatcctgagggcatggacattgtctctgaggaaattggggccacccttaagataccaagaaaagctcctgcccatggtcccactggaaatggactctgctgagcaaagccaccagttgaagagaacagaatccacacctgcattgaatacctgtttctccatgtgtatcgtctctgagattaccttcttgccctttccaacaccttagtgattcctcaatttctcccccattgggaaggccatagggcatactgaaggaactgacctctctccttttcctgtacctttaacctttagtctgtcaaggaaaacccttaggacctctgaatcaagaggactgagtttgtgggtgaaccttgaaggtgctctttctgctacaagggccctgggagatagcatggacgtgcattgagaagccagcctcagaccttagcttgaagcagcttgaggccagacctactgtagcctcagcatcttgctaggaggcatggaagtgatctatcctgccaggaggcctcagagtgatctgtcctgccaggaggtgtgagagtgatctgtcctgtgaggcatttaggggctttcaggaatttagtaaaaggtggagtatgcctttccagtatcttccatcttcctttgtatacttgtccttcctcccatttcctccctttggcccgaggtaggaggatggagggaggctgctactctaccacttcctgtgtgcctctactgtggcctcaaccctggcaattatagctactcccatcccttacctgggcatgtgtgagcccttctcactggattttatacccttgtgtctgtgtacataaatatatatacatatatatatacataaaaactttgtacaaaaggcaagcctcctccttgtggcagctgttgcccatttgtgtgtggtctttgttgtgtgtctgacaacttctcattagcccaacttatgatgtttctagggatataaaacattagtaacatcattgtgtttatttatttaaccacctttagaaagaaaaatgaaaactcacacctg

SEQ ID NO: 15315 - DNA, 1033 bp, Homo sapiens
acagggtcacacattgctgcccaggctggagtacagtggcgtgatcttggctcactgcaacctccaccttttgggttcaagtgattctcctgcctcagcctcctgagtagctgggattacaggtgtgtgccaccacacccagctaatttttatatttttggtagagggggtttcgccatgttggccaggctggtctcaaactcctgacctcaggtgatctgcctgccttgccctcccagagtgctaggattacaggtgtgagccactgcgcccggactatccttgactgttccaagccacaaagtcgaactagttcagatctatagggtgtaaaaataaacctagagtaagtgacagctggtaaggtttctttgcagttcaagaaacagaactgaaatctgtatatcctgaagtctctttcttggagtgggaaagaaatgtgtggtgctggaaagggaggaaaaatataaaacagattcttacatattaatatcctctccccagatctgacaggatggcatctgatgactttgacatagtgattgaggccatgctggaagctccctataaaaaagaagaggtaatattttccacctcactcctggaattgggttaatgagaaagagtagttgtcgatcatcactttcaactttcaacattttatgaatcctctttccctgcttatttattatgtagaataactaatcataaaaggcatagtcttagtaagctttgctggagactatggttaagagccatacttttagagacaacctcagaaaccggagtgggcacataatgtggtgttggtaatctgtgctttgctcaaaactcgaagtgacacagtagaaagtcactgtacctcagacctagcaccaatttcttttttttttcttttgagacagagtctcgctctgttgccaggctggagtgcagtggcacaatcttggctcactgcaacctccgcctcctgggttcaagccattctcatgcctcagcgtcccaagtagctaggattataggcaagcaccac

SEQ ID NO: 15316 - DNA, 1800 bp, Homo sapiens
cccaggactttgggaggctgaggcggatggatcatctgaggtcaggagtttgagaccagcctgtccaacatggtgaaaccccgtctctactaaaaatacaaaaattagccaagcatggtggcacgcacctgtagtcccagctacttgggaggctgaggcaggagaattgcttgaacctgggaggtggaggttgcaagtgagccaagatcacgccattgcactccagcctgggcaatagagcgagactccatctttttttttaaaaaaaaaaaaaaagagaactgttgatctgggccttattttacactagggctctttggccatataccataatattccagaatcttggtttgagggctgtgtctgatggtctgacttttctcacagttggaggtgcagttcatcatcacaggcaccaaccaccactcagagaaggagttctgctcctacctccaatacctggaatacttaagccagaaccgtcctccacctaatgcctatgaactctttgccaagggctatgaagactatctgcagtccccgcttcaggtgggtctggagtgcacttagaggaggaaggtgggatggaaaatgtttcttgagaatatatgcctccaaatcttactaaaactcagaaagcagtggaaagtttttgatattttagtgcattgtcctttgccagaaactggctaactttgtccttttcctcattcatcagccactgatggacaatctggaatctcagacatatgaagtgtttgaaaaggaccccatcaaatactctcagtaccagcaggtactgtgtggtgcccagggtgaggaaagcacagggccagcatgacctggggaggatgggattacaaccatgggatattctctcctccctccaggccatctataaatgtctgctagaccgagtaccagaagaggagaaggataccaatgtccagtgagtgctttcccctcaatctcagggacttgcatacctatatctgtatatgccaagtctgcttgactcttccctttctttcttagggtactgatggtgctgggagcaggacggggacccctggtgaacgcttccctgcgggcagccaagcaggccgaccggcggataaagctgtatgctgtggagaaaaacccaaatgccgtggtgacgtgagtagcaacctgcttgctgggaagttagtcctcattgccaaatttccttaacatctctccttaccttattgtctctgtttcaggctagagaactggcagtttgaagaatggggaagccaagtgaccgtagtctcatcagacatgagggaatgggtggctccagagaaagcagacatcattgtcagtgagcttctgggctcatttgctgacaatgaattgtcgcctgagtgcctggatggagcccagcacttcctaaaaggtgcccccaggttggggtgtaggtggagggtgatgatgggtgagacagcaacctgggaggagggtacagggtttaggggaaagtgggttggacctgggtcacatcatatgagtttgagagccactgcttcactgcctctgtgcccctagcaaatgaagtcatctctccaaaccttagtgttcatatttgtaaaatgaagggagtgggctgggcgcggtggctcatgcctgtaattgcagcactttgggaggccaaggcgggaggtcaggagtttgagaccagcctgggcaacatggcgaaaccccatcactactaaaaatacaaaaattagccaggcgtggcggtgcacgcctgtaatcccagctactcgggaggctgag

SEQ ID NO: 15317 - DNA, 1047 bp, Homo sapiens
aaaaaaaaaaaaagtttttcatttttgtccactactttctgaggagcagcacccttatattgtgccttctctgcccgggctcttagggaccgtttggagggagccattcacctacaggagcaggacatggagaactcaagacaggtcctgaactcctatgaggtccttggggaggagtttgacaggctggtgaaagagtacaccgtactcaagcaggcaacagagaacaagcggtgggccctccaggagttcagcaaggtctaccgttgagctctggcagggccaggagacatggcttctgcatagctgctgcctcctaatcttcctgctagtgggaccaccttcacctggggctgccttcagtacaagggagtgtggaaatgcttacgcttgaaacactgcagtcatttaggcactctcctggtttctctttattttttatgactgggcctcttctggaaaatctagcaaggagatttatataatttttatgcatagctgtgtgtcagtgtcagccctgtattgtatttgattatctcctgaataaagttatgatattatatcttaggattttagtcattttccttgggcaaagattgaaaaagaacattgaaggctatatgggtaaggagcggggaactgagtggatccaaatagaaacagatacatgatgcttatgcaaagagtaagaagtagacatgccagcttgcctacatcaagtcttagagccttcattttggaagagtacagtggattaaatttgggcttgctcttgaagaactataatctccagaggagtgctagatactcaggcaggtagggaactattttctcactatgggtatcagtgtgggagttataataaagcagctgaggctgggagcagtgactcacacctgtaattccagcactttgggaggccaaggcaagaggatcacttgagcccagctgttcgagaccagcctgggcaacgtagcaagacccctgtctctgtgaaaaaaaattttttttttttttttttagacagagtcttactttgttgccagg

SEQ ID NO: 15318 - DNA, 1025 bp, Homo sapiens
actcctgacctcaggtgatctgcccgccttggcctcccaaagtgctgggattacaggcatgagctaccacacttggtctccttaaaccatttctatgacttaagaattaaggtccgggccgggcgcggtggcttacgcctgtaataccatcactttgggaggccgaggcaggtggatcatgaggtcaggcgttcgagaccaacctggccaatatagtgaaaccccgtctctactaaaaatacaaaaaattagctgggtgtagtggcgggtgcctgtaatcccagctacttgggaggctgaggcaggagaattggttgaacctgggaggtggaggttgcagtgagctgagatcgcgccactgcactccggccgaggtgacagtgagagactccgtctcaaaaaaataaaaagaattaaggtccaaatccggaatcaaaggtaagagtgaagataatttatttaataattatgagaaccagatgccctccccccccccgcttttttttttttaaaaactctgtcacccagactggagtgcagtggtacaatcacacctcactgcagcctcgaccttctgggctcaagtgatcctctcacctcagcctctcaagtagctggcactacaggcgcatagtatgcctaactaatattttagaattttttttatagagacagagtctcactatgttgcccaagccggtcttgaactcttgggctcaagcaatcctcctgccttggcctcccaaagtgctaggattgcaggcgtaagccaccatgctcagcccagaatggggccatttttaatagattattagaagaaaacctgtcataaggcaggatttgtgggtctagatacaggataggggcactggaaggttgctttacagggattgtagcgattagggttttcctgtcagtcctctgcccctttgctcagatgctgacagtgaaaccgtgaaggcagcaaaggtgtggaaactcgcagaggtcctggtgggtgagcagcagcagtgccaggatgccaa

SEQ ID NO: 15319 - DNA, 2088 bp, Homo sapiens
gtgagttcctgctaggcaaccaaatttaagctcctcactttttgtgacacatggtgtcagatatggggtcccgcacctatatctggatgaagaggtagaaactctggacctcattaatgagttatttcttggccttcttctaaggactaggagagctccttatctgtctgagaatggggaccagctctgagtggggttgctgcctgtattccctgtttctcaggaacttacatgggtctggggaggctaggtaggtgattgtacgtggttgctcttctccttggctgggggaggtaatgagcagatctctgtgggtgtggagcttgttggggggatgtctaggaagcttcagcttagccacattcccaagtttaggtgcactgagccatatagcccagtgtatgcatgtgtgggtgtgttcatgcacacacacactctctctcttgtctctctgtctctctctcactctttcttactctcttctcaggtcacttgtacacttggtttcctagtagaagctcacttgccacctctcagaggggtcccggattgcatccatcacaatcccaaaactagagttggggggaactggagggagcaaaacactgatttgatactagtcagtttgcttgaaactagttcacctaaagctagatctcttaaaaccaatttactgaaaacttgtttgcttaaagttaatgacttaatgactaatttgccaaaagctcaattcctattttggtgtgtttatatccatttaggtgtcctattcttttttgtcatgctttggatatttcaaggatttatatctattcatccaagagtacttctgagctattatcagcaacataaatttatcaaatttgcagcactttgtaaatgatgagattgcttcctacctttatggatgtctttttctatgttatctaccattcaaaaacttttttaaaaagtttaaagtttctagcaataaatacaattggtacagacattttgtgtatcatttttttgtttcttaatccaatattcctttacaaattaaatgccttgaaaaatataatggagttcaatgtgattttgatgctttggtctaacttctacattcctactgttaaaaaggccagtatatcttaaacaaatgaataggcatgaggcatattcagttgacttacaatgaaaagttatacagacaacagtaataactaaaagggtgaatctgctaaatccttttgaaatgctgcagatttgataaatatttattttagactaattggttttaggtgaattggttttaggcaaattaatttagtaatctttgatctttagtcttcattttctgtcactcagtgagtttcttactggaaatgatgactcctgacaacagaatttccacatttgggggctattctaaggtgactatgccagccaacctgggaaatacataaaagagatctctgagtgagagggaaagaggtcagatttatacaactgagcgccagaggggaaaatgcaccttgttggagtgagaaatgttctgaaactgaattacttcttgtacagctgagatagcttcttctgaactattattaaataagtgaatacaaaggccctatgatgggaaatccagacaagcttgtgtaactttacatccatcccctcagggatatttttttttttttttttttttttgagacagagtctcactctgtcgcccaggctggagtgcagtggcgctatctcggctcactgcaagctccgcctcccggattcacaccattctcctgcctcagcctcccaagtagctgggactacaggcgcccgccaccacacccggctaatttttgtatttttagtagagacggggtttcactgtgttagccaggctggtctcgatctcctgaccttgtgatctgcctgtctcggcctcccaaagtgctgggattacaggcatgagccactgtgcccggctctcagggtttttttttttgacagaatctcgctctcttgcccaggctgaagtgcaatggtgcaatctcagctcactgcaacctccgtctcctgggttcaagtgattctcctgcctcagcc

SEQ ID NO: 15320 - DNA, 1035 bp, Homo sapiens
tgtgcgcgccgcgcccccacccgggcccaggctccgcccgcaggaattcggagaatgcgcgggtgggggggcggggcaggctggccgcgtgcgtgccgactcctgcccgggcgctccaggtgcccgcgggcggggcggctgccgccgcgcggcggaggggtggggttcggggatcgggggacgctccctagcatacgcggagtagtggcggctgtcggggaaatggagcctgggagacaggatggagcgccctgggacccaactgctgtccctccccagtcctgttggctaggtgcgtgcgtgggcatttaatcagagacccagtagtaccagcttctattttccccatcctccggaagtcagggtaaaagtcatgactactgggacaccattacctctggatggataacgaccctgtgttattgccagaaataacttggccttgaattctgcttataacctctcagaattcaggccagaagtagcgccttacttcctgacactgttaaggaaacctggtcgctgtctccctcccctactctgttcaggaagtattgattgattatatgtctcagctatgaggaacattagggtcttgaaagatcttttagtcaaaattcacaggcactgctacacacataaaaaacttcgaatctgattgtgattggaaagaagtggcaggcttaccgcctaagggctgtgggcctctttcacttttctaagcatctcttcttaccactcatgccccactcctggaccccatgctgtagaactctatggctagaaaagtgaataggaagaggaacgcggccagggagggatggttgggtaggaggttcagaggtagcagggcggcaggctataagggcataactcaacccccagcctccacccccattcttttccccacctccaaatccaccgagaggaaagcccagaggagatgatgccaaaccgctttgatcaaggaagactgaatgacagggcccatttagcagtttcattttgaggcccaggagaggtggctagtaaaga

SEQ ID NO: 15321 - DNA, 1025 bp, Homo sapiens
gtaaaagcctcttgcaagaaagagtaagtgcgtgaggcaagagagtttggtaccagaaaggagttagacaactcagccagtgtcccagccggatgcatcttaattactgattttacaaatactgaacccagctggcaagcatttgaatactattatttattatcaccaaaacattcttttgcccacagcatctatgtttaagagcaaactccctgcatgatgtaggttaaataaagaattaaaaagaaaaagctctgcaggagcagtgtaggcccttatttaggaaggaaaagaatacataagtgattcatctataaattgacatagaagtgcttagtgctttcctttaacctttagttttaatttggtttaacctttagtttcaggtttagctgtgcctcccagtgactataatgacaaggaagctgtaaatgtatttgagttaagcttttgcgagaagtaagtatctggcacagaaaaagccatttcttcgatataaagggtggaaagagcaaattaaagactattctttaataaccacatgtaattaaaatgcattgtcagatttatgttttagtacctcagaggcattgatattgcctctttctgaaatgagattgcctattcaaaaagaaaaaagaaaaccctcaatatatagaaaattctcttaacctcctactcttttttttttttttttttttttgaggtggagtctcgccctgttgccaggctggagtgcagtggcaccatctcggctcactgcaacctttgcctcccgggttcaagtgattctcctgcctcaacctcccgagtagctggggttacagatgcccgccactacgcccggttaatttttgtatttttagtagagacagggtttcaccatgttagtcaggctggtctcaaactcctgacctcaggtgatcggcccacctcagccttccacagtgctgggattacaagcgtgagccaccatgcccggctcctcctctccttttaattgtgatgttttaatttacagggta

SEQ ID NO: 15322 - DNA, 1100 bp, Homo sapiens
gctgggattacaggcacgcgccagcatgcgcggctacttttttttgttttgttttttgtatctttagtagagacagggtttcaccatgttggccaggctggtctcgaactgacctcaggtgacccgcccacctcagcctcccaaagtgctgggattataggcgtaagccacgtgcctggcccagctcaccttctttaatgggggtatatgcagctaatgaaattaatgttttgttttgagtcatttatccagcacttaagtagttacctggttagtaaatataatgtgaaatactcgtttattacctgctgatcccaatatctttccatatcttagagtttaggtgagagactatagcaagaggctgggaaatgaagtcagcaatagtgtccatggaaaccaaaaaagaattctttgaatgcccattgtgctagaccacactgtacctagtttttataggcaaattaattcaggaaaacacctatttgttgccctgaatgtgatgttttaaaatggacatagtatggtaacatacaaagtagaaaaacagaagagcaattgaggaacaaattgaactcacaataggaaaatacatttagcattaaaaactagcataaaatattatccttagtctgagaccaggtcatgatagcaagtaaattacaaatactaaattacctttctaatttgcgtcatagaaggttttgtatctataaatgcatcctcatagacttgaggaatgtgttgtttgttagaaattcaatattaaatttgggggcaaatttccccaaattctatttcaagccattgcattttattcaaaattagggaatcaggaatcaaggtggtggctcgcacctgtgatcccagctactcaggaggctgaggcaggaggatggcttgaggccaggagttgaagaccaacctgggcaacatagcaagaccccgcctcttaaaaaaaaaaagattaaggaatcagggtgggtgtccaggttgggaacacaaaatgttacaggaataaccataatatcatccagccgttactagtggagcactgaccatgtgccagcactctataggtgccttacatatattatgta

SEQ ID NO: 15323 - DNA, 1011 bp, Homo sapiens
ggggaggacaaagaagtggctgtgaaagcagtagtaaccacaagcttggtgacccttgtccttttggtcctccagtgcatatgtgtggaggggagagggtagtgatggtgattttatagcctcctggtcaggaagcagcactaaattgtcactggaatgtgtgggtggggaagaggccctgctgagagcagagagatggctgatttatcacacccagcactgttggggctggggggagttcccaagctatggtggcagcagatggcaaggccttctgttaaagagaagacaggggatagaggaggttgatgggagaaacctttaaaaaatgggagcggaggacacaaacaataccaccttgtatttagtcagaaggcagaaagtggttggtgaaggtgacaacccagtgtcatgttttgagactgagaggtttggagaagtcattcacagaagaagagggggtaaaccctcctctcctgtactgcagctaccttcccttccccctcagccttgtgcagtcttcgtattgattgatgagggctgtcggccaggaactgatcgaggcttgttaattgcatttgtcaaatgcagggaaattgggaattagtgaaatcggagaagggggtttggaaaacaaatgactcgtgcctaaggaaattttttgcaggaaagtatctcaggagcccctgcagtcagggagctgctggtgtggactcagactacatggttgaaataggcaggagctgggcggggcacagtggctcaggcttgtaatcccagcaccagcactttgggagacggaggcaggcagatcacttgatgccaggagtttgagaccagtctggccaacatggtgaaacctgtctctactaaaaatacgaaaaattagctgggtgtggtggcaggcacctgtaatcccagctacttgggaggctgaggcagaggttgcagtgagccgagatggtgccattgcactccagcctgggcaacaaaagcaaaactccatctaaa

SEQ ID NO: 15324 - DNA, 1077 bp, Homo sapiens
gtgtgcatagattttggtatatgcaggggtcttgggacaaatccccttcatataccaaaggatgactagttaacccaaggctgaataagataaataacctttttttttttttattgagacggagtctcgctctgtcgcccaggctggagtgcagtggtgccatctctgctcactgcaagctccgcctcccggattcacgccattctcctgcctcagcctcccgagtagctgggactacaggtgcccgccaccacgcccggctaattttttgtatttttagtagagacggggtttcactgtgttagccaggatggtctcaatctcctgacctcatgatccacccgcctcggcctcccaaagtgctgggattgcaggcgtgagccacagctcctggcctgataaataccgtttttaaaagaaccagttggctgggcatggtggctcatgcctgtaatctcagcactttgggaggccgagatgggtggatcaccggagatcaggagttcgagaccagcctgaccaacatggtggaaccttgtctctactaaaaatacaaaattattgggaggccgaggcgggcggatcacgaggccaggagatcgagaccatcctggctaacacggtgaaaccccatctctactaaaaatacaaaaaattagctgggcgtggtggtggtcgcctgtagtcccagctacttgggaggctgaggcaggagaatggcgtgaacccaggaggtggagcttgcagtgagctgagatcgtgccactgcactccagactgggcaacagagcaagactccatctcaaaaaaaaaaaatacaaaattagccggctgtggtggcacatgcctgtaatcccagctactcagggagatgaggcaggagaatctcttgaaccctggaggtgcatgcctgtaatcccagctactcaggaggctgaggcaggagaatcaatcacttgaacctgggaggcagaggttgcagtaagctgagattgtgccattgcactccagcttgggaaacaagaaagaaactttgtctcaaaaatcagtcagtcaatcaataaataaaaagaacca

SEQ ID NO: 15325 - DNA, 1118 bp, Homo sapiens
ctcagcctgccaaagtgttgagattacaggagtgagccattgcgcctagtcctgggctcatttcttttatttctttgctggttataatcacccttacaatcatgctaggtccggttctatcatctctgaaaataagttccttagcctgtttttcctttccagcatttaagaaacttgccagacagttcaactttgtatttaatgtcatttcctcatcagccagttttgaattgcccgtttagtaaagttggagtatagctagtcaccttctaattttcccttccatatgcttaaaaataattattctttcctccttttgattttgcttcattcatttacctgcttactaaatacctagttatcttatagaacaattatagggtacctaccactttttcacttgctttcaaacgagaatagaaagggctgtagggagtatccacttactacccaatggaggatgaaaggaaattaaaaaccggatgtgagagaggagctcactttgttactttggaaattgagatgcttttctctgaaaggtgggaaaagacagttccatacattttacgtgatccagggaagcattttggaaatgttgctttgaacctttagctggcggatttgttctaggtgatggaaacagtgtaaaagagtacagggaccgggtaacaaggaaaatccagggagactgagcatcatttaaacagtgccttcttcaagaggccttcctgatgaccctgtcccattcattgtgagtcagccccttgcctcatattacagttggcccttgagcaacatgggtttgaatcactcaggtccacttatacgcaggtatttttcaacctaattctgattgaaaatacacattcccagaatttgaaacccaaatatacagaggaccaatttatttatttatttatttatttatttttgagatggagttttcctcttgtcacccatgctggagtgcaatggcgcgatctcagttcattgcaacctccacctcctgggttcaagtgatctcctgcctcagcctcccgagtagctgggattacagacacccgccaccctgccagctaacttttgtatttttagtagagacagggtttcaccatgtt

SEQ ID NO: 15326 - DNA, 1017 bp, Homo sapiens
ctagattacaaaagtataatagatgtttataacttaaatatcaatctgtagtgtgaaaattaaaggaagaccagatcccatcatgatcttagttctgcctagatgttagtatcacatagtgttcttgtttcttctgcatttacatgtccttctcagtttttcttccacactacttgatattactgtctaccattaaaagtttaaacggctcatcaaactagctacccctcccttactgcttttagatcagtgttcagtctgaagccatggtttccccagttcccaaatatgatttcttttctttttttttttttgagacggagtcttgctctgtcaccaggctggagtgcagtcagtggcaccatcttggctcactgcagcctccgcctcccgggttcaagcaattctgcttcagcaccctgagtagctgggattacaggcatgcaccacaacgcctggctaatttttgtatttttagtagagatggggtttcaccatgttggtcaggctagtctcaaactcctgacctcgtgatccacccgccttggcctcccaaagtgctgggattacaggtgtgagccaccacactcagcctccaaatatgatttctttaagttaaccttttaccaaaactccagccagaggtaacctgtaggtattacggtttgaactagcagaggtcctgagaccatctaactgttgggtctatttcttggggacagcagctaccaagggggtgccagctggaaacagtgacacagaggggggccagcctggtcggaaacgacgctggggagccagcacagccaccacacagaagaaaccttccatcagtatcaccactgaatcactaaaggtgaggtgggaggagccagggaagggaggatgagacctgttaaggtgggagtagacatgggcccagtgtaacggggtggggggtatctgtgtcccagagcctcatccccgacatcaaacccctggcggggcaggaggctgttgtggatcttcatgctgatg

SEQ ID NO: 15327 - DNA, 1091 bp, Homo sapiens
tgagtattttaagtaattttacatgcatgatcagatttagaaggggcacttggcgaaagtgcagaagataatagggattttagtactggttctattactgatattatgacatagccaggtcactgattctgtgtgcctgcattttatatctgtacatttagtaacagtaaccatggctacctttatgggtcttctgaagatgaatgagaacagtgttagtaaagggttttcaggtccctggaaaaggaatacagtttaattgtgtgtatttaagtcattgcgtttaatttagaggttgtggtagaggtgggggtttgtttttcttttttttcctcatcatttctgacttttacccttctctataccaggctctaatgctagaaaatttacagaaacactcaacaccccatgctgcattccagccaaattcccaggtgagaaagaaggtgtattcaatggagtgggccctttggatatccagacacatggaaggacgtggtgttgtatatttgatgcttaagtcctcatgactgttttcctaagttctcttagtcagaaatgttctcaaaccaggacagttgaattctaatcaacccagttgtatacaagggcctggagtaaagaacagaatcagaggcactgttagtttataataattgaaatggcatgtgtagaaaggtgtggcttccattaattacgtgtagtacagagatctgaagtcatttatctgccatgaatttaggaaaggtagttgatgtctttgagtatagatatgaagtagatcaccaatatggcagtgtagggaaatagttgctgattaagaactcttgttgatgtagattttccaagggttcaatcctgtgtaagtcacccaccattactagtgttaactactaactcagtgcacttactcataaacattactaatacctctttacttaggataagaaacaacctttggaggccttggtcttctccatttccttatctgtaatatgagaaacagactaaacccatgggtttataactgttctcttagggttttgtggagctgctttggggagcttcctaggggaaatacctttttccca

SEQ ID NO: 15328 - DNA, 1023 bp, Homo sapiens
aaccccatctctactaaaaatacaaaaattagctggatgtggtggcgtgcgcctgtagtcccagctactcaggaggctgaggcagaataatcccttgaaccagggaggcggaggttgcagtgagccgagatcgcgccactgcactccagcctggcgacagagtgagactccataaaaaaaaaaaaaaaaaaaaggaggaaggaaggaaggaaggagagaaagaaaggagagaaagaaagaaagaaagaaagggaaagaaagaaagaatacggctttggggtttcatcccacagtcatttattcctttatctataaaatattgattcagcatcccctatatctaggcaatctcacagtcccctaataacatttggcccactctggggaaggtttcccaagtcctgaacacaaagatttaccaagtcctgaggtaactgaacaacaaaatcaccaagtcaggatgctttgcctcactgggcctggctccttctctctaccagctggaaggatccctggagcaagagaagaaggtgcgcatggacctggagcgagcgaagcggaagctggagggcgacctgaagctgacccaggagagcatcatggacctggagaatgacaagcagcagctggatgagcggctgaaaaagtactgtgtcccctccctgctgcccttcctcctccccagcccataacagtacaagcagacccaagacagccatcctctgaggcaacaacctcacgcagcctccacaagtggaggcgcaaaccatgggaaaaggcctcccaggcaagggctttcctcccctagtcccagatatcagggttagttagatggtcctccctggcaaaaagtccattgtatcccatgagtcctttcttcttgttaggcactcagtgggaatgaaaataacagccttcccccttcatacacatctctctttggagaccagttccttgacatggaggaaggctccacatgagagcctcttaggaaagtccctttgtggcttttcacagagagcc

SEQ ID NO: 15329 - DNA, 1024 bp, Homo sapiens
aggagatgaacgagaggctggaggatgaggaggagatgaatgctgagctcactgccaagaagcgcaagctggaagatgagtgctcagagctcaaaagggacatcgatgatctggagctgacactggccaaagtggagaaggagaaacacgcaacagagaacaaggtaagggcagctccctttggctccagcccgggtctcatcaggactctcagaccatactgaccttgacccaggctagccactcggcatccagagagcagcatggaccttgacatggagctccccacagatggcaccaagctggtgacctttgaccctaaaggagatgggattcttggtcggcaggtgaaaaacctgacagaggagatggctgggctggatgagatcattgccaagctgaccaaggagaagaaagctctgcaagaggcccaccaacaggctctggatgaccttcaggccgaggaggacaaggtcaacaccctgactaaggccaaagtcaagctggagcagcaagtggatgatgtgagtagattgagagttgtggggcctagatatgccatgtctatctgtgcccagagctctgtgtgtgtgtgtgtgtgtgtgtgtgtgtgtgtgtgtgtgtgtgtgtgtgtttgtgtttatgtttagaggggggtagggttagaggatgttaacttttctgatatctttctagaaaggagctggggaatgaaaagtcagaggtggtgatcaattctgaattatgtatctaatctcactggtatgatcaataatagagatgagttttcttatttaatttaagtgcaatcccatatatctctgcctttgacacaagatttagagggtcatctcataagaacatgataaatttctttggaaattttgtgaggctccccaagtagaatttttgaaattccaatatttaaggcagaatctgatcattgttccctctgatgcacatatgtctgttgactcacttatcactctgtattttaattatttaagcttctatctcagccata

SEQ ID NO: 15330 - DNA, 1006 bp, Homo sapiens
cacttctccctgatccactatgccggcatcgtggactacaacatcattggctggctgcagaagaacaaggatcctctcaatgagactgtcgtgggcttgtatcagaagtcttccctcaagctgctcagcaccctgtttgccaactatgctggggctgatgcgcgtaagtagggactgaggctcccggtacagaggagcagggattctgccaaggttctgagccaggtcaattgctacaccccaccacttcaatgtcaggttgtaccccaaggtttacagactcagtgggatggaactgggtgaagaaactgaggcagccacattgaaggccctcacccaggggccaaatgccagcaaggatgtaaagaggggctgtgattctttactcacaccctacctccccacactgatgcttcttttgttgactctccttcctgcagctattgagaagggcaaaggcaaggccaagaaaggctcgtcctttcagactgtgtcagctctgcacagggtgagtgggacacagccccagccaacttggctccccatctgcccaaccccacccagccccacccttccctgccttgttcatcccctactcctcccgttccctgtctccttggtgcattcgggaccattttcactctgtcttctcttcccgtcatctcctggcctcttcacttatttacttcccatctcccttctctcctctttcccttctgtctcccaccctctctccttatccctgtctgcccccagggccccttcatctctgtgacttctcgaattctctccatctctcttttccttccttcttctcctctcttcttcctgcatctctttctggcattttctttacttttctctattgcatttttggccacaggaaaatctgaacaagctgatgaccaacttgcgctccacccatccccactttgtacgttgtatcatccctaatgagacaaagtctccaggtgaggccacaaactcaggccaacccactgctggg

SEQ ID NO: 15331 - DNA, 1001 bp, Homo sapiens
aaccaagcaagccttttattccaggcataatagcacccatctgcttaattctttgtatttgtttcttaaccactctcagggcttatagaccagaccactgattctccaaatctccaccactgtgatctgttttaagacagtcattcatccctggaaagatatgtaaatctgaaatatagagctccatatatataactacaccagtgaaacaaacaaacacaccctcagaaacagcagcagaccccagcagagggggctgcagggaaacacaccagtgccagcaaggatggggccccatgggcatatgtataagtacaagggacatatcccaagacccatgacctatactcccataagcagaaataccctccaacacacgctaatttttctcacacaaaagtaggtagaaaaagcttataaacagagaaagtgagaggaaaaagtaaccggtaagaggaagagtgaccaaatgttgaatattaacatatggggagaggatctgctaaggagtgtgtaacaactcacctgccaaatcaactagccctgaaaatggatgggcattgggcccataccaagctgttgctggcagtcaagaggggacagggggatggcagcagtgggggcacgcacatggttgaggggtccactcccctcctcgcagtcacaaaaaacaaacaaacaaacacacacacacccgatggggagaggaccgtaaattattctggacatcagggaagagatatgtaggaggcaaattaggaggaaacttttgggaaaactcatatgatgtcaccatgaaaaacagggtaaacttctgcgaatggccaggtattgggggacaatttctctcagaagcaaccagtcagaaacttataagccatgaaagcgtcatttctaggagactgagttgggaagaaatgcctttatactgagaaagctcttgctacagcaagtctgtagacccagcctcagggtctacaggattatagctcagatacatt

SEQ ID NO: 15332 - DNA, 1184 bp, Homo sapiens
ctccatgatgtcagaggcagctggtgttaccttgagacccatacaggaatcacttgctgctttgccggggtgctgtatcacctacgggccagggcctgggtcgaattggtaggatttctgactctggtagcttgaccttgcctccctggagctcttcccagctcagaacaacagttgtcacaaataactcctgtttgtgagcacctgaggtttgctagagcctgacagtagcaagaggaaggaacctaagacagggcattgaggtcaggatggttggatcaaaaggcaggcagagacggaagaggaggactagaaatggcagttacagaatgtgaaaggagaagggctttgtgagtggggaggagagttgttgaaagtgtaatggctttgggtttaggaatggagactaaagctagaatgcagagggaagggatcggggctgtgtgagtgtaaactcattcagggattgagaaaagggaagggttgtgaaatgccagagggcacagtggaatttggctgtacagaaaggggggaaatgggacagagtcccctagtctgagagacttagctgtctggtgagagactcagggttagtcacatggtcatctgaggagtggctacatctgtctagtttccaattgttttccagcacctagcacagtgtctgtcacacagaaaaggcttaataaatatctactgatcaaacgttgaattagtagggagaggctgggggaaagagttgcccacctaattttcacccactccccccacctaagtctacattaatgggcaaactgggaaatcagaaaccggagggaatggctggagggtagttaaccagtgacagtgagatctgaggcagacaggagagactgggttagggtcacacttggaggcagccaggggaactctcagggctcatgtgcagagtctttgtagtgataattggaggaaaacatgaatgaacagccctaggagcccaagaggaagatgtggaggagggaagagaaaggaggcggtttccagaaaaggttgagagttgtttccaaagagagagttggcaaatgtgaattaaaagtagcatccccaccccattcccaatcatgaaactacaattgaattggtcataaccgtatatatacaatggccgcaaataaggagttcataaatcaataccagaccca

SEQ ID NO: 15333 - DNA, 1068 bp, Homo sapiens
cacacctcagcctctctcctccagcaaggagaaatggcgaagaggcacccaggcaccaagataaacgaaggatgcctcagcgtcagctcatttcagttattaccctgttccgcaatcaagattaaagccctagaccaggccaaagctcattagcttagtaatgaagcacatgcagagatgtacacatagaaaccaagagctatagaaagaagaggagggaagctatagccatggggtgggattcacatagaattctcgcctctacatggtgaggtgagaatggaactgcctgttgccagtgtcttgttgttagtgcctggcagcatgctgggcacatagcaaggaactcagtgtatgtttgctgagggggctcaaacagcactgcagggctgtaaggccccatgggatgcacaattcctagtgtggatgaactgtctacaagggaattatgcttaggaacaaatctgccaaatcatgccccactgtctcacataactataatgttattgtcctttacaaaaagccaaaaggacaaattaaaaggatctaggtaattgtaaaacaaaaggacaagactggttggactctcagtgtagtgggcagtgcatcagtctcatgatctgaagatcctgggtctgagcctcccagagggcagcttttgtaaaaaggcttactttttactccttgtggaggagtggtgactgaagaagaagaaaaaaaagagattgggggaaggaagagtcaaagcagggaactgagaaatgaaactgaaggagatctggctataggtatgagaactaaatgaggcaggttggctggaattagacacgtggaaggactagatccaaattagctactgttaaagagaaaacgagatttcacagaactgtaagcaaacttagaaaattgctaaaacaattcccattacaaaaataatccaggccaggcacagaggctcacacctgtaatcccagcactttggaaggccgaggcaggcaaattgcttgagtccaggagttccagaccagcctgggcaacacggcaaaaccttgtctctattaaaaaaaa

SEQ ID NO: 15334 - DNA, 1033 bp, Homo sapiens
gtgagagatcactcttcttaaggtcccaggctccattccttatctttcttcctcttcagggcaaaactcaaaattcccaacactttatcatacaaagcaattttaggttcagccttcacactagtccaggctctgagccttctgccttgctctcccttggataacttgcttttggagaagtcagatgccatgccatgagggctcctaagctatgctgtgtagaagttcaagtggcaaggaactgaggcttcctgctcacaacagcatcaacttttcagcctcttggaagcggattctgcagccctgatcaagtcaacatcctaactgcaacctcatgatagactgtaaaccagaactactcaggtaagcctctcccaaattcctgataatacatgtttattgtttcttaggccccgaaatttggggtgatttgttatgcagcaatatgtaactaatacacataccttaaaattgctgattgctaactctattatttgggctatcttgaactttcttcttattgtctgtgggtcacatattcattttgcctgataataacattgctgtgtcagcttttctatgcttagcatttccaagatacatcttttgctttcaacctatctgtacctttatactgtctttcataaacagtgtatagttgggtcttgcttttttatccatctgaccatttctgttttttaaatgaagtgtgtaattcatgtacacttaatgtaatgtaaacataatttgtttcaagtctactttcttgctatttgatttttatttgtcatctctgttctttcctctgttcctgtctcctcttgggtcagtcgagtattttttttaaccaaaaattactttatcaataaattatatcacatttttccatgtaatgagaaattttaaaactcatttatgaaaaatattaatgaatataactatatagcatttttggtatttttctaaagaactagaccagggaaatgtattactccttttgtagtaatatacactaaacaataaacaaagttgt

SEQ ID NO: 15335 - DNA, 1025 bp, Homo sapiens
gtatgtatacagtttcaatttggatggttatgccaaattaccttccaaaaagaccacctttggtttccactctcaccagcaatatctgagcacctgtctcccacagcactcaagcatcaagcagtcgtgcatcaagcatccagcaggcccgatccccgcaggccacctacagggaaaggccacagctgcgcccacacctatgagacctgggaggcccagctcaaatggatgggttttgcccacagttggctcctcactcctctgatcttccctctacacagccctgggcccctggccttgaaaattgctgggcgaattgcagaattcttccctgatgcagtacttattatggtgaggcttgggtttctgggtggggaggtgaaaagcaagtagggtggggggacccttgaaactctcacttgcccatctttgtccactcagttggataatcagaaactggtgcctcagcctcgtgtgcccccggtcatcgtcctggagaaccaaggtctccgctgggtccctaaggataagaacttgtgagtaccccactccctctacctcttcttagaagcccaaggctcctgggtctcctctgtccttggccctgccccaagggtctttctctagacccaatctctgttaagtctgtgtctggacccactacttgctgtttgacctccatgggggttactatttcagagtgatgtggagggactgggaagagtcacggcagatggtgggagctctactggaagatcgggcccaccagcaccttgtggactttgactgccaccttgatgacatccggcaggactggaccaaccagcggctcaacactcaaatcacccagtgggttggtcccactaatggaaatggaaatgcctgagccagggccagcggggcccggttccaataaagagacttgggctgatgggcagtggtataactatatttattgtgcctgagaggcaaggtgagggaaaaatctcaacagaagcaagtttggggaaaatctggagtcccca

SEQ ID NO: 15336 - DNA, 1045 bp, Homo sapiens
ttctatcagttacctagctggtagccttaagtaagtcacttagacattctgtgactcagttttttcatctgttaaatgggtacaataaatacatatctctgaaggttgctgtgatgattacatgaaataaatacatggcacagtacctggtatgtaataagtacccaattaaatataactttttttaggaagtgacagtaataggaagaactcagtatgtttgttgaatgattcttacatgatacctcttaacacaggtgattacatggatccaacacctgatccccaagattgaagatggaaatgattttggggtagcaatccaggtaagaaaagggtaactgaagatacttagagtggggagagcctcagggggtgagctagacatgaaccaggaggaggaggaagatagtgtatgaaatggggaggacatgaagtgttgtctttgcctcccgtgtcaccacaggagaaggtgctggagagggtgaatgccgtcaagaccaaagtggaagctttccagacaaccatttccaagtgagggcagctggaggaccagcattgggggcagtaggagcatttctttgggacccccagagctgggcagccctatcaggatgatgggagactttgggaagggtctgagggagtacatctccctgaacactcattcctgtggtattcccttgcttctggcaggtacttctcagaacgtggggatgctgtggccaaggcctccaaggagactcatgtagtgagtggatagtccaccagccttttagctgggtgtgggacgaggaggtgtggaggaagaagtcctccttgtcttgtttgtgactttcccaatgtggagaatattaagctaaaagcattacctagaaaaactggtttgggcttcaacaaccttgacccttttctctgctcagtcctttgggatcctatttcttggtgctaagaaggggttcattctcaagttaacctatttcctataaaaggaaaccagactcatgtcccagcctcccatgggactgactcagctttgcctccc

SEQ ID NO: 15337 - DNA, 1046 bp, Homo sapiens
accttggcaacccgcggggcgtgcagcaacgccctttcctccggaagtgggtgtcagaacctccacgtgctgtccctccccctccccttttcggcccagtagcggcggctcagttgctgccatggagtcagccgggctagagcagctcctacgggagctgctgctaccggacaccgagcgcatccgtcgggtacggagcaggcgtaaccgggccagggcgagcgggaggttgcgggaaaggcccaactctcacccctagcttccccccaggccacggaacagctccagatcgttcttcgggcccccgccgctttgccggctctctgcgacctgctagcctcggcggccgacccccaggtgagacccctgactctcccctccgagcttcccactgtacgccaccggtcaagccccagtattcgcccactgcggtccgctcagcaccttcctgcccggacccccacgtgcttgcttcctcgtcctagatccgccagtttgcggccgtgctgacccgcagacgactgaacacccgctggcgacggctggcggcggagcaacgggagaggtgggctgggcctggggtggggcggggccaggcggagacttttcttgggcaggctgggtaccaaacacctgccacctgtgttccagcctcaagtccctgatcctgacggccctgcagagagaaacagagtaagtacctacccacttctctcgggatcttgacgactttgtctaggtttctgccttccttttcggctccaggctgggacttgtggggcagggacttcagttctagacgcaaggtggagtgaggattttaaggctgttttgaagactaaagttcttgaggaagggtgatgatgatctgccaaacccaagtcagaagaataagactgaaattcaggctaagttagactgaacttaccagattacatgcccacagtgctgttgggctccctctgagctgctgtctcatgtgtcccaacttggcaaagaccctgtgcccacacctcctgaaagtttctgtcctggctgccccattg

SEQ ID NO: 15338 - DNA, 1007 bp, Homo sapiens
ttcgctcttgttgcccaggctggagtgcaatggcacaatctcggctcaccgcaacctccacctcccgggttcaagccattctcccgcctcagcctcccgagtagctgggattacaggcatgcaccaccacgcctggctaattttgtattttttagtagagacggggtttctccatgttggtcaggctggtctcgaactcccaacctcaggtgatctgcctgcctcagcctcccaaagtgctgggattatagccgtgagccaccgcgcccagtggagctgttttaaagaaggcttaactgactgctcaagcttcagttagatattccttcttcctgggtgctcccacaggcccaatactttgtctgtcacagcacctaacatagtgtctgtaattgcttctgttgcttgcatctcccactaagctatatagggaggtcaaatgatgagaagacagatgaagtgtggagaatagaaaagagctggtttagaaaatgagcagcattgagggcccaactgaggttggagaacaacttgtccatagacacatatagtgttgtgattcttttagcatcttggttataggtacttgaatgttgatggatgatttagggttttgcttggcagctgcaatgaaacaatgggagaggggcatcaagaacatacgcaagaatgtggctgaaatggaatgcggaatctaagctgcatggataaggaagattatcggggaacctgccccgatagtcacgtaggttcttttctattttccctaagcgtcggccggtttgagaaataaaaggacagagtacaaaagagagaaattttaaagctgggcatccgggggagacatcacatgtcggtagattctgtaatgccccacaagccgcaaaaccagcaagtttttattagggactttcaaaaggggagggagtgtacgaatagggtgtgggtcacaaagatcacgtacttcacaaggtaatagaatatcaaaggcaaagggaggcagggcg

SEQ ID NO: 15339 - DNA, 1038 bp, Homo sapiens
caacctccacctcccaggctcaagggatcctcccaactcagcctcccaagtagctgggactacaggtacatgccaccacacctggctgattttctgtatttttagtagaggtggggtttcaccatgttgcccaggctggtcttgaactcctgagctcaagtgatccacctgccttggcctcccgaagtgctgggattacaggcgtgagccaccatgcccagccgaatgattcattttcaactgctgtctctgtgtagctgacttcttccatatttttctataagattttacaattaaattcttcctgatttaaatcttgttaccttgtctctatggttctaaaattaaatgcatcatcttctgtcataagccatatcccaatacccatctcgtgtattaatcccatcaatcattcaggtgtctggaatacaattctttagagtcatttaaaattacgtggtccttttataagatctaatttttcacttaaaagctctttctgtttgatttttgtttccatctccattaccctcattctggtctcgggtcttactcatttatatgtttatgtctctgtaatacatccaaccaggttttcctaccgtcatatcccctctaaagtgtagtctaaaccaagacatgacgtacaaaaccataatgtgcaggtcttcctttagcttctttttcattatattactccctaaccccagatccttcattgatttcctcattgcagattactttggcaactgtctttactgtgtgaatcagttttctcattcatgttttttaacatacagtaaaatgcacagttcttaagggtttagttcagtgagtttttgacaatagcatacgttcatgtaattacaaaatctaaacatttgtattcctaccccctcaagagtttcataggttagttttgcttgttttagaactttatataaatggaattattgaatgtacaatttttgtatctggcttctttcattctgcataatgtctactgtaatctgtggtttattccttcttattactgaa

SEQ ID NO: 15340 - DNA, 1038 bp, Homo sapiens; identical to SEQ ID NO: 15339

SEQ ID NO: 15341 - DNA, 1038 bp, Homo sapiens; identical to SEQ ID NO: 15339

SEQ ID NO: 15342 - DNA, 1038 bp, Homo sapiens; identical to SEQ ID NO: 15339

SEQ ID NO: 15343 - DNA, 1116 bp, Homo sapiens
agcaaccctgagcctttccggaacccagtgggggggggggggggggtggagccagacagtgacccggaagtagaagtggcccttgcaggcaagagtgctggagggcggcagcggcgaccggagcggtaggagcagcaatttatccgtgtgcagccccaaactggaaagaagatgctaattaaagtgaaggtgggagcacctccagccttgccaagacgcagtagtactgggctggcagcagtgccttacgggagacgtggggaaggaaaaccacgcctttccctagcctggaggacgctgactgcctcagggctccgcgcgaggggtggtgggaaatagggggacccagaagggctttgagagcggggcccaggtcccacctgacgaccctggggtattttgccatgcctgcttttttgccaggactgtgctatcacccagaatggggtcgcttttgtcgggtctcactgtattcgaacccccgcagtcatagagaaggcctagcagcggcttgactcccccgtctctcagattcttggagtaagcgctgctctccattcttcattcccagggtacctgcttctcccagtccctaacgtaggtcgcctccgagcacagccctaaaatcggggcctcccaagggctagactatgagcctttactggtggttgccaaggtgtggtatctcacccgtcctacaggaaccaaagcggggagtgtgttcagtcagtacctgcctttctgagcctggcatcctggaccagcctcacttccttggctgaggcaggttagttaccgctgccctagttcttgctactagccatggtttccttcatctgcatctctcaactcccgtggtggttcttcaccaatttccagccctcgttagtcctatctgctgtttcctcttttgtgccttcagacagacagagacccccccccccacgcccccctcaaaaaaacaaaactgctgacaagtgaagtctaatgctagtttggcctttttgtagctaagtaaatctatcgttatttcatcagcttcttagcatatttaccgtacataatagtcattcttaaccttctcttccccagtccttccaaactacttcttagcta

SEQ ID NO: 15344 - DNA, 1032 bp, Homo sapiens
ggtatggaaaagtgcttatatttttatcaaaaaattgatttgtccaggtaaaggtctgtgtcaatgataatgtgaacaagtagtacatttaaaatgtttgtcttgtctttttacagtcatgcctattttagagacaccttcataatgtccttgggagagggcctttagtttcttggtatctggattttggaggttttgatgttgtttttgctatctatttatttaatgtaatttaatatgtgagtttcttgacaaattgcatttcatggcaattgcaccttgcctggtctgatataaaacaccacaatcacaaacctttacattgcagtcagtttcaatacagttggtcacacacctcgtgattttctattactcaagataataaggggcttagggtctagaagttctgtttcctagagggttaaaatgctaaacataaaaaaagctgtgctttttttgtgaaactaggagacaagctgcacatctcagacacattgtaagcctaccactgcagcgcattgatttttaagctgcctgaatcttcaggacccctatctattccatcctatccattttgctgattgagtcgatatgtattgcagcctcttacataggagcataagatgacttttggattgttaatactgatttaaatagctgaagttctcctaataaagcattcccaaggagagagaaagtttgtctactgggggtaaaaatatcagatggtgcacattaaaagggagatgagatttgtcggagacagatttcagaatccttttagatgatccaattcaagaaaaccctctataaaatttaataaactgtataagttaactataatattttatactttctttttggtgtcttaaaaatttaaagaagcgaggaacatgccatttggtgagtaccgttggaagctattttaatttctaggaaaagccccaaatatcactccaaatagattttgtttgcagatctcagttcagaatgcacacacacacacacacacacacacacacacacacagag

SEQ ID NO: 15345 - DNA, 1028 bp, Homo sapiens
ttatgaattttaaaagctactcctatcactcaggaaatgccacaggttttaggagatctatgccagggactgtatagtcagaatgccctgtatgtatgaattcttgtgagtcttatgcattagatggtgagctattttaaggcaaggaccttaagtctccttgcattctactcagcacattaatcactcagtaagtccttgttgagaaggatctaatcatcaaaggcagaggcaaaaagacagacattcaaatatttgttgttccaagagaaaaagcctccgtctttacattcttcccatggttatgcagaggtaaaggggacatttcccctttttcctctgaaggttcactgaaaaatcaattcacaaaagcagataaattggagaaaaagcatccaagtttatttatcgtgaacaagcaggagccttccaaatgaagacccaaagatagaggggaaattgtccatttctgtgcttaggttcaacaaagtatggacagctgtagtaaaataaaactggacaaaaagggtaagatctaatgctaacaggttgagtagggaaactcagcaaggcctggctgtctggattcttcttggcctctctgatcatgcattccttccttctcggtgtggggcagggttctctctggaatgggggtcttgtgtcctatgttaaactctaactttccctctgcatttctgtgtaaaactgactaaagataatttctttatggtcagttttacacagaaatgcagaggggaagttagagttataggttttttgggtggctgtagggaagaaggttctggttttaatgacttcccgtagggaagagaaatttcagtttctatggctagcctaggggcagaatgggaccagaagacaggagggcaggaggaggtcacagagaaacttttgcttctgaggccttcattttggggtattgttttccaagtcccagccattggcaaatcatagactataaactgccagagcctaacccagtcctaacatttcaaaaaaaaaaa

SEQ ID NO: 15346 - DNA, 1034 bp, Homo sapiens
ctcttaattttataaatccactttttatattctgatgtctcagttattttcttggaaaagaacttttcaagtcagtttaattttattttgtcttatttagaaacaaaatctgaagcctgtatgttttgttttccagatttgtctgtatttatattaacgttggtgtgtgttgctttcatattataactatcacaagttttgtggcatttagtgaacctaatgtaatttacattctgttatttgtataatctgttattcttattcatcattcattcattcatttcttcattcagtgtttatttagtaatactgtgtacccggcactgtcctgcatgctggggatacaggaagtctctatgttcgtggagtttgtattcttgtaaaagaagagggagatgtgtaacccaaatagagaattttagagaggcataaatacaatgtaagaaataagggcatggtataaaatatcttgggggtatattttagctaggatataggagaaggatcatttgagttgaactctaaaggatgaggacgacgaaagtcacattctagtcatcaggaatagtaaagaaaaacgtccttggatcagaatgagcttagcatgctcagagaaaagaaagaaatgctgtgtgggttggctatccttcagaaagagaatgtggcaggagttgaggtctttaagataatgtacaggccagatcagtaagtcatagtgaggagttaaaattttaccataattacaatttgaagacattggatagttgaatgttacgaactgattaacactgaggaaattagtttacctgctgtgcagaagatgaacaagggaaaggagtggggggcaagagcattattagggggttattgctgtggtcccagctagaaattatggtgtcttggtgtaagtcttgtagtagtagaaatggtgagaggaaagatgttttggaggagcactattagaatttgtaaatggattagaaatggggtaatcaaaagtatcaaacataattaaacattaaatattctttgga

SEQ ID NO: 15347 - DNA, 1057 bp, Homo sapiens
ttttaattttaatgaagtccggctgatcaattttgttcttacatggatctgcttttggtgtatctaaaacatcattatcaagcacaaggtcaccctgattttatcctatgttatcttctaggagttgtagagttttatctttggtgtattttgagttaatttttgtgaaaggtttatgatttgtatttagattagttttttattttattttttattttttggcatgtggatgtcgagttgttccaacactatttgctgaaacaaactatcattgcggtattgaattacctcctctctttagtgaaaaatcagttgactatgttgatgtgggtttgtttctgggctttctttatttctgttctgtccattgatcaagttgtctgttattttaccagtaccacattgtcttgattactattgttttgtaaagttttgagttggatagtgtcagtcttctagctttgttcttttcctttaatattctgggccttttgctttttttgtataaatctttagaatcagttaattgatatctgccaaataactcactggacttttgatgggtattgcattgcatctatagatcaagtagggaagatctgacatgttaacaacagtgagtcttcctctctgagtacatgaaataggtcatttacttagattgtctttgatttctttcattggaatattgtggttcttctcacatagcacatgaacatattttgttagttttatattgaactttttctatttttttggtgttagaacaaccactttttgcacaattgtaagaaacgttaacataagtcttagaactagccccaataattgtgtgataacaaattacggtagcagattatttattcctggttgacataagtgataactgttgttgaattaaatattacttatgctagaaaagcttagaggtatttcatcacaacttgattgttttcaagttatgtaggttgatattattaactaacagtgaattaacgtgttagtttggatgaattgagtttccatgatttttcttacactttaaaatttacttgta

SEQ ID NO: 15348 - DNA, 1027 bp, Homo sapiens
gatattagcattctctgttacctagttttcagcttcctctctgtgcagagtgtgttcctagttattctgcttcaatttttcattttccaaaacgatgttgaatttcttgtttgctgttgtttccctcacccttctccttgtctttctgcttttatactattttgccattttagtgatgtttcagaagggagtggagtttaatatgtgtgctcatctgccatacttagcagcaaaaacaacagctagctagcatttgtggagtgccttactatatgctagactttttctaagtgcttttgtatagattttcatttgatactcaaaccaatcccattaaacgcatactactgttatccttattatacaaatgaggaagcagaataagtaactgaccaatttcacagggctagtaagtgacagaaagatttgaatccaggaactgcttgtggaacctgaggtcttgatacttttagtttattaatatggaccagaagcctacaatacatacttctttagacatctgagttacttaaactaatatgacaccttaaaaatgacttccaataaggcaagtcactagattttcatataaccaaaacaaaaacctagcagcttataaatattcagcatacacaaatacatggaaattataacttatagagtgaagagtaatttttctggtaacagaacaaaactttaatataaacgattatcacttaacaccattctcctaaatatttttttaaaagaattggcatttactgactgaactaggacatagtgttctaacacactaggaatgattaaaatcagaaaactaatatgttttagttgatcttagaattttttttgtttaaaaatttgagagtaggagaaatataatatttgtttagaagtattaaacattataaatagacaaaacttttatttctttaagaaacattctagccaaatacttgaaatttaaaatataaatttagttataatttgtgtcattttaccagtttaaaaaaactatgttcaatac

SEQ ID NO: 15349 - DNA, 1057 bp, Homo sapiens
accttttgttgagttactgtactcctgcctttctaattacagaattccaaacagaatgagtgaattaatgacatgaatttatttcctgcagtgtctagggcagtgtaatgctgcagcaagcttgcaatagcacataagctctcccttcactccttgtcctccatttttgccgggtgacttcacagcagcaagaatggaaggtgcactttactcaccagtgagtaaatcatgtgaatggatattttaaagcacatgccctatacgcagttcacagaactatacttttaaaagctctctgagaacacatgcttggaatatgaaaatgtactgagtactgtatttcttcaggtatcctaggtaaggcaagagtgtataggcataggcaacatttaaatgtgtgttgttgcatttcatttctccaaataattgtttgatatttgactctacagcccttcagggcaggcaaatacttgtaacattagctccatagagatatggttctcaattaccaaaagactgtagaagtcacttttctttgcctgacactgggaaggattctgattgaaggaagcagtctttgttcctctggtctcatgtgacagtctgtatcttcaggtccatacaggttgatgcacaccaaaaagtggattcaaagctgcctattcaagacttggtgatagggaaagatgaggagttaattttcattttcgtttatcagctgcctgtttgattaagatttttggtaggaagagccatctttcagacataatgcctagggtaggttaagggcaaaaattaactctttgaaatataaatgcttcctattaggttggcagatttcactaagctctttttgggaagaaaatgctaaaattcaaaaagagaaacatggaagttattacaagaatgagaagtgtgagggaatgactttaataaataatgaactattaatgacgtatactgaaaatataatgtccagaaaaggagagtgagaactccatcacatgatactgtgggtaactaggatgattttcagactagataacgatgagtatta

SEQ ID NO: 15350 - DNA, 1048 bp, Homo sapiens
ttgcactccaacctgggcaataagagtgaaactccgtcaaaacaaaaaaaaaaaaaaaaagaggaatacaggtagaggcacataaggattcatatcattcagataatttaggtaggaggactccccagtcattgcgtctctcccctcttctccaactttcagaatctaagatcagcagaagcagcaggctgtgcagctccaatactactcccgtgacccctgccctccctgggcccccgaggtcactctcccttaacgcttatctcttgttcctactagtttttcgtctgcctacacacagaggacacctacccttcctgtctacttctgttgctctgctcctttctgattcattgcttctgcttcccacccgtactgcaaagcttagccatttaaggaagccagactccccagaacactgcttaagtgcttacagttatattaaatagaaaaataaaagaatcaatgaagatgctcaaagaggaacgtgtactttgcacatatcatagtggacttgtcctaggagaatcagaactctagccgaactcatgtaatccttaaagctcgtgctgtgattattgattaaaagagaacagctgagacctttgacacttcagaggccagtggtctgtgcagtcagtctggcttctctaacagggaaaggcatgtaaggaaaaggaaatgagacagcctgggacacaagttcaagtatgaacaatactatcacatgttccatagtgcctatcaaacaagtgtatgtcgtcatattagtcgcctccttagcctctggccctcccataatactcaaagccatctggctatctgctcttatttgcaagtaatcaggaaaagtaaagtaagagggttgataatatgagctttgtgaaccccaactatctccatgtgcttcagctctgaccaggagagagcaacgtgggaggtgaggtctattcgaagttgccagacttgaccagttaacagtgcaacggtttgaagaacaatgactctagccctttagaggttaaaggctattgggtagatgtgtagg

SEQ ID NO: 15351 - DNA, 1028 bp, Homo sapiens
cccgagccacataggacacacagttcccagcctacctgactaaatgcagatccaactttcacctggcctaactattgttcagcaatctttcccccacctcatccttttgttatccatagatatgaggttctcaataaatatgtatgagttcacttattaactactggctatgagaataaagttactacatatataccattttgtaaaaatatcgatttgttgtaaaatattatttctagatatatcctcagaaataaactgaacttcaagtcttcttgctatgcattcttttggcccacataagagaaatcagggcctatcaagtgagtaggattgtaccatgttataatttgtggcaaggcgagtgatagcagcaaggacacttcaggccatatgtgcaggagagcttggattacatactccttcctgacctagtccctgaaggggacacgaagggtgctgcattttccttctgaagcctgtagttttactgttaagttttatttatctgaactttctttttccttatcacaaattaaattttactctgtagtttgatgtaaacataacctggttgtttttatatttaactaacaatctaccagcaggaacattttctgacacaggactgcagtaaaaatgagagaaaaaatagggaaaaatttcaaggttaattttatttcttcagacaacatcaagatttttttttttctttgcttatatcattttctgctcagacttttcatcatcttttaactgctttgggagtgaaaactaaccaagctgcttctggctaatttgctgatttttttctccctccgtttctttttgaaaaacatgactagtgtgagctagtacatttaaacgcagtaagccaggaaaagattgctcatgagtagatggattgggttattgaggaaaaaaataacaactgcatgaaagttccctaccccacctatccccactactggcaaattctctttgtatgttaaacaaaggactagcattcttactattgttaagaagta

SEQ ID NO: 15352 - DNA, 1058 bp, Homo sapiens
tgtatttgtgccctgaaatatttaaaacaaaatatttggaaggattttgacatttacactctcatggtatttgtatttgcagttccctgaatgtggtttctacggaatgtatgataagatcctgctttttcgccatgaccctacctctgaaaacatccttcagctggtgaaagcggccagtgatatccaggaaggcgatcttattgaagtggtcttgtcaggtagtatacttttataccttttctttatccgtagattagaagttgtatttgaagaattcttgggcatatgtttttaaggaaacataaaaagcatatctcaaactcagctccaagagaagatgttggagctctgtccacatgaaaaagggaaacaaaaggtttccctttaattggctgtgtccacacccagtactgctccaatcacgtctcttgacttaaggcttcctcccagccccctctcagcctctagcaacatacagatggcgtcattcagcaccttgaatcatttggacagcagcaaaagcaaacaagaaactcaccaacagtgaagctaaattagctgtcagggctgcaattgtacagaatgtgtggaagccaagaaatagcaccagggctaagaagcctttgacttactaaggtcaaaagtccagtagctatgaggtaagccaagaccaaggaggaagccagagcccaggagttagagaaggtcaggtcatgccatgtgacgctagttaactcagtccctgagaaatggctacatttgcctctgctcacattttttatttcttgtttaggatttagcagttagtaataggactgtgcctaaccaaacagaaaaaaaagaatgtatttaacctttttaaaaagcaccagagaacaacagctagagtggagatccttacaatgatactcaatgcaatgataatgtatccaaatttttattgtttatttttgttaaaaagagaataattattgagaaacttggattgccttgctcttttctcctctcatgccttctttgtttaccatctctttgaataaaagaagtccagcagc

SEQ ID NO: 15353 - DNA, 1073 bp, Homo sapiens
tttttctggtttctgtttcttaagattacattcagaaactagacacatagctatgtggtcacagtgtgcaattctttttcatgttcctccttttgaggatataaaatcactaaataaaagcctgtacccaaacttgaagaaatttcagaaatatgtctccaaataatactggattattcactttctcttttcttcctttcatttatactttataatgtggtttctaaatggaactctagtgttaatgctattggtgggcttaaaccaccccatacattttttgttgttacaactatattgctacatacgtgataatcacccagttcaataagtatttgttgtcttttccttgatatacttaaatctctatagtctggtgttagatgattttttaaaaattgtaagggtgattaaaaaggggatggttttatttcctgggcagaagttaataatacaagtttatgattgctgtcttggttctctcaaatgatccagtagacctcaggatctaccgctttcagaacaactttggactgtcccttacagctgaatgctagaaccactccaccaagggagctaagagacattatcactcaattttttaggcattcttgttagaacacttgatcacacgatgtgtccttatcatccacctactcctgggacacaacacttaggttgtgttttggctatattagaaagtgaaagtaccttttaaatttctttgctcattaagggggtgcagtcatgtcactaattattgtggaaaggaagagttcttggaaaatgacttgagaatcatatttaatgagaaggttgcaatattcaactgcctgatgtattccattattgaccagaataatttaatttcaggacttttattgaatcctcaccttttagcaaaagtaaactggcagagtattttttttttttttttttttttttttttttttttgagacggagtctcgctctgtcgcccaggccggactgcggactgcagtggcgcaatctcggctcactgcaagctccgcttcccgggttcacgccattctcctgcctcagcctccccagt

SEQ ID NO: 15354 - DNA, 1050 bp, Homo sapiens
ttgtgtcatggatttgctggttgagaaagctatcaaggagaatcaaaagtcaggacaatagccagattaagactatgatgaacagtgggcaaaggagagggtttcttgaaaggcattgtatagtaagaaccaatatgatattgtgtactcaagggaaaagatagtctcaaggctcactagtctcatgaaacttggaatttaactcagtgcagctcacttattcccctgtctttctcctctccttctccttctcttcgtcgttgctcttctcttctcctctctttctgttcctcccttttcttcttctaatattgttttcactgtgaaatataacatatacccaggaaagtctacaaagctgaaagtatggtttaataaattgttataacatgcaaacccatgcagtcacccccaggtctagaaaaggaatattgccagctctcctgtttcccttttcagttataatctctcccaactcctttcctattctttaaaaatgttaccacctatatgtacatacctaaataatattgtttggtcttgtttttgaattttatataaaaggaatcgtactgtagatgttttaatgacttgcttttacatttactatcatgatttatttacattgttgtttatagttgtagtttgtttattctcattgctatataaaattccaccatgtgcctataccaaaatctattaatatttatccattctgttagtggacatttgggtggtttccagtttgagccaacaacaatgcttctatgagcattgttatttatgtcttttgatgttcctcatgcatgatgttttgtagggtatatggaggagtggaacttctatagcatatgtgtttctccaactttacaagaaaaagccaaatgtttctgaaatggtttttacccatttatatttgtaccagaagggtaggagagtgactgtttttcagttctcaacagcatgtcttgttctcaggctcgatactaaagtattcaggtgggtgtgttcattaattgtagttttattttgtatttccctgattattaa

SEQ ID NO: 15355 - DNA, 1035 bp, Homo sapiens
ggccaggctggtttcaaactcctgacctcaggtgatccgcccccctcggcctcccaaagtgctgggattacaggtgtgagccactgcacccggccgcatacatttgtttttatgggtggttgaaacgtttagaaaatcttcagctcactgcttactgtggttacaggatagcaagaaagataaagagattgggtttaggcattttgaatttggctttaaatgaacccagttgcagatgttaaatggtgatattaagtcagtctaagcattaatataaaatgatgttcaaaagttatagaacagcatataaataattgaaaaacaaaagatcattattttacccctaattactagccttggagtatgggtcaacctttccacatccctcacctttcacatgcaatgagatgctcagtgaatcccaataattatccttttcttagagtctcaagttcttatcctctgtttttattaaaacagctgtgtttccagcttggattatttttacctcctacttaaactgttgcaattcatgggtcatttactccttcagagttaccaactatgtttttaacaagttgagtatgctaatatagagttacaattttgatattaactagacaaaaaaattaaaacttggtgacttctcattgtcagtaaacaaaaaaatcatttcccaatctggtcaattaaaattccccaaaatggtcatagtttaccttaaaatattcttgctagaccttcctaagtatgaaccttgtgtgccatcaaaatgagactgtttattctagtccatatgtacattgtatttcacaatatttggaccttagctctgtttttccctccatctggaatggtctactcataatttctgcccactgaaatacttcttatccttaatccttttccttaagcctgtgggtcctttcagccctgaacactcaggtatgaaccaaatactaccatttgggagggatatatagaggatagtcttgcatggcttttgacctggcctgtctcatgtccggctcattg

SEQ ID NO: 15356 - DNA, 1055 bp, Homo sapiens
ttatgcttccttttaaaataaagtcctttgtttaattttgcgattcagtgtgtaaggagagagtgaatagaatgagaacttaacttgaactctgtctctattcaaacttaaaagtcagtatgttattcagatagaacagaaaacaggctaatatcatagtcaggatctagcaaagcatccagtgcctcactaatagaccttagtgaattgaatgttagtggaaccatggtcactgagtacctaacccacataccaagagctgtgtactctgagttaccacggaattctggctgctgttcattctccttcctttagattgatatctttctgacagtcttaagatgtctatcttagctgtcttctcaatctacacaatctaccttagagaatacaagaacacagtcatgtatttaattatcctcagtgttaccctaaaatctattgtgaacatgtaaaaattcattatatttaccctaacttctattctgaagttcaatgtatctcctgtaattataaagtctcttgaacatttctaagcatactacactcgaatttcaaactcagtgtgttcaaagctgacttcatcttttcccatttctctccatcactgttaatgacttccagagtttaagctagaaagctgcatcatcttaacctcattcccccattacatctcatcctacacaatcagtgggtttgctgagtacaactcattccacctcatctgtgcctctttccttgttgatgttgtctcaattcaagctctgataacatttgaagactatggcaattacatgttaactgctattccttttctcccttccctttctttacctttttattgttgaaaatattctactattccctccacaggattgtcttgtggttccttagcgtgttatacaaggccattcagcatctggccctaattggtttgtcttccccattatccatattcccaggagatgctgtgttcccaaccatactgatctgcttattattcaatgaaaacacctttacttggttgacttcctgccattctcttgtgttattag

SEQ ID NO: 15357 - DNA, 1072 bp, Homo sapiens
ttgtactacaaatgctacatgggtagtgattttttttagttgtattagttttatcaagttagcaaaatatgccagcatgcaaaatgtgagattatctaagtcagactattaaaattatatgccatcttccatttacttgtgtttttggaattgtacatttatttctatcccattgtcttatgcttagagtttatgtaagtattttccaaatgttgaacttcaatacaaaaaatgtaattttgcaacgatttttaaaagtatgttttataacctaataattctgtgaatagtcatattggtagtgtgcttataggtggtaaatactttaaacatgtacagattttgtgtctaagatagtatagctccttaatattcattaacaaatagacatttatttaattaacctctgaataatttagttttttaatttaactttaagcattttctttacagaccagttatgttttagtagcactcaacaacttgacataccttcaacaagaaaacatttgtatctttagaattgtaaatattatccagcattgtagaaaaattggagaacatagaaaacagtcttggcagtgactactagatgctttcctaatttagtctccttttcttcattaattagaaaaaaagacagcaataataacaagttagattggcatgctgcacacatgtaaagactgtatttccttgctgtgctacaggaggttatgttgtagccagaaatgttatatggtcattatggaaaattatcttaacagcaaaggggtgcctttcttctttctcttttcctccatctttctgaccagaacggatatctgatggacaaagctccacagccatattggaccatggtggcagaatgagtaactagagggagactgggccattaacaacttggtataagcttctgccaaccttcagacttcgaattttcaatgtggaagaaaaataacttccgtattgattaaactactgttatttgcaggttatcgatcatctgttatcctgctaaatggggataaaaattgctttctttcttacctatgtctatgtatgatataca

SEQ ID NO: 15358 - DNA, 1028 bp, Homo sapiens
gtgtgtgtgtgtgtgtgtgttttgaatggggttgctttcttgatttggctctcagcttgaatgttattttgtatagaaatgctactgatttttgtatattgattttgtatcctgaaacttgatccaagtcatttatcagttccagaagccttttgatgggatctttagggttttctaggtatagaatcatatcattagcaaagagataatttgacttattctttttctttttctattttgatgccttttatttctttctcttgacttattggtctgactaggacttccagtactatgttgaataagagtggtaagaatgtgcatctttgtcatgttccagttcttaaggtgaatggtttcagcttttgtccattcagtatgacattggctgtgggtttgtcatcagtgtttcttactattttgaggtatgtttcttgatgcctaattttttgagggttttcatcatgaagggatgttgcactctctcgaaagcgttttcttaatctattgagatgattttatggtttttgtttttgattctgtttacgtgggaaatcacatttattgattggcatatgttgtaccaaccttgcatcctgggaataaagtcgactagatcctggtaaatgaagattttatgtattgttggatttagtttgctagtatattgttgaggatttttatatctatattcatcagggatatcgaactgcagttttttttttatattatcagaatgatgcttgatttatagaatgagttaggatagagttctttgcctctattttggggaatagtttcggtgggattggtaccagctcttctttgtgtgtctgatagaatttggctgttaatccatctgtttagggcgttttctgattggtagttttttttttgttgttgttgttgttgttgttttacttcactgattcagttttttaactcatgttctgttcagagtttcagtttcttcctgattcaatcttaggaaggtgtctgttttgaggaatttatctggattttctagt

SEQ ID NO: 15359 - DNA, 1851 bp, Homo sapiens
gttttttaattgcgtgaatagcttgaatttcctctcctgaaacaacctcaaattcagtttgtcaaagtcagaacacataaacttcttcctcaatgggttctgtcaatctaacagtttagcagaggtgattatatagctcagttccaggcatataaatagattatgagaataagatcctggaaactgtttttcactgaacccagctgctgctgtattaggtctgcaataaactgaaaatgacattttccatatatgcaggtgaatcaagaacataaacattctaagagtgttttacatctttcacacacccctttcatcactttaactggattagtaggtggtagcttgggccaatagtttaccacctcatgcagagctgacttgatttccaaacattttattgtctcttttggaaagtaggttaatacacgtgacccaagaggacccagagcaagaaacaagcactcaatggacaagtcatatgaagcagggtaagagcacttaccatcatactcatacccatgggcctacaactgctctttcaagtagatggtgatgataaggcagctattaattgagaattgacttgaagcagctttgctcagatctttgcacatattatctcatttattaatctcaggataatcctacattagttacacttataaccccctttttataaatgagcaagctgaaacacagagagggcaagtcacttgttcgaggtcacatattaaatggcagattcaaaataagaactcagactttctgaatacagagctgcatctactacactctcctgcctctcattttggcaataaagtttttggcagatggtgatcacagaagttgcttaaagtcacaacttttaagtactcttttttctaaagtcaaattgtatagtttttatcctaaaaaattatattatcacttttgtagtttagaagaggaaggtgtgaaaatttgaaatgttatctattctcatttaatttcctactttccgtggagagtattccatacccagattaaatgtcatttccaattgttgctcacacttaccaaagggaaggtctctgctcagttttgagcagaggctccctgtgtaggagtatgacagtcctcagtaaagttttgtcacctatgtttggcaaaacatcctgggcagatgagcgattcatgtggcaagagcactgccaattgaaaaggtgcattagtatgaatattagcacctctaagtgtttgtgaaatagcaaaggtagaaggactagaatattgacaaagcattttcaaaaaattatactacttctaatagcttaacatgttgatagaaaagacgattcagtgtagaagtctgtgatgattcaattctaagttgtatgtaatagagctaaagtctgtaattatattttagaggagtattaaacaatataaacatgatctctgagtcataaatgtcattattacactgagttttaaatataattcatttataaccatataatagacacataatattactgtgtgacaagaaatactcttagatgtagcaagaaaaaatggaaattacaaacatatgtgatttcaaaataattcttaacatttcttcaggggttattacaaagcaaatgaaaggaatttttacaaggtgtagttcagttgcagtttccctcctctgtattcacattattgccacagcttacgaatgacaaacatttgtggactatggcagcaatctgttgggtgtttcaatctattttgagctgaaattgattagcactttatgaaaagtgtacagaaaattaccatgcttatcaaggcaaatcaagccataattctgcctttttttttcta

SEQ ID NO: 15360 - DNA, 1050 bp, Homo sapiens
ccctcttgatgatgtagtgtgattccacctttctccttcaagagttttgtgtctgacttctctttcatttttgggctgagggagctggaaacaatcccctcggttgagcgccaaacccttctcaggggtgactgtagaagttacactcatttcagcctgtagcatgcaaccgtttgcccaaagtacattggtatgtatttggcagaccacagtccagtaattcccgttgtggtgtacctgaaaatcagtttaggaagtgtcattcgtttggcagattcagagtgcaatgtcatccaaaaaagtgaccacgtattccccacaaattattgatttattggctttttgtccaagttgatttccaactgaaaattcaaatctaagtattttagaccgatgattttacaataggagtgttaggatttaggtatcattcttgtactgcctctttaaacagggaataatattaagttgttttcaggttttattaatccaccttggcctttgaatctatggataagaattatgagctaagctgtttgaactcagcatatatccctaattatttaagctccatcagaacctgcccagtaaggggagtactggcataaagatcagtaggaatccacttctcataggtcagttaaaatataatagcaattattgctatatggcagtaataatagcaattattattgctagtgttattatccttaatatagctaacatttatcagctgttactataccagacactcttctaagggtcctacctagacatttaatacatttaatttgcaaaagaacctaagaggtaaacatctattatccttattttgcaggtgaggaaattggggcacagaaagaattgccctggattatataggtagtggcagagttgggattttaaattcaggcatcaagcccaaagtttatgtatttaactaccagactatatttatggaacttaagctttttcaggcggtttaataaatctgaataaacaatggttcctcttcccttttaacttttttcttaatcattttacagtgct

SEQ ID NO: 15361 - DNA, 1023 bp, Homo sapiens
taggaatgtacggactgtagcgcatatttgcttaagatgttcagagtcatggtctgggtgaagcagatatgtgagttatacctattactctatacttggtttctgttgatgaatatactattgaagtcatgttaagaattataggtttggaagtcacaatgttgaatattctggctctgaaaaataatgcaagtcaggggacaaaagccacttgaaaaggaacttgatttaatcattcctgtttagaattttctccatgtggaaaattatgatttttatactttaattaaataattgtttttttttgaaaattacaaaataacacttcgtggtaggctaaataatgaccctccaagatgtctacatcctaatccctggaacctttgaatgttaccttataggtcaaatgggactttgtagatgttgttaaggattttgaaacagggagatgatactgtgttatccaggtgggtccagtccaatcgcataagaccttaaaagtggacagttctcctaactaggtcagacaggtgaatatgaagagcaggagcgattcaaagaatgagagattcagtgcccttttgctgactttgcagatggaagaaatgggccatgagccaaggaattaaataggctgtaagaggaaagcaggaggaggtagagtcatgtagtaggagatgtgacaacagaaacaagatgttggaattattcgaggagtagctcatgagccaaggaacataggaaaagctagaagctgcaaaaggctagaaaagatttcttccttccagaaggaaccacattttgacttttgcctagaaaaactggtttggacttctgatctccgaaacagtaagataataaatttttgtttagtaaagccactaagtttatggtaaattgttacaggaacagtaagaaactaatatgtcacactcattgcagaaaaggtgagaaattcagataagccccaaagtggatcatactactcagagttaaatatagttaatattttggtggatatct

SEQ ID NO: 15362 - DNA, 1041 bp, Homo sapiens
aagagaacattgaaagatcaacaaaagctttacagaagagatggaactggtgtggaggaatgggtagaatttggataggctgaggtgcatgttagaagataaggaagtgtgtgtgtgtgtgtgtgtgtgtgtgtgtgtgtgtatatgtatgtgtagaaagccttctcacctttctgagaatgggtgaggataaatatgacaaaatactgcagaagtaacctcagtgaacactgaaactatgtggaaattgctttgactggaaaatgaagggagtttgtattgtggatcattaaaagataagatggggtagaaaaaataggatcagatcatgaagcacatgaaaggttaagtacatgattttagttaactttgatccaaagagtgtggaagtgctgctacttgtggtttctgagtgaagggagatataataaatgtgataattttggaaaattaatttagttgtagtatataaatgtgattgaaggtaaatggagcttggagatagaaaaaccaattaggagtctgttgtagtaattcataagattgaaagccttgattaaagtcaatagagagataaacttggagaatactttaaagggagattcttttttaaaaccagcccccaccgttttataattttacaagttgaagaagaattaagatgtggttgcaaaattttaggaagcgaaattaaataaatggtggtggtagtcatttaagtggcaaggttacaaaagggagctattttgtgagaaagaataatgtttatgttcttttacgttgaatgtaactggtggttggacatccagtagacagttttttgtttattggagaatttgtttacagtcatttctctgtgggggggaaatcctcaggtaacactgagtttcttcattattattagttaggaaattcagactacgtaacatattacctaatccagaagtaaaattgtttaagcatttctaagaaattagaaattactgtaaaataggaccaataaatgtataaaagtccacctatttccactaagttttacca

SEQ ID NO: 15363 - DNA, 1032 bp, Homo sapiens
ttttttcttattattgtgatctcatatttatttaagacaacaattgtcttaaataaattaaataaagctgtgaaagctttaattatgatagaaaatagaacagatctagcaaacatgacttaactaaatttttgtgctaaaataagcgtatcttttccagattgtttgcctgctaacagttaagcttcagaatataaaagttgatcaacaaagggagggctcatttgagaaaggggaaatgttagatttgttcaaaagtactattttacttacagttatatagggcgtaggaagataaatttcatggcatgagtatgtgtgtttgagcggaatttgaaaatgtaacagtagtctatagtttggcttacacgtggcataattagtatgtttttcattgtgtcagtctagaggattatgcatttatataggactttgtatttgttaagaggtaggtgggttgtattcatagtagtagaaaagtttttctagctgggcatggtggctcatgcctgcaatcctagcactttgggatgcttaggagagaggattgcttgaccccaggagctcaataccaggctaggcagcatggtgagaccatctctacaaaaataaaaaatacaaaaattagctgagtgtggtagtgcatgcctgtggtcccagctactctggagactgaggtaggtggattgcctgagcctaagagttcaagaccagcctggacaacatggtgagaccctgtctctacaaaatttttttttaaattagccaagcttgatggtacgtgcctgtggtcccagctactgggcaggctgaggcggaaggatcacttgaatccaggaggtcaagagccaaggagatcaaggctgtagagagccatgtttgtgtcactgcattctagcctgggtgacagggcaagaccttgtctcacaaataataataaaaattaaaaaataaataaaagtttttcttgccataagaattagaaaaggtatttgtacttctataaatttcagtttttatttaattagtgct

SEQ ID NO: 15364 - DNA, 1043 bp, Homo sapiens
ttaatagacaggatctctgtatgttgcccaggcggatctcaaactcctggcctcaactgatcatctcacctcaacctccaaaagcattaagatttcaagcatgaggctgggtgcagtggttcatgcatgtaatcccagcactttgggaggctgaggcgggcagatcacctgaggtcaagagtttgagatcagcctggccaacatggtgagaccttgtctctactaaaaatacaaaaaaaattagctgggcgtggtggctcatgcctgtagtcccagctacttggggaggctgaggcaggagaatcgcttgaacccaggagacggaggttgcagtgagtcaggatcgcgccactgcactccagcctgggcgacagagggagaccatctcaaaaaaaaaaaaaaaaaaaagatttaaggcatgagccattgtacctggccatgttttttttttgttgttttttgtttttttgtttttttttttttgagtagttcagaaaactaagttgtagacatgttgctctttaaatatattagtatatatttaaacaaagatactctcatgtatgaccacagtacagtcatgaaaatcaagaagtaagtgttgatgcaatactaatatctaagctaaaactcagttttctttcactttttaataatttctatgttttctgtaatttgggaggagcttgaattaatcttttgtaaaaattttgggctggtagcatttttctaactttttaaggtctccatttgtgctgtattttatatcttagtaaaaacatataaatcaatgattaaaaatcacagtatgaacgaagcatctgaaatatggaggctttagttagaatatgagagagcagctaaaaatcttttaagactttctttgatatttgttactctttttcaacatggacaatttaaactgtggattataataatgtattttcctttgataggagctgttattcttatagcctgttgttactcttaagctatattatacctataaaatttaaacttaccaagaaaagattatttcattt

SEQ ID NO: 15365 - DNA, 1054 bp, Homo sapiens
ccctgccgtgcgcacaaacataacagttgcttttgtttaatgtgcgggtggaatatttgatccattccaaccaggcatttacatcttggtatcttgtctcaattgccaaagtttgttttaagtctttaacttttaccatcgctatcttggccttgtccttagatggaggaggaacaatggttcccttgtgagaggttttggaaaaaggcttagaagctggtgcaggcagtgggggatcaaagacatgcattttaaggagtccaatagggtctgtccttgaaacctcagcccccataccataaaactggcataaagaagggaactggcttagaaaagggaagaactttgggggcttgaaataatagcctgtataggattgcattggtttagctgacagctgggggaggggagctgtccctttagtaaaatgaatgtatggttttaggaaattacaaaaactgtttggggcagtctatccttgctctttagtggtccacagaacgttggaccaactacggcataaaagctctacatcggggggccagactcctggttgacactcgggtctttatcgaaatctccctggattaaaaggtcccaatttactaatgcccattctgaggagagtcaggagggacaaggtacttttctgaaatagagagctgtctttgacttggcaagtccccacagggtataacagggcaagcattaaatgcagtagtttgaggtgaaattgacttggtgttaataactagatgcttagcaatagagtgagaaaagaagagtaatagaatagatgaaaaagttaaatttttcttagctttggtttggtagggttttcccctgggactgtggtccatgactggagggggtggcgctttgacttaggtgtgggtgagtccatccctttttcgctgtacgaacagcagtcttggtggttagcagcacaaggtagggtccttcccatgctggctcgagtttttttctttccactctttgatgagaaggtgatcttcaggctggtgctggtttactggaaattctaggggttgta

SEQ ID NO: 15366 - DNA, 1055 bp, Homo sapiens
caggggtctttaagtgattgcttagtgggccaaagaataaggtaactgacccctctctttatcttgaacttgaccagactactttctgtggatgattcaaattccttttcatatgagtctttttatttttgaaggttaagaatctacctggggtagtgaaggcattggaccctgggaagccagtagacttgagatctactgtcctgattcttctatcttactagccaagacagtgtccgtgagcaagacactttacttccagagggggtggcttagttgcctaatttgtaaaataattataattcattattggaagtggagattatagagctggaatattcacttcctgtggtataaatagtgtgaacaaaagttggatggctgtaaagtgcaaggtcttttttgaggaatgttgcatgtttcacttgtggtagagtacagaggaatgatgaaaaataagcttgaaaatgtaggataatggtagaatggagagaaccttgaaaatagcctgttaggacagtagatgagtcattcaaaactttgtcagagaaaagtgagaggacctgctttataattgtaccatgacttcattttctttattaattattctctttctctttttaaatgttcagattttaaggaataaatttgcattccaaccaagttttgctgtttcatctccattcattgatatgctttaattttgttgtagttgggctcagcagatttctactttgtattgtatatgttcgttgagtaaatatatttggtaaaattaagaaaggtaaataacaaataaaaataggttgtggtgctagcagaaaggggcataaagagataagcttagaaaagttaatacctggaacagctttttgtttattaattttagtttgagtataagggtcagagtttggttgataataccttttaggatttgcttatgaggccaaagtgctgctcgtgtcacaggacctagctgagcatcttggacattgttttttaatatgtcaaatcagtgttagtcttgttcagtataataaacatttattgaatgt

SEQ ID NO: 15367 - DNA, 1001 bp, Homo sapiens
aaaaaaaaattagccgggtgtgctggtggcgggcacctatagtcccagctacttgggaggctgaggcaggagaatggcatgaacccgagaggcagagcttgcagtgagccgagattgcgccactgtactccagcctgggtaacagagtgatactccatctcaaaaaaaaaaaaaagtcatagtgccctcagaagactgctagaacactcttgccactctggtttactgttacttctctttaactccttgagtcattaggcccagggattttttcaggaaatgtgtataggagtccctctttcctgagtttatagcctcttgttctgtcccattccacatttctgaattgaaatgacacacatgctcttaaagtatctgagccttccatttttttgatttagtcttcattgtcaccattgtgagtctttcaataactgatgacagacaattcatattaatcatcccatttcatagatatggaaactgaggtaattaatttgcccagggtcacatgagttagtatgtgttagggttggaattatgcattggaatctcctaccgtctggctataaatcctgtgttttgtccgggcgcggtggctcacgcctgtaatcccagcactttgggaggctgaggcggatggatcacgaggtcaggagatagagaccatcctggctaacacagtgaaaccccatctctaaaaatacaaaaaaattagccaggcgaggtggcgggcacctgtagtcccagctactcgggaggctgaggcaggagaatggcgtgaatctgggaggtggagcttgcagtgagttgagattgcgccactgcactccagcctgggcgacagagccagactccatctcaaaataaataaataaataaaaatcctgtgtttaaatgactgttttgttgctgctgtctcgctacctcccaatctactacctttggagaaatagtcactatatcattgggctgccatgaagaggaaggcttttgaagtc

SEQ ID NO: 15368 - DNA, 1023 bp, Homo sapiens
ttaaaattgctttttttgtgttgttgttgttgttgttgagttttccatatactattatctctactgttgtgtttgagaatgtccaaaaagaattgtcaaaaacatttttaatagtcgtatggactgatatattcaaataaaactttttaatgatgttttatttatttgtttttacttttttttttttttaaagaatagagaaggggtcttgctatgttgactaggctggtcttggactcctggccacaagcatgcctccccaagtactgggattacaggtgaaccactgctcccaacctttaatgacattttctgataaggtcttttataatatggcttcttctaacctttcggttttatgttccgtctcttcctcctcctctcctctaccctcttcctctcaccctcacccccaaacacacactcaaaataaagttccagccattctttatttccctaaactctggtaaagttagtgtatcttctccagcccttcacacatactgtttcctctgcttagaacacttcctctcccatttgatctgagttctcttcaggtcaaagcttagctatcatttcctctgggaaaacatttttgagcctgcaagtgtaaatgaggtattcctcctatgtgatgaacttccattattataatatttattaacctgcattacagatgcctgtcctatttactttatctttaacagtaggctgtaatctctgtgagggtagggattgtattgccctatgtatgattgtaccccagaatgaaagaatgaatactagtactcatattatttcaacaaatttgtgtttctcataggttgaaggaactctgtgtgatacagagttgaacataagttcttttattcaggtaacttcaaatctaatggaggagaaataggttacctcataccttgccctactccacatgacctcttaatagtaggaacttcaaaccaaatggtatgatcatacctggtcaaaaccaagctgaaaataaaacctagaaatactgctggc

SEQ ID NO: 15369 - DNA, 1029 bp, Homo sapiens
gaattagtttttctcatgagaaagctgtaaaatacagtattctcaagtagtggtatgtttttactgataataagatgggcaactcttcctaaggtgttttggaaaaactgagctgttttggttttaatttgtgtaaattatgagttaaccattttagtactagaaatatcatcatagagtcctgaaatcctaatcagaaggattgaaatttatagctagcagatattcaaaaggcagctaattcattcctctcatttgacaaatgaggaagctaagaacaagagagagggttatgaagctattagtgacaaggaaggattagaatgtaagtctctaaactcccaggctagtgtcctttataataatttataagaagggagttcttttgttttttttttcttttgtggcctttatagccatcttgctgctcccaggaactttgttaaacaatatgcagatgcttcagtaacaacaagaattgtaaagttaacttttggagttatgtcattttggacagatgaatctgatttatttttaactttcgtggaagatgattcacagctttggaaacgttttcctgatgactgtgggttatcaggtaatggaaacttcattatttatttgctggcaggatcatacaatgaacacggtattttcaagtgagatctgaaagtgctctggcacttaaacatttagtattttatcttaaacatattctagatcatttgactcataactgtcacttgaccctggggtcaaaatttgcatttgtgtttatgtttttagtgatgccaagtaaatactgttttggttgttggggactaatattaaggaaaagaatagagatgttcttaataagatggttttgagttaaatgaccaaattattttgtaatatgtggcattaatgtcgcataattgaaactaagaaaaagtgcatgtcttattatgaggcactcagtagtccagtcattccaaacttaaaagatatcttgtggtgcagttggtacattttcatgttgtgagcaga

SEQ ID NO: 15370 - DNA, 1047 bp, Homo sapiens
tttttttttggagacagagtcttgctgtgtcaccaggctggagtgcagtggcgtggtcttggctcactgcaacctccgcctcctgggttcaagccattctcctgcctcagcctcccgagtagctgggattacaggcacccaccaccacggccagctgatttttgtatttttgatagagacggggtttcaccatgttggccaggatggtctcaatctcctgacctcatgatccgtccacctcggcctcccaaagtgctgggattacaggcatgagccaccgtgcccggcctcatcttaaccattttcaaaggtttattgcagtggtaggcagtacatttatgttgtgcaacctttactaccatcatctccagaactcttttcttcttgcaaaactgaagctatacccattaaacaataactcatttccctccacctcctagctcctggaaaccaccattctactactttctgtctctattattttgactactctaggtaccttacataagtggactcatacatacaaatgcctttttgtgactgccttatttcccttagcattgtgtccttaaggttcatccatattttagctactatgtttcagaatttccttttttttttttcttttttgagaagcagtcttgccctgttgtccagactgaagtgcagtggcgtgatcttggctcactgtaacctcagcttcctgggttcaagtgattgtcacctcagcctcctgagtagctgggattacaggcgcccgccactgtgaccagctaatttttttttttttttttttttttgagacagagtcttcctctgtcgaccaggctggagtgcagtggcgcgatcttgactcactgcaacctccacctcccggctcaagcaattctcctgccttagcctcctgagtagatgggattacaggcgtgtgccatcacacccagctaatttttgtatttttagtagaaataggtttttaccatgttaggcaggatggtctcgatatcctgaccttgtgatccgcctgcctcagcctcccaaattgct

SEQ ID NO: 15371 - DNA, 1040 bp, Homo sapiens
tctagagacagagttttgctaagttgctgaggctggttttgagcttctgggctcaagctatctgccatccttggcctcccaaagtgctaggattacaggtgtcagctactgcacctggctagttgctataatttttaaaaattattttttggctgggcgcagtggctcatgactgtaatcccagcactttgggaggccaaagcgggtggatcacaaggtcaggagtttgagaccagcctggccaatatggtgaaacgccgtttctactaaaaatataaaagttagccaggtgtgctggcacgtgcctgtaatcccagctacttgggaagctgagggcaggagaatcgctttaacccgggaggcggaggttgtagtgagtcgagatcgcgccactgcactctagcctgggcgacagagcgagactctgtctcaaaatatatatatatatatttttattatttttctggaatatttttgccttgccattgtttgaatctgtgaatggggaacccttggatacagagggttgccttagtttgaatcgtataatatgtagccttttcacttagtagcagtgtatttaaggcttctccttgtcttttctatgggttgattatttctttttagtgctgaacaatattccatttatggatgtgctacagtttgttcaccttttggagggtatcttggttactttcaagttttgacaattatgagtaaaggctgtaaacatccatgtgcaggtttttgtgtggacgtataagttttcatgtaatttgagtaaataccagggagtgtgattgttggatcatatggtaagattatatttaattatgtaagaaactgccacatgatcttccaaagtggctgtaccattttgcattcccaccagtaatgagtgagaattattattgctcccctttcagcttttggagttgtagtgatttggattttaaccattttggtagttatgcagtggtatctcactgtttttaatttacattcccctaatgaaaaacagtattgaagccaggcatggt

SEQ ID NO: 15372 - DNA, 1075 bp, Homo sapiens
ttttagtagagacagggtctttctatgttgtctaggctggtcttgagatcatggcctcaagtagtcctcctaccttggcatctcaggagtgctgggattaaaggcatgagccactatgcctggcatgcctcagcctccagagtagctgggattataggtgtgccaccatgcccgactaattttttgaattttagtagggatggggtttcaccatattggccagtctggtctcaaactcccgacctcaggtgatctgcccaccctggcctcccaaaatgctgggattacaggtgtgagccactatgccctgcctaaattttcttttattctattagtgcttgaagttactgagttctgaagttgttgagcttctctctgctttgctattgatttgagcaagttcggagcaccatggccctcatcttcgcattttacgctttttttgcaagtttatcaacaagctcaattaaaccaccaactgttttctgaaactggccagttttgtccgcaaagttcttgcactcttctttgagctctgtggtctgctgggtaacctctgagtccaacacccacagcttgttcaactcatcaaagtgcagtccctcttcagccaggatgtcctttaccatagttgtttcgcatccaagttccctagagaagctctgctctgaaggagtgacggtgacagtcaggaggaggtgtgtcataggaacaagggtcgagaaagaataaagttcgcttgcttgtcacaggtattgttcattcaacacacatttctttgagtgcccactacatgccaacactgctagatgctgggggtacagagatgaatgcaacatggtgcccaccctgctggccccgtggcagcagcttactatggcccaggctgatgtagactggcagcttctccccatcactggtagctggtatgcaggcagcctgcctcggctgttgccatgactacagagactctttacccatgacctgaaatatatttttattaaggttttttttttttaacaaaatggttttaaatttatttaaattaatttcctttttttttttttttaaattg

SEQ ID NO: 15373 - DNA, 1042 bp, Homo sapiens
ttagccaggatggtcttgatctcctgacctcgtgatctgcacaccttggcctcccaaagtgctgggattacaggcgtgaaccaccgcgcccggccgacagtgatttttcataaaggtgttccctttgttctgggatttttagccttcatacatttttactgttaggcatttcctttttcagatgatggtgataatagttaaaaaaattttattgatagtattaagggagtccactaccttgtgtcagattccctgtttctttttgaagcccttgaaatgaagtttagggaccactgatctagaattctctttatgctcctccactacccattaaccccactctgtagtctgccttttcgctttcttctctcctcccttctaaacacttcgtagaacactatgttttctgttcatgattgaccttcaaattgccaaatcctttggccttataaaccgtatgtacttaaccaacactctgttgttaacaaatccttcaaaactgttttcttttgcttccgctctgtttttcctgtcatccacttatcacttttcttcatatgttttctttcttttgttcccagttgttattatgtggggttctggttctattttatgttctcactgtatattcagaatcagatttttagctaccatgtaccatcttaataatacctagcatttatttactctttcctaattgttatttcagtgcttcagtatttcagtattcatttaattcattcagtattcatttaattctcaaaacaactcagtgaggttgatacaggtataattggtgtcttttttttattttttctgacactggcatatcgaggcccaaaggttaagtaatctatgcaactaggaggcagtagaactgggatttaaacttagactgcctgtagaggccatgttcttaaccactactagatttttggcgtccagatgtcccttgtatttctaacttccgtttagtttttctacctcaaattcaatacatccattcagttaatctcaagtgcctgcctctttcccttgacaa

SEQ ID NO: 15374 - DNA, 1986 bp, Homo sapiens
ctactttgaagatagtccctctaatcatggaagaagtaatttaccaaaaaaaaaaaagcatttaaaaagtttctgttttcaggctgggcacggtggcccatgcctataattccagcactttgggaggccaaggcagacacatcactcgaggccaggagttcgagaccagcctggccaatgtggcaaaaccccatctctacaaaaaaacacaaaaattagctgggcgtaattccagctttttaggaggctgaggcataagaatttgcttgaacccgggaggcagaggttgcagtgagctgagattgcaccactgcactccagcctgggcaacagagcaagactcattgtaggtgctcaataaatattttgttgaatgattgtttaccttaagtactcttccaaaatagttgtaaaaaaaaagttataatttaaactgtttgttttcttccctgatagttacatttttgtaccatttaatgccatttacaaagcatttatatacatagaactataggcatgttgtgataactggcattgattataatttgttttataaatgaggaaattgattctgcacgtacttagctgatttgcctaagatcatgagaaaatagtagcacacatgagagtagaaccttcagcttcttattcctaattgtcggttcttcctcccaccataaatggattgttattaaaaaaaagaaaatgtggccgggtgtggcggctcatgcctgtaatcatagcactttgggaggctgaggcgggtggatcagttaaggccagaaattcaagaccagcctgggcaacatggcagaacccccatctctactaaaaatacaaaaattagctgggcgtggtggcacacacctgtaatcccagctactggggaggctgaggcaggagaatcacttgaacccgggatagggaggttgcagtgggccgagataatgccactgtactccagcctgggtgacagaacaagactccatctcaaaaaaaaaaaagaaaaattgttttaaaattataattaccgttttgatggcggctttcagtttgaaagatagcttaatcatttctaaatttctctgataggaaacatttttcctttttttgaatgatgttggggcttggacaacagattattatttttattgaactgctaaaataaggaggcaaaatatagacccagtactttctcagtttgcttaaggcagattataataaaaggagtttcatatatttttacttgtgacaggaagcagtttatgtaacaaaaaaagattactgtgttttaaaaatcacctgataaaatactattttttaatttcttaaatctttgaattctgttgctggtttagtagtacattcagctgttaacgtatgctgcagctcatagatatttttctatttcagagcaatagtatggttacagaaccgacgtgaagccactgtggagcgaacgagaaccacaagcagtgttaggcgagatgaccctggagagtttcgagttggtcgtctcaagcatgaaagagtaaaagttccacgtggcgagtcactgatggaatgggctgagaatgtcatgcaaatacatgcagatcggaaatcagttcttgaggtaatctcatataaaattagatttagggaacaggaatgacacttagggaaccagcccaatgtgtatcttcactgcattaaaaactgtggtaggtaaacatgaagaggggttttcctgttctgtaggcagaagccttctcctctggcagagcatctttttcataagaggatgtcagtccacctccttaggggttaggtcttgtgccattaatgagcaacaaagaagatctccactcttgaggtggcaaagtgcttgttctgcttgagggcttctacccatttcataacaaagttggactaaaatagtagtactcacaagggattcttttttacttttacattaaactgtgctgtttgatattttgggagcac

SEQ ID NO: 15375 - DNA, 1077 bp, Homo sapiens
ttagtattattttcatgtaaaaatgagagagctctctatcatacacatgtattctgttctagcactctttcagtaacgtaggtgtaattatttccattacaaaagaaacagaaaacaggctgggtgcagtggctcatgcctgtagtaatcccagcacttcaggagtctgagacgggcagatcacttgagatcaggagtttgagaccagcctagccaacatggtgaaacctgccgtctctactaaaaatacaaaaattatccagatgtggtgttgggcacctataatcccagctactcgggaggctgacgaaggagaattgcttgaacctgggaggcggaggttgcagtgagctgagatcacgccactgcactccagcctgggcaacagagcaagactccatctcaaaaaaagaaaaaaaaagaaacagaaagcaaaaatgtcgacgcctagagagtcttaagtagctgacatcctttagctaatatatggcagagaggtttggatttcatgtagccttgtttcctagtgtagtggcctttcttggactgcttgttttagtataattgtttttcacccatcttccaaatttttagggacccctcattcagagctcttggaagaagtcgaatgtactccgtcacctcgattagctctcactttgaaagtaacaggtcttggaacgactcgtgaagttgaattaccactcaccaatttcagatcaaccatcttttactatgtacaaaaattgcttcaattgtcctgtaatggcaatgtgaaatcagataaacttaggcgtatttgggagcccacatacacgtaagaaattttaacttaatgttttggtagataatgtcctagtgtagagccaagaagcattgcatttattttggattataggaacagaaaagattttgtttttattctgttggcttacaggaacagataatagtgtttgggactcttggtgtagaatgattaagttttagaagtagaaggacatttacagtctatactagcttcttacgtaattgttgaaaagagcgtcatttgaattctttgtctaagatcgtgtatga

SEQ ID NO: 15376 - DNA, 1065 bp, Homo sapiens
attccgtagtaaataggcattatcttaagtagtcattgtttttaagtaacctaccaggtcacatatctaagccccgtttttcactgattgacttaattctgtttttcctcgtaagatcttttacatgttgtaaaggtttgtttttttggttattgttttttaaatagccccacatggttatccatttatattatgattttgtaattcaggtttagtttatggttgtcctttatcacttgtttttgtcatgcttgtgtctgtgctcatcttgtatgtggtggcagaacgcaacagttgtcccttttgaattttacttttgttttgtaaaaacctaaaatgcaaagttcctttgttatgctttcttaattgtgttgacataaggttgtgggttttgttttcaagatttccttgatagctgccgtgccagtactctattggctgagctcgatgatgatgaggacttacctgagccagatgaagaagatgatgagaatgaagatgacaatcaggaggaccaagaatacgaggaggttatggtagagagagtaccccattctctttacaaagataggatgttaataattgaaatgaagaaaggaaaagctaagtcataatcaaactttgaagcaaggaaatgtggcaccagtataaaaaatgtagttaattaagaaaagcagttttaatctgagcatttatgattctccacttaaagaaaataagttgcttatatttgaaaaattttagaatgtcacatgatgttttaacaggcttaaaagggtgtgaaattaggctgggtatagggctcatgccctgtagtcccacactttgacatttgtagtcctggctacttgggaggctgaggtaaaaaatcacttgggtccaggagttgcaggctgcagtgagctataattgcatcactgcactccagcctgagccacagaatgacacaaacacacacacacgtacacacgtgtatgaacttagtgcagtggctcgtgctgccatgagctataattgcatcactgcactccaacctgagccacagaatgacacacacacacacac

SEQ ID NO: 15377 - DNA, 1049 bp, Homo sapiens
aaccataaagctatttgacactcttatcactaagagaagaagtgtaatagattcataagctttgtaaaatgatattccttgtatgctgttatcacagtcttttggaagtaattccttagttaggtaatgcatgattcttgcaaattaaattttatttggaaagttcagtaacagccttatggcttccatgctataatcaaagggatgtatttgattcagttaagatagaatctgtgtttctatttcttttatttcatcttattagaaaagtaatgctctgtatagaaactagaagaaaattaaaatcatctagtccccacctaccagacaaccagctttgatgtacatcatttgatgtatgtttttgtttttttaacataaaaggattatatccttttccgccagctgttttcactcaatacattgtgaaaatattttcacatatgttgcatgggtttctataacatttgaaatgactgccaaatatttcactgtatgatcatcatttaatattattatcaattttgtatatttaagttagaacttttccattaccataaacatcattatgaatgagctttcttgaactgtattttaatatacttccttaggataaatgcttaaagtaataattattgaattgctttccaaaaacattgcactccatcccaattgttttggaataccctttaccatatatccttgatcatactgcctgtttttctttaaaaaaaaaaaattgggagtaattttaaagacaaagtttatgtgaagatacatttttaaggtgctattttgtgtatagcccattttcatgttttcttcctttttgtgagaatatagcctctcctaattcatagcaagaatttgatatgatgttccatagttttaagagagtcattatatttctgtttctgcttattaaacgtgtgtgtagcaaaatgatgatgattacaccaaagtgttataaattcattgcataaggtgttttctgatttattatttctcatggtggccctgtgcccctctctactgatttgttattatgt

SEQ ID NO: 15378 - DNA, 1036 bp, Homo sapiens
ttagttttattgtttaaaatttatattttaataggtctttttttcctaagagaaaatacatgtcatacttgaaagaaataagattttgaaacaagtattttgtctttatagaaagccgaagtgaattcttagagaagttacaaagagctcgaggccaagtaaagccatctacttcaagtcaacctatactgtcagcaccaggacccactaaacttactgtaggaaattggtcactgacatgtttgaaagaaggagaaattgctattcataattcagatggtcagcaagctacaatattgaaagaagatttacctggttttgtatttgaatctaatagaggaaccaaacattcatttactgcagaaacttccctgggtaagtatgtagatatgtaagtttattgggtacaaataaatgaatatgttaaattgtaacaaagtaagctctgtgaatattcttttttttccccccaaggttcagaatttgtgactggctggactggcaaaagaggcagaaaactgaaatctaagttagaaaaaacaaagcaaaaggtatatctgttggatgtgctttattcttgtcttttatactgatttgttaaattttcagtggtaaagtataagcactgaaaaaaattgagccatagaacataagcagccctaatataatatatttttagtttttctattttctgtgttttcttaaatatttatttacatataatttttatacctatactaaataccaacattaaaacagaatcaaaatggatgttaatatgaaacaaaatgtaaattacttgacttattaattgcacaaaaaaattcaactcattgagattattaatgatactaggatatttttagtgttgtagtgggattgaaaatgacttgtattttacaatctgggttaataccttgtgatacagcaaacttaactgcctggttctaaattcagattattttgatacttagtttaatggccatctcagctgaaattattacttcaagaagatacagtagcagatgcataattg

SEQ ID NO: 15379 - DNA, 1022 bp, Homo sapiens
tagtcttgaactcctgacctcaagcgatccgcctccctcagcctcccaaaatgcagggattacacgcgtgagccgctgcactgggccccatttattttcttagtagttgtagtactttttacttgattttctaaaattatcatgacatgttaacattcatgctagtaaagtgtagaatatagaatagaaaagtgcatttaagaaaattataagtcatttttggtgagctcaatatatttataatagaaaataaatggaattatttcaaaaatgaacatatagtgctgagtcccaattttttgtatttttttattaagtgtatttttttagcagagtgtataaaatgtaacattggatattttactgttcattaatgcatgcattttgatttattttaacttcatttggcttcatataattctatttttacttttcaaggaaagcaagtcttgctctaattcgaaaaatgattcatttttgctctgaagcactgttaaaagaagtttgtgattctgatgttggtcacaatttgcctacaatactagtggaaatcactgcaactgtcctggatcaagaggtccgtttctttttcaaaactctttagcattaatttcctttagctagtagtctgaaataaaatttttgttttaatttcagtaaatcatgttgtgcaaattactgcatttctctactcctggcaactaaacttatttttattttttatttttcaggatgatgatgatggccacttgctggctttgcagatcataagggatttagtagataaaggtggtgatatatttttggatcagctagccagacttggtgtaattagcaaagtgtcaacgttggcaggtccttcctctgatgatgagaatgaagaggaatcaaaaccagaaaaagtgagtggtcttaattatagaggtatcaggaagagttttttttttttttttgaggaaaatctagtttcaatttttgatggtttttgacaggataatgacaatatgaaataattctgtata

SEQ ID NO: 15380 - DNA, 1027 bp, Homo sapiens
aaaaaaatttttttttttttttgaggtggaatcttgctctgtcgcccaggctggagtgcaatggcgctatctcggctcactgcaagctccgcctcccgggtttacgtcattcttctgcctcagcctccctagtagctgggactacaggcacccgccaccgtgcccagctaattttttttgtatttttagtagagacggggtttcaccgtgttagccaggatggtctcgatctcctgacctcgtgatccgcccgtctcggcctcccaaagtgctgggattacaggcgtgagccactgctcccggctgaccaaagttttaagttttcagagggttgatgaatccagaagctctgtgaaataatttttggaacgaagtggagtatccaaaattatcttcttaatttgttattgagcacattgaagttactagtgctctttagtattcttataagcatcattgaaacaatgttctaatttcagtgtatttgttaattagagataattattatttgaagttggatatatcttaaggtttttttccttgaaagcaaaagtttccaaaaaagtatttctttaaaaaatatttgtctgtaggtgattggatgtgtccagttaataaaggagatgataagaaaaagaaagatacaaacaaagatgaagaagaatgtaatgagcccaaaggagatccggaaatggcacccatatacttgaaaaggttattgccagtgtttgcacaaacatttcagcaaactatgctgccttcaataaggtagttattcatactatttgatgtgttagtcaaattacaccaattatatggttttatttatctcccttttccagaagtatttgaggtttattttaatgttaaaaaggtgtggtaagaataaaatttagatgagaagtgggaaagccctatcttttcttctgacgatctgaacgaagagaagttttagaaaagattactagattcttaacaaattttaggtagctctctgaatattaaatctctgtttgataagtattgc

SEQ ID NO: 15381 - DNA, 1049 bp, Homo sapiens
tagggggacagagtctcgctctgttgtgcgggctggagtgcagtggtacaatcttggctcactgcgtcctctgcctcctgggtttgagcgattctcctgtctcagcctcccaagtagttgggattacaggcatgtgccaccacacccgcctaatttttgtgtttttagtagggatggggtttcaccatgttggccatgctggtctcaaactcctgacctcctcccacctcggcctcccagagtgctgggattacaggcgtgagccacggtgcctggacttaaatactttttcttagctgatctcaagtttgctgattatgtactgctctatagttgacctaaatatttaaaacactctcttggctctttatttagatgatgactaatgacgatcttaaaatggttcagtctttagaaaagtttagtattttattggctttaaaaatacgtttctttttttttccttcaaaatttcagcctttgaagtaaattttatggatgatgtaggtcagactctattaaactgggcctctgcttttggaactcaggaaatggtaagctaataaataaaagctggtatttaaattaaggatagaaatattaataaaaagcagctttatgattcgttatcattttacaggtagaatttctttgtgagagaggtgcagatgttaatagaggtcaaaggtcatcatcattacattatgctgcatgttttggaagacctcaagtagcaaaggtaaagtctaggttttaaaattactaatttttaacatttacatggtttaaaaattagaatgatataaaaccttttatttccatgccatctccatccacttcattcccccttactcactgtaagtgtttttaattagttttttctttttagtgtttcctaatacagattcaataaaaacaaatatatatatatgtgttccctccttttcttatacactcacctgtactttgtttttttacttaataatataaattagagatctctccctgttagcatgtagagaacttttttatatctgtatgcatatcct

SEQ ID NO: 15382 - DNA, 1071 bp, Homo sapiens
atggctcactgcagccttgacctcctgggctcaagtgatcctctcacctcaacctcctgagtagctgggactatagcacatgccactactatgcctggctaattttttgtatgttttgtagacatcaggttttgccgtgttgcccaggttagtcttgaacttctgggctcaagcgaactgccaaccttggcctcccaaagtgctgggatcacaggtgtgagctaccacacccatctaaaatgtattattaaaattaatttcatttgtttcacttttctgtttttaatgtgtcactaataaatttggagagcgcattgtttctgtgattcttgaaaatcaggcttgcattctttcgttacatttgttttactattataggtattagaactgatatgtactcgtgagtcaggagcagtctttgaggctggtggtttgaattgtgtgcttaccttcattcgtgacagtggacatctagttcataaagacaccttgcactctgctatggctgtggtatcaagactctgtggcaaaatggagcctcaagattcttctttagaaatttgtgtagaatctctgtctagtttattaaagcatgaagatcatcaggtaaataagttgctgttacatactttccattttcagaaagtgatttttttagtgttcccctgtttataattatgatagactgtaatttgtgcttttcacttgatgaaatcgaggtaattccatcctctttctctaattttatctctgcatgtggtaatctccattttgggaatgaaacttttaagattataagtgtgatatatgtttattcttaaaatttaaatatcataaaaatgtttttacagctgtacttgtactgagtgtaattttgctgacttggtgcaattttgttgacctgattttgttgacttaagatagatctcatttaaataagacggtattttttatttttattattttttttttgagatggagtcttgatctgtcacccagggtggagtgcagtggcatgatcttggctcactggaacctctgcctcccgggttcaagcgattgtcctgcctc

SEQ ID NO: 15383 - DNA, 1173 bp, Homo sapiens
ttttctccatgttggtcaggctggtctctaactcccaacctcaggtgatccgcctgcctcgacctcccaaagtgctgggattacatgcgtgagccaccacgccagcccttctctgttttcttaagtgaaagctggggtttgatttttgaaagctggggtttgaggcctgaagcatttaatgccataaatttttctttatatactactttagttgtatcctacaaagtttgatgttatatatgtatttcaatcagttagtaattttttttttttttttttgagacagggtctggtccatacggagaaaccccatctccagcccaggctggagtgcagtggtgtcatcttggctcactgcagccttgacctcccaggctcaagccatttttccctgcctcagcctcctgactagctgggattacaggcatgtgccaccatacccggcttatttttgtatttattgtagagacagagttttgctgtgttgcccaggctggtctggaactcctgagctaaagccatctgcctgcctcggcctcccaaagtgctaggattacaggcgtgagccactgcacctggccggtcataacatactaaggaaataagcaaattatgggatagtatttatagtatggttctacttgtgaattacgaaaacataaaatgtttaagtatatggaaaaatgaggccaggcgcagtgactcaggtctgtaaccccagtgctttgggaggctgaggcaggaggattgcttgagcccaggagtttggagctcctgaaacatccgggtagcagggagttatgattgcacaactgtactccagcctaagtgacagagtgagacactgtctttttaaaaaacaaaaccaaaaaaggtggggtgcagtggggcatgtctgtaatcgcagcactttgggaggctgaagtgggaggatcatttgaggccaggagtcggagaccagtctgggcaacagagagagaacttatctcttaaaaaaatcaatgtataaaaaatagggcctggcgcagcgactccccacacttgggaggccaaggtgggaggattgcttgagcccaggagtttgagaccagcctgggcaacatagtgagacccccatctctacaaaaaataaaaaaaaagttagccaagcatatggtgtttaaggctgcagtg

SEQ ID NO: 15384 - DNA, 1105 bp, Homo sapiens
aagtggtttttctttttttttttttcaagacaagagtcttgctctgtcacccatgctggagtgtaatagcgtgatctgagctcactgcaacctccacctcccaggttcaagtgattctcctgcctcagccgccccagtaactggaattacatgcacacgccaccatgcctggctactttttgtatttttaagtagagatcgggtttcactatgttggccaggctggtctcgaattcctgacctcaagtgatccgcccgccttggcctcccaaagtgctgggattacaggtgtgaccttttttttttttttttttttttaaattagatggagacaaggtctcactaggttccccaggctgatctagaactcctgagcttaagtgatcctcccgccttggccttccagagtgctgggattacaggcgtgagccaccgtgcctggccaagaaaggggaagtggtttttcctagagctaggaaggatgagtaaggagagataggaagtgggaacaaaacaaacaaatgcttgtagacttgataggaggctatgatccagagagatagagggttttgtgataaaagtagaaagttgaatatatttgagagagatttggaaggcaagatagtcaggatttgtcgaatgattaaatatgagagagggagaaggaagtgtcgtggatgactcaggttacaatggatgatgatgccactcactgagagagaacactggaaagaggaccatgtttgagagattgagatcatgagtttgggtttggatatgttgagtatgaggtacttttgagacatctcagtggagatattaagtaagcagttgtataaatggaaattggaggtgaagcctggattagagaaaaattttagagtcaagcacctgtggaggttaattgtggccatgggatgtgattgagatctagggcagtgatgcttaaactctatggtctcaggacttccttaagctcttaaaaattattgtggatcctgaagaacttttgtttatgttagtatgcttactgctatttgccatattcagaatgaaactgggaagttgtttttttttttttttttttttttttgagatggagtct

SEQ ID NO: 15385 - DNA, 1076 bp, Homo sapiens
ctgttattttttccattttcctttctaggctttattcatatatagtatgatgtaatttttaagagactggggcctcactatgttgcccagtctggcctcgagctcctgggttcaagcgattctcctgcctcggcctcttcagtagctgggactataggctgtgccaccacacctggctttataatgtaattttaaggaaatgaacctaaagttaagtcagatatgatttactatatgaagatacaagagtatttcaagttgaaggggttagccgtgtttggggtagtgtaccagtaacctccaaaaactagacatttggtttaattttgtgactgttttgtttttaaacattagtttgcttttcattctatagccagattttcttgttgttacaagggaaaattgtcctggttccttcttgaaactagtgagggaggcatagtgagatggaaagaatgggctgtggcatcagagacttgggttcagattcttggtctgttgtgttcattagcctctgagagccttactttcttcccctgtaaaatggcagtagtctttttttcttttctgttttttcatatgaagtcttgctctgttgcccaggctggagtgcagtggtgcgatcttggttcactgcaacctccgcctcccaggttcaagtgattctcctgcttcagcctcccgagtagctgggacaacaggtgcgtgccaccatacctggctaatttttgtatttttagtagagatggggtttcaccatgttgaccaggatggtctccatctcttgatctcctgatccacctgccttagcctcccaaagtgctggggttacaggtgtgagccaccatgcccagccagtagtcttttttccagtgggccttcttgtgaggattaaaggagagaatgtatgttaagtgttttgagtaaagtgggctacccactgatgccatcattaataaatatctaattttgaattttattttagcactttattccatgaataaagtgattgatttggaaaggtcttttaaaattcttttaaacaatcaactcccagcaggcaaaaaaagcaagat

SEQ ID NO: 15386 - DNA, 1051 bp, Homo sapiens
ctgtctttgacacagacagctctggtttctagttaagcagcaacctaatcagcttatatactcttgtgcaaaactggttttcatttggtatgatatctgtacgttaaacctggcggataaggaaagttgaaaaactgcattaagcactcttacgtccaaacgtacttaggagtcttttttaattgctaggaggacactatgaaaatttggttctagcagatgtaaaggaagaaaaatttaagcccaagctgttcagtcccggaatttaaaggacttttctccctttacttttcaaatttaagcaaagagacttttaaaaaaccatggcagatgtggacccagatacattgctggaatggctacagatgggacagggagatgaaagggacatgcaactaatagcccttgaacagctatgcatgctgcttttgatgtctgacaacgtggatcgttgttttgaaacgtaagtacattccttcatcatgttcctttgggttactgtagtgacatctgttttcaaccatttgctgacttcagtttgtgtagaaatttctctagtgaattttaacacgtatctttaaaaatattcctgaagagttttgtgtttacacttttccaagaaataaaaattggtaggtgaagaaactctaggactgatgattacgatgacacaaatacatatttgttgaatgaatgggaattagtaggaatattaattttaacccatagcttggttggttcattttcaaaatatgtcatgaactggggaaaatacaaatatttattttcttaaaggtatctatttctgtaccatgaaattgatttatggaataagagatgataataaacatatgttttgaactgcccatttcttcattgatgttgtcatatgacagtacttttgttaaagccgattattggtttgtaaatttcagtttgggaaggtataaattggatcttaaccgtgtagcagaagagtagaaaatttggagtagtagaaacattttgaagtttggggagtttaaacagttttattgggaggttataactt

SEQ ID NO: 15387 - DNA, 1045 bp, Homo sapiens
agtcattcctaaaaccagttattgaaaaatttttcactcctttgcatttgatcttttactctccatttaaattaagtgatactgccgttttttcttcttgtcttgtagaagatttccattaattacctataaaatttctcctttacctgatacatgatttttttattaattaaagtttattgagaaatgaagaacaagaataacccattaattcatgatgaataaaatctgatcagctgggcacaatggctcatacctgtagttccagcgctttgggaggtcaaggtagaaggatcatttgagcccaggagttcaaaaccagcctggggaacatactgagaccttgtctctacaaaaaattttaagaaaattatccgggcatggtggtgtgcacctgtagtcccactactacttgggaggctgaggtgagaggatcacctgaatccaggatgttgaggcaacagtgagccatgattgcgccactgcactccaccctgggcaatggagcaagacactgtctcaaaaatataaataaataaaatctgatcaaacttattaactttttgccttcccaaatcaaaaaagggtacatatttactgcaggaaaaaaaaataggcatcaaaaaaaaagttacatatgaaaaagaatagagattattatattatcagacttttcttttgggtacattagagcaagtgagaagatctgaagtaacagttacaaatcgtatgttaactcataatattcaagctgtaaaatgatttttttaatacacaatcatagtcaaaaattatcactatagtgtattaatttagtgtctcaatattttggttagtaatttattctgaatttattagattgaatttgttatattttagagtattcaccaaagtaaggaaattgcatttcatcattaggcaaaaatcctactgggaagtattttcctttaactgcatgctctttaacttccgttctaaacttggccttagctacactagcaattctgaatactcttagttttaaaacttggcttctaagagttaa

SEQ ID NO: 15388 - DNA, 2004 bp, Homo sapiens
tgtttttataggccaattattaaaagctttctgctttttattttaggtaacagtacttcaatttctaccttaaggacttcctgtctactgggttgtgcagtaatgcaagataacccagactgccttgttcaagctcaggccatctcttgccttcagcagcttcatatgtttgctccacgacatgtcaacttgtctagcctggttagctgcctctgtgtgagtatagaattgtaaacgagctcttagtttcttttatttgaatcttagatttattccagtacacattttaattatactctagactatgtacaaagttatgtgttatatacgtagctatttcccctcagttctagtctttttcgggagtagggggcagctttcatgcaatcagctcctaagtctctcttctattaatttttctcccattgttgtacttgatatttggaatatttattcataaatcaatgaaaacatattgtgtgcttataatgtcccatgtactatataaatgctgtaggacatgcaaaactctatgtggtcacctgtctttttttcttctttttcatctattctaagttctttgcatcccagatggagaaataacacttttccttaatattccagcaacatatgcatcaatatctggcttctaatattgtatctactgaatgtagaaagataaaggccatcaaccagaagttcctttgaagtggttcattgtcattggttttaagacttcccctggccaggcgcagtggctcatgcctgtaatcccagcactttgggaggccaaggtgggcagatcagcctggccaacatggtgaaaccccgtctctactaaaaatacaaaaattagctgggcgtggtggtgggtgcctgtaatcccagctactcaggaggctgagccaggagaatcgcttgaacccgggaggtggaggttgcagtgagccgagatcgtgccattggcactccagcctgggcaacaagagtgaaactccgtctcaggaaaaaaaaaaaaaaaaagatttaccatgtcaccagtttctatctggacttgcctcaaaaactgagttgcatttggaattataaattggcaccatggcttttcaaatttttctactcctgcagtattcgtagcacactcccattagtaacgtgactgttgaaaatcattatatagacctttcattttcaagcttgaggcaaaatatgcagcatttcagagcttgaaagaacctcagaatcttaaaaatctgtcgtgtagattatccctacttttgtagaatggtgtttgcattattaaaaccaatcttctcagtaaaaagataaactgaagaccgaaaagttaaataaagtaacacatctagctcacctaagtggtggctaaatctacattgtgggtttctggactcctccttcagtcctcatttcattattccatactacctttgtagattttatggatagatcttatctcaactctgccacctcctagctgtgcacctttagggaagtcccgtaatctcttctagcctcagctaccttgtctgcaaaacatgaggattacacaaaatgctgcttgtaaaggcaaatgtctcaggcatttagttagtactcaataatggtagttgcctttgctgtcttgacatgtgtcttcaacatacagtatattattatattaattattgatactgatagtcatataaaactatttatttatttattttagaggcacagtctcactttgtcaggctggagtgcggtggtgcaatcatagctcacagtagcctcgaactcctgggctcaagtgatcctcccccttcagcctccgaagtagctcggactacagtaaagtaccaccacacctagctaattttttttcttttttgtagagacagggtcttgctatgttacccaggctggtcttgaacttctggtctcaagccatcctcctgcctcagccccacaaagtgctgggattagaggtgtgagccaccatgccta

SEQ ID NO: 15389 - DNA, 1088 bp, Homo sapiens
aaattagttttgcttgcttctatactttatgtaaatggaatcatacaacatatattcttttatgtctggttttcttcactcaacattatgttcaagagatttgtccatattgttgaatgtaattgtagattttgttgaatctttttaaaaacttgaattttcattctttctatagattaaacaataaacaatttttcaacaaactagatttgattcaaactgttagctgaagtaccaactattacttgcaattcttaatgatgaactatatcattctaaattggatgattgcctctgagttggaagtcctccatttctctttccacatgagtagtagcattcacatttgctgttactttatcacttgcttcaacaaaagaacaagttaatttattttatgtttcttaatgctgctgtaatgtttttaattgtttttctttgtcattacagacctgggcattacattctctatcattgatcattgattctgctggcccactctattatgtgcatgtggaacctaccctttctcttattataatgttgttgttaaatgtgcctcctactcatgctgaagttcaccaaagccttggtcgctgtttgaatgcccttattaccacgttaggtccagagctacaaggtgtgcatagctgcttttgtgatgttttacattaaaaataatacacataaaagtgaattcagttcctagtctgtatgcttggcacgtgataggtgctgtatgttttgttaaatgaatgtataaatgccattcagcctgatttctcttaccttgaaaagacagagtacaatatttagacaattacatatctcctaaagatgccttccttaacagttaaaatgacagacatgaagcagaatcatccaaagagctgtgttctctatttaagaaataaatggctaagtccaaaatttcaaatattacgagctgttcaaattgcatactattacatgattataatacatgaaagtaattcttaactaatacaagtgaggctaagtttattggcaatttctaattccactttttatgaaaatttggtataacctactgatagtcttaggttctt

SEQ ID NO: 15390 - DNA, 1035 bp, Homo sapiens
acgccactgcactccagcctgggcaacaagagactttgtctcaaaaaacaaaaaaagatataaatcacttaccatgaagtttacgcttataaggtatacaattcagggattttgagtatatttgctatactgtacagtcactaccactgtctaattccagagtcttttcattaccccaggaagaagtccattagttgtcatttccatttccctttgccgcagcccctgacgaccatgaatttactttctgtctctatgaatccacctattctggatatttcatgttaaaaaaaaatcattcaatatatggtcataaatgacttgcttctttttaaaaaatcacttttaaaaatcactttttaggcctggcatggtggctcacgcctgtaatcccagcactttaggagaccaaaatgggagaattgcttgagctgagttcaagaccagcctgggcaacatagtgagagctcctctctactaaaaattttttaaaacttagccaggtatggtggtgtgcacttgtagtagtcctagctctttgggaggctgagccaggagcatcacttatgcctaggagactgaggctacagtgagctattatcatgccactgcattccatcctgggtgacagagtgagaccctgtttcaaaaaatatatcattatggcttttatccttcgtggcacacatttcttgctgagaaactttacattatatttgtgtttataagctatttagatctgggacacttacttaaatagcatttgacatgaaacttacatgtttcatgaaagtttatgttgaatcatagcaaataataccctttcttttattgatggtgacagttacttcactgtctttgtagttagttggttagtagcccactgaggacctagtgaagccttgattttaatgttttattcttataagagcaacatggtggatagaaagtgtattaattatgtaggctgggcatggtggctcatgcctgtaatccagcactttgggaaggtgaggtgagtggatcacctgaggt

SEQ ID NO: 15391 - DNA, 1039 bp, Homo sapiens
acagaaagcatgccttttaatgcctaatttgagggcaggtgtcttgaagtttatgtagttccttctaccatttgccctctcaggactattctttgcaaacagaagtcatgtatacctttatagaggtagggagaccctaggtctatttatattagacacttcttttgcttattgtttcaaaaatggttaatgttgaggtataaaggctttctaagtttaggcttttagctatatatggatatttatggtggtttcgacacttcttattagctataggaaatctcacgaatgctacaaaaataatatcacgttttcgtatatgtgtatgaagataatgccatagctttatatctttttatttactttttcagttgtaacaatgaatttctgatgattcttgctttcacctttacccttctctcatgagtaatatttatacaatgattagtccatgttcatattgcctttaaggttattaaacaacaaaattagctggtttatattgggattgaaacaggaacctttgtctctgcttaaaactcttggcaactaagtttaaaataataactgcgctaaaattgttatttgatattccattataaagaagaatttagctgggcgtggtggctcacgcctgtaatcccaacgctttgggaggccaaggcgagtggatcacgaggtcaggagatcgagaccaccctggctagcatggtgaaaccccatctctactaaaaatacaaaaaattagccgggtgtggtggcacgcacctgtagtcccagctacttgggaggctgaggcaggagaatcgcttgaacccaggaggcagaggttgcagtgagcagagatcacgccattgcactccagcctgggcgacagagtgagactctgtctctaaataaatacataaataaataaagcaagcaagcaagcaagcagaatttggtgtgaggaggagttatcctcatatttttccagtgggatttacttactaaataaaaagaacaggaaggtaaaatcttctcatgtattcccccaggg

SEQ ID NO: 15392 - DNA, 1041 bp, Homo sapiens
ggcattttccagctgctttgctccagagcgctctctcgtacgcagacacacacctccccccccttctctctctctctctctctctctctctctctctctctcaatttctctctctctctctctctctctctttctcgttgggggactgggaggctcggctgccggcgcaacaacgccactcagttgcagtttcaaacacttcccttctctggagtattgcagccaggaggaaagaaagaaacagaaaaaggaactgggaggccacaggagcgagctggggcaggacacagtcccgggagctccttgggggcagcggaaatcaatacggatggggggtgcgctggcccaagcagatgggcccaagagccccgtgggcggtgcagcagcagcacaagcaccttgtggctctggcgctctcagcagcgttcccaaagccggagcatctgcatcagtcacggacgtacaggagtgcagaccccagggttcacaggtgaatccccgcgcgtttaaactcacatacagaagcccctcccgactcgggtcccgggacttgggaccggactgccaccctctgggatctagcccagccgcaccccggtttgacagttcagcaaggcctagagaaaggctggctactcagtgcagggcccgggctagaatcctgttacctgggtagaccctggtcagagcgttttctccactaaaccaatcagaagcgtgtggacagctttttacgcagagacttgggtcagtcatgtgtcaaccaggcaagtagaaaggactcccaaagcatttccactttgaatgaatgaaagcgcctgatggaaaacatcagtcctgtgtgaggttctgcatttgactttaagcttaagaaaaaaataaagacctgaaaaggggtcctccattcggtctctacgactccagtaaagtagggctgggagttggaaacttccaaaggaacacataaatgtttttcgtggtagaggtgtttaatctgcatgatggtgtttaagttctctttggagtacactctacaggtag

SEQ ID NO: 15393 - DNA, 1032 bp, Homo sapiens
ccaagtttaagaggccaaagaagaaccccagcaccaataaatgagacatggggttttattaggtgcttatttacaggagagagagtccagtggcagtgggctggccaggagaactgttaccacctgcaaacatcatgctgtttatgtagcattttcacttaacaccctcccctcaacaacctctacctagcaaccttcatttaacccaacactaagggcctcaatgccctttacagcccatattccacgggatggacccagggctcggatatttaccataggcaaataataaatctccgggttgggcatgcctggattccctagctcaaaacacacattcaggtggcatctgccatacagggtccattctaagagtatgcttaaattattactatcaggtgcgttaaccctaccgtgtataggtgaaagtattgaaactttgaaactggccttaagcttactagctgtgtgaccttaggaaaattccttaccctctctgtgcctcagcttccttgtctataaaatggggctcataatagaacatatttcctgttggcttttatgaggcttaatgagtgaatatttgtgaagtgattacaacagtgcctgccacacgatgaccagcatattcatgcttgtttaataaatacagacactgtgataactactgccctggtagaagaagttagtgtcttatctctgaagatttaaataatggaaagctacctatttgcctccttgtatgcgcactgacttgcaaaacagtttcgccatttgacacctggactctgagagcaagagaagcaggaaataggggtttcagacagtgccaagcagagccgaataagaccttggcttagggagcttggatggaagggtggaggaatggaaggcaccttgccgtggggcagcagctgaaggcactttttctcatttcgcatttcccaaggtgcgttctgcctctatacttcacttgactcattgggaaaatggaatgagtagacgagtaatacttgaccctgtgcgagcact

SEQ ID NO: 15394 - DNA, 1067 bp, Homo sapiens
tcagaatactagtttaaagctccttcaaccagatagttttgaaatcacgcttttctcaacaaatcttaaacaatggattttcatttattggaaattttgcaaataaaatgagatctaattagtactttaatttggtgagttaaattttgtataaaatgccactttattataacttgttcaagatcgagtcatactagtgaatctgtctcaaatcatgagcaatgtaaaatacatttctatgaaaatacatgttgcaactgttagcagagaagtggtaacggcagggtgggtgtatccccttctcacctgtgggtctgaaaaatgatcatcattgcctagtggatggtggaggtcactgatgccaagtttttgaaatggtttttacatgcagtcaagctgcggttgatggcattcaagagcattctgtttaggcattggaatggaaatcctggacttttatttttcaactttacctttggacttgatgagataggttttttttttttttttatgaagtcagctcactggtaactcttaacagaaccactgtttccttttccacctgtggcatttggggaccacttttttatactgggttttgactgttacggttctatatatctgtgtatatcttcaaaggatacatatacgtttgttgtctggacatggctgcatacgtgtctagagcacatattctggtctagagccagcctgggccggcctgattcacctctccactcatttcctattgctacagagctaaggagaggcctctgggaatggggatggtgggaggtggggtgggtacactatataatgtcagtggacagagcggtaaatgtgtaaggggacatgtggatttatcagtatatccaagaatagaactataggactatactgtatgtgctgctgtagatgacactactgtgttaaacttgcgtaaacttcaaatattaatctagtcaggaagttttagaaaataaaaagcctgtactaaagtaggcatcctcttgatatgtgtcagtttattgcttggcatgtttgttatatgatcattaaattactct

SEQ ID NO: 15395 - DNA, 1027 bp, Homo sapiens
cttttatttatttttatagagatggggttctgccatgttgcccaggcctcccaaagtactgaaactacaggtgtgagccaccaggccaggccaacaaaaccccttttaaacacaaaatattgaagattcaggcaagaacatgcagtattgctagagaagggcctattgtgctttctttgtttagttttactttttaggttcactatagaacctcaagttgtcttttttttttttttaactaaactttctttcctttcttagtagaaaaatccttgaggggccctttcttagtagaaaaatccttgaggggggaagttttttaaagtaacttactgtaaccataaatcacttgccgttggttcttgttcttcctgtaatccattttatgtacttttgctagagtgtagtagtcccaattccaattctaatcatgtagtctctgtgcttaaaacaaaataatccaaaaatccaaccatgctccttcttcattatctactatacaacactgtaaagactgtaaacttagccagctttgacagccctctacatctgaccacatctgacctttctacacttaatttcccaccactgccttcctttcctcccagtccctgaaatgctagaaactaatttgccaggcataatgagcttccccattgtcttccactcatcaaaaatccatctctaccgccttctagtgcctgttccctgaagtcttcccttctgctccccagaactctgtcgtggctcaatccaggctgcccagtacatggatttattgggctgtttatgctgtccaccgtgtgcttagaaattccttgaatgcagagactgttaagctttgtatatacttttagtgcctagaacagtcccttatacttcataggtgcttgttggcttaatttcatcttcaaaaggaactttgattttgatggatatttgaatgttaaaaaaaaagctagaattttttttgggggggatagaggggaatgacgggggaagatgggtggctgcagcttagtctcta

SEQ ID NO: 15396 - DNA, 1071 bp, Homo sapiens
tccccgtacttagggaggcggaggtgggcagatcacttgagttcaggagtgaaagaccagtctgaacaatgtggtgaaaccccgtctctacaaaaaatacaaaaattagccaagcatggtggtacacacatgtagtcccagctacttgggaggctaaggtgggaggattgcttgagcccaggaggttgaggttgcagtgagcagtctttgcaccgctgcactccagcctgggtgacaaagcaagaccctgtctcaaaaaaaaaaaaaaaaaaatccaatatgcacttatgcacttatgcagttgcttgaatatggtggggaactgtggaggaaaaaaattcaaactttatggtgctgttgcatataactattcaaggcatgagtctttgcagccgcttggaaagaaggggcaccttaattcaactgatgggatttgggcaatttttgcagtaaagagaaattaagtgaccctgttgcaagtgaccctttgggtctgtttagtgtactgttgtagcttccactgatgaatatataattggcatcaatgttttacatgattgtaatttgaatgcttataagtgccagaggtgatcctactgattgggaagagatgctgtattagtctgttttcatactgctgataaagacatacctgaggctgagaaatttacaaaaaaaaagagatttaattggacttagagttccacatggctggggaggcctcacaatcatggcagaaggtgaaaggcacgtttcacatggcggcagacaagagaagaaagcttgcgcagcaaaaatccccctaatataatcatcggatctcatgagacttattcactatcacaagaacagcacaggaaagacctgcccccatgattcaattacctcccactgggtccctcccactacacgtgggaattcaagatgacattttggtggggacagagccaaaccatatcattctgcccctggcctctcccaaatctcatgtcctcacatttcaaaaccagtcatgccttcccaacagtcccccaaagatttaactcatttcggcattaactcaaaagtcca

SEQ ID NO: 15397 - DNA, 1044 bp, Homo sapiens
gccatgagataataatacaagcttggcggttttactttgccccaagagataatccaaggaaggctgtgaaccaaaatttcgggtaaagcagtctccatgacattttgagttttaaaggccaaacctccccagactccaaggagcactggggccaaacagtagcaaaggatcgtgtcacctgttaaccagaccctctgcttagaactgcagcacaaagacctgcatacatgtaacaccattccactttcccattcaacagtaaactccagattccaaacaatgttggggccaaacagcattcattgcaactgcaagagtaaattctaaggagggcctagtattagacctcagaacctctgccaggagcatcccctttgggcaggttgaggtctgcaggacccctggagcaacctcctgtggggtccaatcttggagtgccagatgtctctgaccttaggtgggcaccggtgccacatgcagattttcccctccagagcctactatgagctttagaagaatagccataaactgtaatgagaactggatgctgggtgtgccttttccttagccagttgagtttgataaaggaaaaatttagtgtaagaaaagaagatttaattcccctgaaaaatgggtgagtttgctccaagctgcgccacatgtagggatcagggaccgtgtgcggaaaagataaagagtccacggcaactataaacagatgctgaggcctcacgaggtggctcacacctgtaatggcagcactttgggaggccgaggcggggggattgcctgaggtcaggagtttgagaccagcctggccaacatggtgaagccgcatctctactaaaaatacaaaaattagccgggcatggtggcgggcgcctgtaatcccacctactctggaggctgaggcaggagaactgcttgaacccgggaggcggaggttgcagtgagctgagattgtgccactgcactccagcctgggtgacagagtaagactgtctccaaaaacaaaaaacaaaaaaacagccgctgaaagactga

SEQ ID NO: 15398 - DNA, 1032 bp, Homo sapiens
cccggctaattttttgtatttttagtagagacggggtttcaccgtgttagccaggacggtctcgatctcctgacctcgtgatctgcccaccttggcctcccaaagtgctgggattacaggtgtgagctaccgcgcccagcctagaattgattttacaaaagaaatttgattaatataggattggattgctttaaatgttgttttagctttgctttttaatgtgactatatcatttagtcacatttaatgtgatttaatgtgacttaaataattgaaattatttagactagtgaagatgtataagtcatacccactggaacaaaggtctatgaccttttcccggtgagaaactacctttaagttttccaaagtcttgtgattagattactaaagtgggtgatgatagtttagagttactgattggaacaggaaatgttagttgctatggttttgtttctaatgtactgtatttatatgtaaagcatttcctctctttattataggactttttttttttaagttgctgataatggtctttttatgggccaaaaaaaaaaaaaatctttatttctttcctagcttgctggaaacttagcttatgtttaggagattcctcttaaagaaagagaaaacaacatacagattctatatatggcttcacatctacttgcttttatgtccatggaacccataaaatatttatgttatgcccaggttatgaataacctctgattgttcattcagcccttgaacaaacatttatcttcagcacctgcacagtatcctgtcacattatttgctcaattctgggatggttcatgaagcaactgctttaccaagcaatgtactatggctggaagcaaaggctcagtaggggtgctctgtcaaacacttaaaagtcagtgtttagagacaagttataaacacaaaacagaacagcccattttttagtttttgaggttgtattctattcttgttctctattgcttgagtcatggaaccccctctagaatatagacctgattaatttgt

SEQ ID NO: 15399 - DNA, 1620 bp, Homo sapiens
gttaactccagggccctactgctttagtttgaagaaaactgctctagcctgtttaacatgttagcctttatatttggctgattcagtgagaatgttaggatatctcttaactgtactccttagaatattaactttttctttagtagtttttggttggtaaaggttgaaaataatgaaaactgtgcttaacaagaactaaatggtctataccaggacaggcagagaaagtcatggttgggttaatggcagtgggaacagaccacacattgatattctgcagcagtgtttcagcatgtgattctagtgatttgtgagtagtgatcactataggtcctgtctccattttcttaaagactttgtgattcctccagactatgagtgttgtaacatttatggcacataggagctaagatagatttttttttccccctaaaacagggtcttgctctgttgcccaggctggagttcagtggctggcatgatctttagttcactgtacccttgaactcctgggcttaagtgatcttcccgcctcagcttcccaaatagtggggactacaggcacacaccaccatgcctgattaatttttaaatttttagtagagacagggtctcactaggttgcctaggttggtcttgaactcctggcctcaagcagtcctcctgcctcagctttccaaagtgctcggattacaggtgtgaaccatcggacctggcctctttttttttttaaaagaacaaaccccaaatgctcaaatttagtaatttaagctatgtgttctagaagatgtacttgatagaggatatatactttttataaattggaatgttgaaaaaatagtagttatgatcaatagttatgagaaatagaagttttactaatacaagcgttttggtcagcatgtattatatatgtttctgaaaaactgcaaaataatatggtttataggaaaatattattgagtcagaccacttaaaatgtatgcaatttagtaagcaagcactaacaaacacaatacttggcatcttgagggaataacttggatgtcccagacaggcaggcagctcagcttcactggaagctgcccgaggggacatgaacaaagcatggacaaagttgaatggaaatgtcagcagtaggtgctgatgtaatacagacagtgtgggctgccattgaggcagtgtagggccagtgccacctgccacattggctgagagctgtgctaccctggaggtgcctttctctgaagagggagactgggtacaaatgcgaatttctgattttcttaaaatagagttaaaaggacttctgcctgtatagcagctgagttgagagatgtttcctgcagaaggtgatacagttgacccttgatccacttgggggttaggagtactgcccccaggccctcatcctcaccctgcaggcagttgaaaatctgtgtacaacttttgactccccagaaactttactaatagtctacttttgactggagccttattgataacattaacagtcgattaacatattttgtatgttatatgtattatatactgtattcttatagtaacgtaagctagagggaagaaaatcataaggaggaggaggaggggttggtcttg

SEQ ID NO: 15400 - DNA, 1116 bp, Homo sapiens
aggtagaactaaggcagtggaagagggatgaaggaagggatgtagtaaagagatgtttaggagatagaatagacaggacatagtgactgaataagtaatacatgggctgggcaagggagaaggagaaaacatagaatgtaggaaggaagaacagggttagaggttaggtcataagtctggttccacgtatgttggatttaaagtgcctgtgaggcatctaacctgcccccaccaaactagaatgtaagatctgtaaggctgaggattgtgtctcttcactgctgtctccctaacatgtaggacagtgcttgatacattgagggcactcagttgtttaataagtgaatacatccaggtggctatgtctagttggtaacttgaaattcaaattgggaacttagaataaaaagtctaaattggggatataattaggaattattagttgagaatggctgatatttccaatattagctagcacccaagggaaaccagcatttaaggaccagagcaaagatgattggttaatggggctgagaggggtaggaggcgaatcagaggaggcttcagaagttgagagaagctgacgcagtggctcatgtctataatcctagcactctgagaggctgaggcaagaggatcacttgagcccaggagtttgagaccagtctggggtctgtagagagatcctctctctacaaaaactaaaaattaacagggtgtggtcacacatgcatttagtcctagctacttgggaggctgaggcaggaagattgcttgatcacaggagtttgaggctgtaatgagctatgattgtaccactgcattccagcctgggtgacagagtgagacgcccgtcaccattttttattttttattttttttttgagggagtctcactttatcacccaggttggagtgcagtggcaccatctcaattcactgcaacttctccctcccggatttaagcagtttcttgtgtctcagcttcctgagtagctgggattacaggcatgcaccaccacgcccaactaatttttgtatttttagtagacacagggtttcgctatgttgcccaggctggtctcaaactcctggcctcaagtgatcctcctgcct

SEQ ID NO: 15401 - DNA, 1030 bp, Homo sapiens
ggtgcctgtaatcccagctacttgggaggctgaggcaggaaaatcacttgaacccaggaggcagaggttgcagtgagccgagactgtgccattgcactccagcctgggcgacaagagcgaaactgtctcaaaaaaaaaggaaaatattgttttgtgagaaatttaaaaagcaggcttcaagaatacatagtgttgaaaaatattggccacattttcatctctttagccctacctctatataataggtttttcctcccccaaataaaggacagtaacatattatttagtacacaaatgagccctttgaattggacacattttttttctgatgtgcttgttaaataagaacagtgcatgccagagtgatggcatgattctctttgcacttgatttcagttctaaataatatgtttattgttttcaagaattactttaggtggagtaactacttgttctcctgtactcgtagccttgctcctacctttgtattccttatcttcattaatagcatcactttccagttgtgccggcaagaaacctctgagtcatatccttcatctttatatcagaacagtcattgaggccagttaatttcaccttggaaatgttgtttatcccatctttcatgtgcttggttccatttaagctccttgcttcttcctgcttggatagtagcagtacctctccttagtctctgtctttagtctttctactttccaattcagtcgtcaaattacttatattactaaaatgattaaaccatatagcacgttagtgaaaaggacttccttggacccctttttttggggggtaaggtccaaactccttaggctaacattcaactctgttcataaccttttctgactggcttcatttctcaatatcccctcccccatattctagtctactccccattgcccaagtacgtctacacttgactgtctgttttatgcatgcatttcagtgttttttttccccctcaccttttctttcgcttcaaattcaacttgaatttggcccagatgcttgc

SEQ ID NO: 15402 - DNA, 1055 bp, Homo sapiens
gagaccagcctgaccaacatggtgaaaccccgtctctactaaaaatacaaaattaggtgggtgtggtggtgcatgcctgtaatcccagctacttgggaggctgaggcaggagaatcgcttgaacctgggaggcagaggatgcagtgagctgagactgcaccattgcactccagcctgggcaacaagagagaaactctgtcttaaaaaaaacaaaaataataattttttgatatctcattattagaacaaagttttcatagtgcaatcagagcagttttgaaatgtgaatatactggtaaactttttaaattgaagagttgtggccagtatctcattaagtctattcacactgttgtaaattgataatcgtaccataagcttaataacccactggccacattgaaagtagcaattgtaagaaataaaatatgtataatcacagctcccaaagatagcagagttggtatttgctatgtcacttttatttcccagtcttcagtatttcttaggattttctttgtgtaaatccagttatgtgtacaagggatcactctgtatttattacaaccacatattaatacacaattagctaaattaaaatttcaatttaaaattatttgcaaatcatgcaggttttataaatgtaagatactgttactactaacactgtgattccaaaagagtaaaaggataagacacaatattgcttattttcccacttctgaaattttcattaaagtttttttaagttgaaggggggaaaatcaaattaattgtttagtatgtctgtattttcatctgcacaacttattaaatatttagacaaagaaaaaggttaacattgagagttgttacaacttgtctagtaggttatatgagagacactgttccttatgctggtttgtatacagtggttttcaaacattaatttcattccaaaagatagaaagttataattcaagatcttaagaaataagtgaaataagaaaagtttgttactttggtagtgtcaaagttaaatattggttgaagtcaaatgttggtcatttataata

SEQ ID NO: 15403 - DNA, 1086 bp, Homo sapiens
tttttaaatgatttgtgtaattatctgttttctctgcaagaccaaaactgtgtcatgttgttcactacttcctaagcctataatgcctggtacttcataagcaagcaataaatatttcataaatggaattatatattcattagtaaatgtcatctttgtttttatcctaaagggaggaagaaagggaagattttgatactagcattgagagcaaagacacagagcaaaaggaattagatcaagatatggtcactgaagatgaagatgacccaggatcacataaaagaggcagaaggggtaatactgaaatttctttagggcattcttgtgtatttgtttttaaccaataaagcactttattaattcagctcctctgaaatatattgattgctttcatttgtgattccaggctgtgtttgtttttttaaatgcccacctcatagctgtgatgagttgtaaaaatgtgttatgaagtcctattagtacatttatgattgggtcattatttacacaccatctatactttagaaagaagatacaatattcctatgtcgttaataggacagtttctcataatttcaacttttggttagtcatcaagcttcattgaatttttacatttactacttttttgggccaaatagaaatttgtattctataatgtactcattcagcatgcattggatgcctcctatgtgctagagatataaagatcaataatgctcataatttgtatcatgttgatgaaaatggtaatctctcctgccttaaaattatttcataaattgctagatcaaagcaaatacatcttttaaaagttgttaatacaaatttcttgtgtatttatttaatgaccttatttaatgactatcaaaagaaatccttaattaattctgtgcctataatttgcatgggatctttttttctgtattttttttaaatggttactctaagtagatagaaaatttcctgtatcatggaagctgtattgtctgattacaatgcaattgatttcaacatctaaagcaaacctaatatgatcagagcttttaaaacatactttctaaatattgggtcaaaagagaa

SEQ ID NO: 15404 - DNA, 1051 bp, Homo sapiens
ttatttattattggccacattttacatagttactgaagatcacatagctaataagtgatgtaagagactacgcattgtttcattaaattctcatactactcttttgaggtagatattattttctgcattttacatataaagaaactgaggcttagtttgaagaaacatggctaataaggaattgatgggatacaagttcaagcaatctgatctagatactcattacaattatgctatgttgtttcataatacggtaaagaagttgaaattttgaatatttgtttctctggcattgcctgtaaaattacttgtctttgagaagatctaatttctttggcccttggtctccctgtttttatatcaaacctgagagattttgaccaccaatttaaaaaatcttacatttaatacatcagttcctctctttagtcttatatcatgaactaaaaagcccttcaaagtatgggaacaagagcatcctctttatatagaacagttttgtgtatttgttggatcattgtctagtgttggaattgtatgcacctaattctagattatcatgacaataaatatatctgttgcaggtagtcataaaatactggatataattcaactatattctcttcgttgtgatgtacccaagtgactatcactaagcaaatcctagaatgatatttacagtttcttaagaatgacatatgataaagagttaaagaatatattttagcatattactttatttaacacaattaaaaatacatttcattggtttttcatttcctaaaggcctttttatagcctttgtcttaggaaattataactttctatagatggtataggttgaatgtggtgattgctgcaggatgagagccaacaccttttacaactttgtatctaggactgttgttaattttggagtgctcattaattaaatttgtttggctttatatgtaaaatgaacattgatgaaattttaggtctagtatttttctgcaacagaagaatatgatttctgtcatttgggctagattaggtctggtaggaatgactt

SEQ ID NO: 15405 - DNA, 1017 bp, Homo sapiens
ctgggatacagacgcccgccaccatgcccagctaatttttgtatttttaaaatagagacggggtttcactgtgttggccaggctggtctcgaacttctgacctcaggtgatccacccgccttggcctcccaaagtgctgggattacaggcgtgaaccactgcgcctgaccaggaaatactttaattgtaattaatactttaaaatgaaaatactactgctgatttcattttagatctgacagtttttacatcagagttaaataaaattttacttctgagtttgaactagataatttgccctttaagttctgcacgcttaaatatctggagtcagtgtatggtacgtgttaatgtaggaataattcttgaggcaaaccttttcatatttttaaaacagtatgttcactattttgtttaggatttacctcagtcataggaaatgttaagcatttctaataagagattgatttggcctcctgaataataccttgagctttgccatatatgagatttaggaccagaaacttgattaaacaatacttgagtgtgttgcataaaaattcacagtaaaacagaactgttaggagacatcttgatatcagaatattggtacagaaagatgggacattcctccagtcagatagttttgttgaccttagataattcaggatcatcttccttcatgcctggtctctgaagcaacaggatattgatgagtgtgcattgatgtttgttgccttttgattttacagcctgagttcaagcaaaaatatatttatatctagcttgagtgctaaccaccataggtcccttattaagaccattttaagcaatatgacccctattgtcacctcagataatttagtcaattaaatgataattcttttagctattatatttattagtggtcaacagcattatagggttattgatcaaattctaacaatacaagacataaagctgtatttaattccagatttgaattttgtagttttggaagtcatggtggaaaacaaa

SEQ ID NO: 15406 - DNA, 1036 bp, Homo sapiens
ggcatgcatttagcttgattgctaggtaaggattctgcctatttccagaaatggccaaagtgtccaaatcaaactcattcaacttggcttataaagaataatttcagtaaatcaaaattagtagatggtagattaattatgttccaaatcataaggagctactacattgaaggtagtatttcacagctgatttgacttcagaatgtgggttaagagactcttactaggaaatatagtcagaaatacactcagcctaaagttatgttcttagtataaggaagaaaatgttcctttctcccggtcccttgtcaggaactgtgatttagtaaagttggaacaagttcaggacatctataattttagaagtttcaaaggtgattgtgataaacagcaagggttgagaaccagtagcttacaaataatacttcttaatagttaggtaaaaagtatgtcatctctgccttttaagttttcctgctcttggttcaaatagttatataaattgttcaatatttcaggaacttccagaaccaacaccagtgaaaactagactacctcctgaaatctttggtgatgctctgatggttttggagttccttaatgcatttggggaactttttgatcttcaagatgagtttcctgatggagtaaccctaggcaagtgctttagttatctattgctacattatagttcatcctaaaattagtggctttaaaaaaacaagccaccttgtaaagttctgtgggggcactggagttgggatctctctggtctggctagatgttcaaaatggcttcttctcacacaggtctggtgcctcggtcctcttcatgtggcctttcatttcatcagagtatctcatacttattatgtggcacctgggggctctaagaagcaggaagcagaaactgctagccctcttaaagcctaggcctggaattggcacagccttacttctgccacattccattggtcagagcagtgagaggccaccgtgggattcaacaggattgtggaatagactccacttcttga

SEQ ID NO: 15407 - DNA, 1055 bp, Homo sapiens
ttatcttgcaatttcaaacaccagaatcaaaaagtaagggtttcaaaagaccgagtaagagaaatagcctgaattataagaaataagtccatctattctaatattgttgcttttaattattgttccctctttgtatctctaggctgttatcagattcaaatgaatcttgaaaatgacaaatttattacaaacataaggggaagtttcattttaggcagtctaataatttattttgctaggatcttattgataggaagtagagggaaagctatagatcaagtcagattaaattaatatttattcaagagctgcccaggcgggagtgcagtggtgtgatctcagttcaccccaaccctctcctcccgggttcaaggcttcttctgcctcagcctcctgagtagctggaacaacaggtgcatgccaccacgctcagcatgcatatatgtgtgtgtgtgtgtgtgtgtgtgtgtatgtatatgtatatgtgtttgtatttttagtagagatggagtttcgccattttggccaggctggtctcaaacttctgacgtcaagtaatccacctgactctgactcccaaagtgctgggattacatgtgtgagccactgcactcggcccattttcagtctttatagtattattttgataggtattattttgatcagtggttctaaaactttagcgtgtattaaaaaccaccagaagggcttgctagaacaccagttgctaagtcctaacctcagagttactgcttcagtaggtatggggtaaggtccaagtatttgcatttctaacaagttctcaggagatgccgatgctgccatataaatttcttacatgaattgttattaacttttaaaaatttctaggaaagagagaagttacgtgaagaaaagcgaaagtatgtggaatacttaaaacagtggagtaaacctagagaagatatggaatgtgatgaccttaaggtataaacatgttatgtgatgtttagcacacataggttttacatgtcctatgtggctttgctgatgaaatcattcttatttaatagcag

SEQ ID NO: 15408 - DNA, 1050 bp, Homo sapiens
tttaagaggtaaaatacgcagtttgaaaaataaaataggccgggtgcagtggctcacacctgtaatcccagcactttgggaggccaaggcaggcagatcatgaggtcaggagttcgagaccagcctggccaggacggtgaaaccccatctctactaaaaatacaaaacttagccgggcatggtagtatgcgcctgtaatcccaactacgaaggaggctgaggcaggagaatcgcttgaacatgggaggtggaggttacagtgagccaagatcacgccactgcacgccagcctgggcaacagaacaagactccgtctcaaaaaaaaaaaatgaataatgttcttatcctacttgaaaaataaggtgtaataatagtgtttcagcaaatctttgattgtggtttccagtgatacatattccttagagaattctatagctggtttcctccaaagtcagccattttcagagatttcttgggatattcacaagtagccttagaggatcatattacatgctctgtgctcattttagttgtctatcgtctcccttgaattttgttttttaattatactttaagttctagggtacctgtgcacaatgtgcaggtttgttacataggtatacatgtgccatgttcatttgctgcacccattaactcatcatttacattaggtatttctcttaatgctatccctcccccctccccccaccccacaacaggccctggtgtatgatattccccatcctgtgtccaagtgttctcattgttcaagtcccacctatgagtgagaacatgcggtgtttggttttctgtccttgtgatagtttgctgagaatgatggtttccagcttcattcatgtccctgcaaaggacatgaactcatccttttttgtggctgcatagtattccatggtgtatatgcaccacattttcttaattcagtctatcattgatggacatttgagttggttccaagtctttgctattgtgaatagtgccacaataaacatatgtgtgcatgtgactttatagtagaatgatttataatcc

SEQ ID NO: 15409 - DNA, 1035 bp, Homo sapiens
tatttttagtgaacagtaccataatgtttaaaaaagaaacctgagatcactcttacctacttctcttaattactttgctcctgaaataccagtgttgataagttctgtctttcagaaacttttagttcaagttctcatttggcctgacattaactattatagctataactagcatttgagaattgactgtgatcaggcactgtgctaagtgctttatatgcattttggtcagttctggaagagtgttgtaattctaatttaacaaggaaaaacctgagacttaggaaggttaattggctttgtacaaggtcatctaactagcacattgcctgacagaataatttttaggtgagtgaatgaagcatgacatggtcctgtataagtcttttgatacatctcttctttttttttttttttttttgagttgctgcttttttttttttttttttttttaaagagatggagtcctgttctgttgtctaggctagagtgcagtggtgagatcatagctcactgcagcttcaaacttctgggcttaggcagtcctcctgcttcatcgtcccaagtagctaggactacaggtgcgtgctaccatgcctggctaatttttaatttttttttttttttttttaagtagagacacagtcttgctatatagcccaggctggtgtcaaactcctggcttcccacctcagtctcttgaagtgctgggattacaggcaggagccactgtgcccggccaacttgctactattaaccagaaaaataaattactgtattacttgtccatgtcttccattaaatatagggtttgggatgcaaaatttgtgggatttatagtagtaaatgtgtgtcctttagcatgtctgacagtagttcatatgttttgtttggacaatgtcaaagattgtaacctttaaatggagttagttataaatcagatgagtgtatacataggtacaaatataagtaaacatgcaattattcattaataataataaatacaaagtctctaatttattggaatgcctcttg

SEQ ID NO: 15410 - DNA, 1073 bp, Homo sapiens
ataagtcacacttttgaaccacctgacagtaaatggaaggagaggagacttcactgatggatgaataagtcctgagagaagaggatacattgaagagcagattataaattgataggaagttgctattaatttattttttggccaatgaaatggtctttttttttatttttatttatttttgtttatttttttagatagtctcactcagtcacccaagctggggtgcatgcagttgtaggatctgaatagctggaattacaggtgtgcagcagcaccaccatgcctggcttttttttttttttttttttttttcagagacagagtctcactctgttgcccaggctggagtgcagtggcacaatcatggctcactgcaacttccacctcccgggttcaagcaattcttgtgcctcagcctcccaagtagctgggattagaggtgcatgccactacacccagctaatttttgtatttttagtagagacagggtttcgccatgttggccaagctggtcttgaactcctggcctcaagcaattgatccgcctttctcaccctctcaaagtgctgggattgcaggcgtgcaaatggtctttacaagaagcaaaatgtctacagagcaggtacagatgcagattatctttgcttggcctttcccttgctttggcaatcactatgcttccatataaggggatatttataaaaattggattgtttttgttcttggaatctactttggcttccgcaatgccaggtccctctagggaatgagaagaagagaccataccctggagtctctagaaagctagagatagataaaaactttccaggatattgaagagcatgtcttttagcagaggaaaactgaagatacacaggaggagaaatacaatgcaacgggataaaagaagaggttacaggctggaagagaacccttctgacatcagaatatgaacaattatgaaggatatggacatttgatgttgagaaggaagtcaaagagcctaagtgaagatctcttctttcattttctaatgttaaagcactgagactgggacttgaggaaacgagaaa

SEQ ID NO: 15411 - DNA, 1048 bp, Homo sapiens
gtaactttcaaatttaaaaaccttattcaggttctgtgattcatgaagtgaattttacacaaatgtttataaagtgatcagtgtttaataaatatctagcacacctaatagattgcctttccttaacagcaggatttgccttggatgcatataacggaagtgtttaatggcataaacagaatggaagtttttgtcttgtgtaaaatgagtccagaagtgtgtagtgtagggctggtatgataggtccacaaagttgtcaggaactcaggcttttatttgttttctgcttcatcatcctgttgttgtaacaatcgttttcattgttcaggatggctcaaaatagaggaaagacaagaagccttttcctatgcatttttcacattgaggccggttagtttgaaaatactgttactatgttgaaacaaaagatcacttgtcaaatctgtggtggcttttcatatttaatgtgttgttgtctctgatcttaaaatgttaaccttgctgtaaggaggcaagactatcttacatgtttgtgtcaataggctggacggcacaaagctgagcccacaaacaattgaatacctatttatttgaatatactacttagaattttaaagtttttggtagttttaattaatttggttgattctgcagccacactaattaataaggctttaataagatacttttgaatactaaagaggttaagcagcatattaataatatccagatatttggaaactaattagaaatatgtaggttttaagccatggattttgtgtctagaattttctttctaaagatttttgtggctgggctcagtggctcatgcctataatcccagcacttggagagactgaggcaggaggattgtttgaggccaggagttcaaaacaagcccaagcaacatggcaaaaacgcatctctacaaaaaaaaaaaattagctggggtggtggtattcgcctgtagtcccagctacttaggaggctgaggttagaggattgcttgagactgggaggcggaaatggcagtgaactaagatcacac

SEQ ID NO: 15412 - DNA, 1032 bp, Homo sapiens
aggctgaggtgggaatcgcttgaacccaggaggcggaggttgcaagtgagccaagattgcaccattgcactccagcctgggcgacaaagcgagactgtctccaaaaaaaagaaaacacaggtaagtcttatttggctagtgattatgttactaatattcaaatagaatgaataaagggcattgtagtgccaaataatttagccctacattaataatttgctatgattggcaatcagaatgggctgatgtttacattttagttttctctccaaagatatgcttgcaatttccttcatctccttccagttagtgagtcagttaacaatactgattttgaggagtttgagagcatcctgaccatcatggtgaaaccccatctttactaaaaacacaaaattagcagggcatgatggcgggtgcctataatcccacctacttgggaggctgaggcaggagaattgcttgaactcgggaggtggaggttgcagtgagccaagattgcgccattgcattctgtcctggacaacaagagcgaaactccatctcaaaaaaaaaaatattgattttgttgttataaatgtaccctaaggatggttaaacaaacaaaagaaaaggttatgtttgagctccccaaaaggggtctacaagtaggtggtctagctagaaaataccagctagaagaatttaagaagggagtaataagtataagttttttgtttgtttgtttgtttgtttgtttgtttgtttttgggggggagacagagtctcactctgtcgcccaggctggagtgcagtggtgcaactttggctcaccacaacctctgcttcctgggtcaagcgattctccacctcagcatcccgagtagctgggattacaggggcccaccaccatgccaggctaatttttgtatttttagtagaaacgagatttcaccacgctggtcaggctagtctcgaatttctgacctcaggtgatccacctgcctcggcctcctaaagtgctgggataacaggtgtgagccatctcgccca

SEQ ID NO: 15413 - DNA, 2136 bp, Homo sapiens
tttctttgagacggagtctagctctgtcgcccaggctggagtgcagtggcacgatctcagctcactgcaagctccatctcccgggttcacaccattctcctgccccagcctcccgagtaactgggactacaggcacccgccaccacgcccggctaattttttgtatttttagtagagacagggtttcaccatgttagccaggatgatctcgatctcctgacctcgtgatccgcccgcctcagcctcccaaagtgctgggattacaggcatgagccaccacgcccggcctatgtggtcttctaagaacgccatgcaaacagattttaaggcatctaagtattatttccttttttttttacttcactatgttgcccagatggcctcttgggctcaagggatcctccctcccaccttagcctcctgagtagcttggactacaggcatgggccactgtgccttgttctcattgtcttttttttttgagcaaacacaatcattgtttaacgaaacgctggaagaatggtgaactggaactcaaatacttggatgattcacccatcttctgtcccctcccctggaactggagaattaaatcaggaaaaaagatgtggaaatcatacaacaaaggaacattttggactcattgtgtagtcatcattcagtccaaagatagaattagagtttgagagaatctgaaaaattgagtcaaactataatcataaatttggtaatttttaaaattaaagtgggctttgggcaacccattttcagacttttttttttttttttttttttttttttgagctagggtcccactctgttgcccagggtagagtgcagtggtgtaatcacagctcaccacaacctccatatcctgggtttaagcgattattgtgcctcagcctcctaagtagctgggactacaggcgcctgcaaccatgcctggctaatttttatgtttttagcagagatgggatttcgctacgttggccaagatggtcttgaactcctggcctcaagtgatctaccagcatcggtctctcagggtgctgggatttacaggcatgagccactgtacctagccattttcggacctttttacaagcatctctttttaaataagaattggcatgttgatgtagtctttgaagtagatatcaaaatggttaatttgtggataggtagctgtttttctgcataatttccacctttaacctcttctacttcaccagttctacctatcgttctttgggtctggaaggaatctatgtatctgtcaaaacgtagatatcttccgggtctgtgaaagtctacattttgcaaccacagtaatggctatggaatacatactaattccgtctgggagaaagttgagtgtgtgcaagagaaaagatacttgctacagagaagtggcagagattctaaaattttgactacttggagagtcagcactacccttaaggaacctctgtaatattgtagtacataatcttctatttagctagcgtacagactacttaatagttcaaattctttggaatacaactttagacataaaagtaagctgaaaatctaaaactggataggaaagtaactgccacagtgttcatccatgtgctttacctctgactagactataaaaactattcaagagcctattgacctaagtcctatattaaaattaaaacattagtgttaaactgtcccaagttgttttgggatcctctttgaactttttgtttgttcatttgtttttgagacagggtcttgccctgttgcccaggctggagtgcagtggtgggatctcaggtcgctgcaatttccatttcccgggctcaggcaattctcccacctcagcctccgaagtagctgggactacaggcccattccaccacacctggataatttttgtatcttttgtggagatggggtatcgccatgtcgcccaggctggtctcaaactcctgggctcaagcagtgccagcctcggcctcccaaagtgctgggattacaggcgtgagccactatgcccggcctgaccttttttttttggtcacagggatagcttatgtctatttgtgcgtacagatatttgagtgactgtcatagtagggctctgatgggggatacaaaaat

SEQ ID NO: 15414 - DNA, 1356 bp, Homo sapiens
cagatggaactcaaagtctggttttgactgatgtacctttaaattgcaaaatataaatatttagtttaaatatactttttcttatgtttgtattaatgttataagttgaccagttaccaaacccttgagttctgtgagtctacataaaattttgcattaaaggcacaaaaataacctgataatgctatcagtttttaatgtaaaatttgtgaaatgataggtaatgggcttttgtttttgtttttgttttttaatcagtgacttttttgaacgaaccattctgtgcaacagccttgtgtggagttgtgctgtgacgggtagacctggactgacgtatcaggaagcacttgagtcagaaaaaaaagcaagacagaatcttcagagttttccagaaccactaattattccagttttatacttgaccagccttacccatcgttcgcgcttacatgaaatttgtgatgatatctttgcatatgtcaaggatcgatattttgtcgaagaaactgtggaagtcattaggaacaatggtgcaaggtaaagtacttttaatttttcctcttggtaagtttatattcacattgctcaaaatccaaaacacacaaagtggtgacctaaggaaatcttcccttttactatgctctagctattctgttaacccacagatagccccggtgttagctgtttcttgtatatctttccaaagctaatttatatatatgccaccaaaaacatatacgtgcatgcgtctgtatgtgtatatataacatgtgtcttatgtaacaaacgtgcacaaattccttccctttttaatgcaaaagaacatacatactctagatcccttttcacttaaaagatcttgaaggttagtcctttgttacataagccaccttccttctctttaatttactgtataataaagttctattatatggaagttccatctttaggagtagaaatctttagctaatggtatctactgtgtcctcattatgtcacctaatagtttaaatatgccagtatttatttattggttttagtgttttatttaacaaaaccaggattgagttttatatactccactaagttctccttctttcatactttctcacattgctttattgagctgtaactcacatacaatacacttctcctttctgtagtatacaaatgcagggttagtgctcttccctttcaccgagctcttcagaaataaagtggatttttatatgaacattgaaaatgacacaatctatggcaataaatgaaaaattatcaatgttttcctcaagtctgaagctttgtgattggctagtcactgacatttataataataaactttatatgcattaaaac

SEQ ID NO: 15415 - DNA, 1091 bp, Homo sapiens
ggagtttcggtcttgttgccaggctagagtgcaatggcactatcttggctcattgcaaccccgcctccgggttcaagcgattcccctgcgtcagcctcccgagtagctgggactacaggcatgtgccaccatgcccagctaattttgtatttttagtagagatggggtttctccatgttggttaggctggtctcaaactcccgacctcaggtgatccacccgcctcggcctcccaaagtgctgggattaaaggtgtgagccactgcgcctgacctaagtgatttttagatgaaaagccaaacaagaccagttaccatatattaacattttataattttttataacccatttaaaaaatgtttttatggtcctatttgattctgtgaattagaacatattctttcattttatttatgaagaaactgattacctaacagtataaacctagttggtgatggagccagaatttgaacttaggtcctttgactcttacaactagtgttataattatagtgggaaaaactgaactggaagtcaaagagcataattatgactaagtgaataattgcttctaaaagaaatattgacaggttcatgggttttactagataataagcatcttatataatactactcccataagtggtagtattatactgctttttctccaatttttagaagtgttaacctgtcatgttgtttcacaacatcagtgaaccaatagatacttcttatgtgcttgtatgctattgtatccttgttcttgtctgtgaattcattcttctttaggtgcttcatgcagacatctgtacaccagatttacttctgcaaaatgctgatgctatgaataatgcttttgaatattaataaggcaaaacagaccaggtatgttattttatcaagcaagaaatttgtcattaaaatatatccagcaagatatgaaaagagattagtaggtgagaaatgttttcatgttaaactttttaaaaactactcctcaaacaactataaggagtataatctccttatagagtataaggaaaagtgctgtttataaaatgaaaacaaaccttgtctgattttggaaaaca

SEQ ID NO: 15416 - DNA, 1022 bp, Homo sapiens
caacacagtaagaccctgtcccaaaccaaaaaacaaacttcattttgttaaggatttttgttaaagaatttatgttaattcaggataaagacttcagttatacattacatttagtttttatgagatgctgaaagattagaagaaggtaaatatgaactatgatccagaaggaactggaattctgtttttttttttttttttggagacgagtcttgctgtgtcgcccaggctggagtacaatggtgcaaactccattcactgcaacctccgcctcccaggctcaagtgactctcctgcctcagcctcccgagcagctaggattacaagcacctgctaccatgcccggctaatttttgtatttttagtagaaatccatctctactaattcaccatgttggccaggttggtctcggactcctgacctagtgatccgcccaccttggcctcccaaagtgctgggactacaggcgtgggccaccgtgcccagctggaactggaattcttaaaaggactgaaaaggagataggaaaaagtgagtgaaagaggcttaaagtaagacaaaccattgaatacatttatgggaaattttatagtttgcataaacaaagtataaacttaaggcacagtgaataactatattgataaacataaactagccactattggacaagtagcaaaagtaaaattcaagaaacaaaaccttcataagtcactacttccttttgttacaatcataaaattttctgggtaaactctagatactagtacctctagggagacaggattcagaagatcacttttagacacacctatcttcacttgataaccaaataaatatctgtgagtgagaggtactatctcgaatgaagttaaaaacaaattagaaggaaaaggtcaggttagcatgttttagaactattggtaaactataattcatgggacattatataatcaaaagattaatattttaagcactaagttataaagggtttacacccatgaataaaaagattaccatcact

SEQ ID NO: 15417 - DNA, 1031 bp, Homo sapiens
tggaaaatgagaggagcagatcaaacagaataattgtgaggccatgctgagggcctgtttgaggttggagaacattcctatgtagaagcagcaatccgtaatctttttattttttttcctgaagttctcaatagttaagatataggtctaaaaaggtcaatacactaatcgagaatttaggttttgctcactgatgtggaataaggtcaagaaagctaagaagattggcaagagagagaatgatgaggtttgtggcctgataggaaaggaagtataagtagaaaggggttgtagggcaaaagagggatgttgtgtatttcattttttatttacagatttatttctattaaatacaggccatacaggaactaatgaaaatccatggacaagatcctgtttcatttcaagatgtcaaggttatcttttcctttaatttacgtattaccagataattatgagatagtcatttgtattacatgaaattttatatgaaagcaactaatgaagtactatttgaatcaagtgtttgctttttgttctgaactgatatttaaatcattacgaactgagaccacatttggactatttatgtagtttataattttagtattgtcatcattatgttttcattggaagcattcattcattttaattaagacagtcagggggccgggctcagtggctcatgcttgtaatcccagcacgttgggaggctgaggcgggcggatcatccgaggtcaggagttcaagaccagcctggtcaacatggtgaaaccccgtctctactaaaaatacaaaaattagctgggcatggtggcgcatgcatgtaatcccggctactcgggaggctgaggcaggagaatcgttggagcccaggaggtggaggttgcagtgagctgagattgtgccactgcactccagcctggacaacaagagtgaaactccatctcaaaagaaaaaaaagaaaattaagacagtcagtacagtctatatcctacggcagtctgttcaactgtaaactgattttttac

SEQ ID NO: 15418 - DNA, 1028 bp, Homo sapiens
attcatgtaaccccagcactttgggaggccgagatgggaagatcgcttgaggccaggagtttgagaccagcctgggcaacatagtgaaacaccgtttctacaaaaatagaaagtaaaaaattagcccgggtggttgtgcaccactgtagtcctagctactcgagaggctgaagcagggagggttgtttcagtctaggagtttggggctgcagtgagctatgatcatgacactatactgcagcctgggtgacaagagccagaccctgtcttaaaaaaaattcatttgggctgggcactgtggcttacacctgtaatcccaacacttcgggaggccgaggtaggcagatcacttgaggtcaggagttcaagaccagcctggccaacatggtgaaagtccgtctctactaaaaatacaaaaagtagctgggcgcagtggtgcacacctgtaatcccagctacttgggaggctgaagcgggagaatcgcttgaacccaggaggcagaagttgcggtgagctgagattacgacactgctctccagcctgggcgatagaacgagactacatctcaaaaaaaaaaaaaaaagtcatttgatcccacatccctctccagcttctgttgcatttctctgcactcttcataggaaaacttctcaaagaagttacctgtacttggctgggcgcagtggctcatgcctgtaatcccagcactttgggaggctgaagtgggtggatcacctgaggtcaggagacagaccagcctggccaacgtggtgaaacgctctctctactaaaaatacaaaatttagccgggcattgtggcaagtgtctgtaatcccagctactcaggaggctgaggcaggagaatcacttcaacccaggaggtgaagtttgcagtgagccaagatcgcgccactgccctccagcctgggtgacagtgagactcagtctcggaaaaaaaaaaaaaaaaaaggaaggtacctgtacttgtactttgtgtgctttcttgaccccttaactcttaaaccca

SEQ ID NO: 15419 - DNA, 1082 bp, Homo sapiens
tttacatctttcatggtagtcccacagtttttgcatattctgtttgaatataaatcttttttctctttgcttttctgttttggaggtttctattgagatatcctgaagctcagagattctttcctcagctgtgtcttgtctgtgaatgagcctatcaaagacattttaaaatttctgttccagtgtttttttaactctagcattttttcttgattattttttcctagaatttccatctctctacatacattgtccatctgttcttaaatgttgtctactttttccattagagccccatagcatgttaaccatagttgttttaaattcctggtctgataattctagcatctctgccacatctgactctggtgcttattctgttctgatgcttgttcagtctctttagactatgttttttgtcttgtaattttttgttgaaatctgaacatatgctcagtaaaaggaactctggtaaataggcctttagtggtatggtggtaaggtgtgggggaaggggaggcactccattgtcccatcattaggtttcagtattttgctgagcctgtggccctggattgtgaacttcactagtgtttttcagtctcttcccttaggtgggacagtatgaccttccaaggagccagagttggctatttttcttctcccaggtagattaggctttggtaaaatagtttctactgagggcaggccttttaaagaagaacagaatgttttggtgtgtttcaaataattgtttttcccctccccctccataaagcaagaggatatttttctctattattcactgtgaggacctggtagagctcttggaaataaaactcacaaaagtagggaagttccccataagactggtttctcctggagttgctaactcttagacttgtccacactgagcttccagcagttcaattttagttcaggttttcctacactggcactagattccatcagtcagctgtaattatctgtctctctccagtgggacaccaggaatggggaggggagcatttttcctgtgacttcatgtctctgatgatgctaaaaagaattgttgattttca

SEQ ID NO: 15420 - DNA, 1035 bp, Homo sapiens
tgaaagttttagagtgaaaaatgtaataactgaaataaaaggctatgtagttgtacccaacaaccaagtggagtgggaatgggggtacagaagaatcagtaaactggaagataaaacagtagaaacagcctaaacagcacagaaaacaaacttaggctgggcatggtggcttacacctgtaaccctagcattttgtgaggctgaagctggagattgcttgagccaggagttttgagaccagcctgggcaacatagtgagatcccatctctccaaaaatatacaaaaattaaccaggtgtggtggcaggcaactgtgatcccagctacttgagaagatgagatgggaggattgcttgagtcccggaggtggaggttacagtgagtaaagatcatgtcactgctctccagcctgggtgatagagcagaccctgtctcaaaaaaaaaaaaaaaaagaaaaaaagaaaaagaaaaaaaaggaaaagaaaagaaacctaaaaataatgaacagagcatcagggacctgagggacattaacaaaaaaaaaaaaaagtctagcattctgttatctgagtccaagaaggagaggagaaagagcctgggtctgaaaaagtactggaaatacttgaagaaagtgctgaaaacttcctaaatttggtgagagacataaagctgtagattcaaaaaggtcggtgaaacccaaacaggataaatcaaaagaaatctatagtaacacacatcataatttaatttctgaaagctaaagacaaaaattcttgaaagcatccagagaaaaagtgtaccttatctgtggggggaaactattaaagagatagcaaatttcttatcagaaactgtgggagccaggtgctgaaagaaaaaagaactgtcaactcagaatctgttttttgtttgtttattttgtctgtttgttttgaggtggagtctcactctgtcattcaggctggagtgcagtggcatgatctcggctcattgcaacctccaccacctcctgagttcaagtgattcttgtgcctc

SEQ ID NO: 15421 - DNA, 1031 bp, Homo sapiens
aaggggagacattgccttgagtcagcatacatttttttatacactacattaaatgaatgcatgacatttatttgtttgctttttaaaaataattttaaagaaaactacatagttttttcaatacaatgagctcaagtaagaattcattctaattacatgacagtaagacaatttttgagctttcctcttaaaccaggaaacctggaaacaaacctgattacttgtctagggaggactagggcgggagaaaatgaaagattactttgttaacagacttacctcactagaccatttatagattctttattttctttgcctagactaattgtttcctattccttgtggttgaaccaccagagttttaaatttcaaatcacaaaatgatatgtattattattttattgcaaggtatatacagggatttagaaatgcttaaaacttgacagatgtcactttgagttttccagtagtgagctaataatattttgccagtactatacatattcttatagaacatttgtagttgcaagttcactaattttaactattttttctaatacatttgcctcattattcactattgtggtgcatattaatctaatgacaatataaaacattttagcagccatagttagtaaggagaaaaataagaaggagtagtgaaagattaattgacataaagggcagctgaactctgcttctcttttattgcattttaaagatttattttctgtttttttcctatatggcacatatacttctctcaccttttaaatttatatagtattagatgaagatttctatccagctcttctcaattttataaattattatttatgagctctaattgatagccctttacctgaagaagcaaaaacactgagttttttttctttcacaattagaatttacacttaatagatgctttcaaattaaaattttaatatcttgactgagacatattttacatgcaatacagttaattcatttaaagtgtacatatttttagtatattcacagggttgtacaac

SEQ ID NO: 15422 - DNA, 1047 bp, Homo sapiens
aaagaaatgttcagtgttgatacttcagaaatggctaaatacagctaaggaaaaaagatgaaaagttaccttcattggcagtccagacaaattctaatgttgcttctagtaagtggtataggcaatgcttttcttatgtgcataatatcataaaagccatctagattggttcctctttcatatagttaatgctttttcttctttattcatccttggtaataaatataatctagtgaaattaagtcatcagcttattagaacaatatgtcacaatgtgtgagttacctttaaaattatttatatttttacttattagggtgaattgatgcttgtagataaggtatatttgtttttacagtcttattaactgtggctgatttgaggaaagctctgctacttgtttattgcatttattaacaataacagtagtttatgtggaaagtataaatggaaacttaaatctttttgtgttttccctttcctttttaaattttgttttatgtatcacttccctgtctaatgtagttggataacaaagcaacttttctgataatttcataacaccaatatatttttaaactttttaaaaatgtgatacataggcaccaagagtagaagcacaagttcttctgggatctttggtttgctttcccaacttatattgtgaactgccttctcttcatcccaacattcctgatgttgctgtgtctcagtttacagatgttaaggtaagaaatgagatgctaatttttagcacttaaatgattttataatcataaagtatatgcaataaaatttgtattctttcttttctttttgaaatccacacaattgttaaagaacattagccatatcctccagacacaaaggcttgaatgttcatttggagcatatccttttttgtgtttaaaactgctttagaacctttttcttgttattgaacctactcacatgtctacctgttaggattcattcacttactgaacatttattgaaataccccatgagccagatactatgctactaatgtaaagcttctgagattaa

SEQ ID NO: 15423 - DNA, 1023 bp, Homo sapiens
tgtaagacaggaaaaggaaataaaaggtctacagattgagaagaaataaataaagctatctttgtagatgacatgattatttatgtggaaaatttcaaagtgacaacctcctgaaactaataagcaattatagcaaggttataggatgccagattaatatataaaagtcagtcgctccttccataccagcaatgaacaactggaatgtgaaactgaaagcacagtaccatttacattagcatcaaaaatctccaaaacaattaggtataaatctagcaaaatatttacaagatctatatgaggaaaactatgaaactttgatgaaagaaatcaaagaataaataagttgagaggtctagttcatgtacatggatagaaaaactcactattggcaagatgtcattttttccctacttaatctgtagattcaacacaatctcagttgattttgttcttaacaagttattttgtggatattgacagaatctaaaatttatatagaaaggcagagcatgagcaacatggcaaaacctgtctctacaaaaaatacaaaaactagttggatgtggtgtcatgtgcctgtagtcccagctacttgggagcctgagatgggaggattgcttaagttcaggaggtcaaggctgcagtgagccatgattgtgcccctgcactctctagcctgggtaacacagcaagatcttgtatcagaaaaaaaaaaaaaaaaaaaggaaaggcaaaagagccagaagagtcaacacaatattgaaggaaaagaatgaattcagagaagggacagaacctgacttcaaaatttaatatagtaatcaagaaagtatggtatgggtgagagaatagacaaatagatggaataaaatagagattccagaaagacccacacaactagagtccactgatctttcaaaaaggagcaaaggcaattcaatggagaaaggatggtcttttcaacatggtgctgtaacaattggacatccacatgccaaaaaaagatgaatctagacacct

SEQ ID NO: 15424 - DNA, 1264 bp, Homo sapiens
ccgaaacatcattatgcagtgcatgacaaagcagactttagagcaaggagaattatcaagaataaagaggggtattacataaagatgattaattctggccaggcatagtggctcatgcctgtaatcccagtactttgggaggccaaggagggcagatcacctgaggtcaggagtttgagaccagcctggccaacatggtgaaaccctgtctctactaaaaatacaaaaaaattagccgggcttgttggcacatgcccgttgtcccagctacttgggagacaggagaattgcttgagcccgagaggcagaggttgcagtgagctgagatcgtgccactgcactccagtctgggcaacagagcaagactccatttcaaagaaaaaaaaagatgattaattctccaagaagacgtaataatccttaatgtgtgttcagtaacaacagggtatcaaaatacatgaggcaaaaacagataaacctgcccagagaaatagaagaagtagtggtactgtggttggatatttaacatctttctatcagtaattgacagatccagcaggcagaaaatcagtgaggacataaatgaagtgaatagcactgtcagtcaactggatctaattatgacatctgtaaattgcttaatccagcagagattatactcattcttctcaaactcatgcaaaacattcaccaagaccacattctgggtcataaaacatgccttaaacatttttaggaatagaaatcgtacataatataccctctgactgcaatggatttaactataaatcgatggaaaaaattggaaaactctaaaatacttggagattaaacgacacacttctaaataacgcacagttcaaagatgtttcaagataaattgtagaatattttgaactaaatgaaaatataaaatcaaaatttgtgggcagtgaaagctgtgcttagaggaaaatgtacagaattgaaaatatatattactaaagaagaaagatctaaaaccagtaatctaagcttccaccataggaaactagagaaaaaaaatccaaagtaagtagaagaaaagaaataataagaattaaagcagaaaacaaggaagttgaaaataggaaatcactagagaaaaatcaacaaaaccgaaagttgggtcttagaaaatatcaacaaaaccaataaatctgtagctaagttaaataagaaaataagaagatatcaattattaataccagaaatgaaagaagaaccattaccagtgatcctttta

SEQ ID NO: 15425 - DNA, 1029 bp, Homo sapiens
gcctccagaaattccacagattagaatcaaccaaatatgagttcacaaagattattcagtaaacatggaaacaaattatgtaaatgagttagcaaaaaagagagagaaaatttagattccttaagattttaatccctaatattggaataaatattatggaataaataaataaataaccagactataaaataaccatgtttgaaatgtttgaagaggaaaatgataagctcattaaaatgattaaaaagaatcaaatagaactttgagaaataaaaacataattcctgaaagaaaaaaaaacaatattaagcaacacataagatataaataaagagagaatcagtgacttggattagaaatttgaggaaattacccaggacattgagacgggaaatgtgaaggagagggtaagaaatttgtagaacaggatgagagggtctgatgtgtctagttggaataccagaaggagagaatgaaggagaggcagtatttcaagaatgacagagaatttattaaagctatgagtctatagaaacagaagaacataatataccaaatgagtaagtagaagcccgtacttaaacacactgcagtgacatagcagaatggaaagacaaagaaaagagcataaagactgcaaagagaaaaaatgcataatctgccagagaaaaacagttatgctgaaaacagtgttctcagcactgacaatggaagactgaacagcatgataatatcttcaaagtgctaaggaaaaataactatcattatagaattgtgtactgaccaaactttcaaatggagggtaaaacaaagacaaaagcttaaaatactttgctatggattgaccttcatgaaataacttctaaaagaatatgtcaggaaaaaaaattaccccagaattaaagtccgagatgcaagaaggataaatgatcaaagaaagtcgtaaatgtgtaggtaaatctaaagagatattatctgaatatagtaattttggaattaaaatgaagggtagaatttaaatacagggca

SEQ ID NO: 15426 - DNA, 1059 bp, Homo sapiens
ccagcctgaccaacatgctgaaaccccgtctgtagtaaaaatacaaaaaaaattagccaggcatggtggcatgtgcctgtaatcccagctgctcgggaggctgaggcaggagaatcgcttgaacccaggcggcagaggttgcagtgggcagagatcaagcctggagcgacagagggagcgacagagggagcgacagagggcgactctgtctcaaaaaaaaagaagaaattgttcttttaagtctaaatttttattttatttaaatcaaatctttttttaaaagtacatttttttctgattatagaagtaatttatgcttagtgtggaaagttacatttagggaagcataaagacccattagctgtctaatgagaagtaatcattgttaacatgttggcgtgtatctttgtagtcttttacatagcatgtaatgagtaaaatattcatgctgacttcatagctcatagtgattactttctagttgtactaatgtcaaaacagttttgtctgaaccgaacaagcctatcaaagttaaatccttaaaaatttgttaagaaaggtagctgcatggagttataaaaaggggcagcagattaaattaggatgttctttgggcatatttttaaaattttttaacattacttttttttctttctgagacagtcacccaaactagagtgcagaggtgcaatcccagctcactgtaacctctgcctcctgggttcaagtgattctcctgactcagcctccagtagctgggattacaggcatatgccaccacacccagctaattttgtatttttagtagagatgggatttcaccctgttggccaggcttgtcttgagctcctgacctcaagtgatccacccaccttggcctcccaaagtgctgggtttaacattaatttttccagcctgggcaacatggtgaaactctgtctctaccaaaaaaatacaaaaaaattagctgggtgtggtggcgcatgcccgtagtgccagctacttggaggactgaggtgggaagatctcttgagcccaggaggttgaggcagcagtaag

SEQ ID NO: 15427 - DNA, 1033 bp, Homo sapiens
gagctcctgggctgaagcgatccacctgccttgaccacctcccaaagtactgggattacaggtgtgagccaccacacctggccagaatttataaaactttattaattaaaatcatttttattgtattacaaagtgaaaatattgtatgatttatgagtgagttatggtttgacagcaaataagatttatttggaaaatctatgctttattgcatttgtagttgatttcaaatagctttttatttcatgtagctaagctagaagcataaggttacaaatgtggcacctttgatttttattccgtgaataaatgcatgcatttgtttgctaatacgtccaggatatttttaatgtagtgatagttttctgtttgattctactctgacttctcagaagaaccatgacatctagatctaggatctgttgccgcccctgccacatttctcacagtgactgttccacgtatcgctatgcctggaatggacttgcaaaataaccagaggggaggaggctgtgatagagaattgggctgatacacccaactgaaagtccctttagcctctttttcatatgtggttgaatcaagttttgaagtatcagtgtaaataaggtagttttatggttttaataataagcatctaagagaaggaggcaaggtaaggataataatagaattggtttaacttgcagtacagacaaaaaaagattaaaaaactgcataatgaaaagagtggaaagaaacaatagagtaatggcccttgattaattatcaagctcactgcagactcaaactcctaggcttaagtgattcgcccacctcagcctcctgagtagctgagactataggcatgtgccaccacacccagctaatttttttttttttttgagagacaaggcttgctgtgttgcccaggcttctttgtgatctattaattaagatgtcatataatttctgaaattgagattggtatgattctcaatatgtagttactcaacatattataaagatggatttgattgatttgatatagtta

SEQ ID NO: 15428 - DNA, 1050 bp, Homo sapiens
gtctttcgcctccttggttaggtatattcctaagtattttatttatttatttatttatttgtttatttgcagctataataaaaggggttgagttcttgatttgattctctgcttggttgctgttggtgtatctcctgttttgtttcttaatgagcttatttgaattttctctcttcttggttaatctttctaagggtctatcaattttatttatcttttcaaagaactagctttttctttcatttatcttttgtattttgtttgttgttttaatttagttctgctctgatcttggttatttcctttcttctgctgggtttgggtttggtttgttcttgtttctctagttccttgaggtatgaccttagactgtcagtttgtgctgtttcagtctttttgatgtaggtttttagggctatgaactttcctcttagcaccacctttgctgtatcatagaggttttgatagattgtgtcattattgtcgttcagtttggagaattttttggttcgtttgcttatttgtttgtttttgagacagagtttcactcttgttgcccaggctggagtgcagtggtgcgatctcaactcactgcatactccacctcccgggttcaagcaattctcctgcttcagcctcctgagtagctgggattacaggcatgcaccaccatgcctggctaattttgtatttttagtagagacggggtttctccatgttggtcaagctggtcttgaactcccacactcaggtgatccgcccgcctcagcctcccaaagcgctgggattacaggtgtgagccaccgtgcccagccagaagaatttttaaatttccatcttgattttgtttttgactcaatgctcattcaggagcaggttatttaatttccatatatttgcatggttttgaaggttccctttggagttgatttccagttttattccattgtggtctgagagagtgcttcgatataatttcaattttttaaaatttattgaggctcattttgtggtttatcatatggcctatcttggagaaagttccatgca

SEQ ID NO: 15429 - DNA, 1053 bp, Homo sapiens
aatcctgggttagaagcatatctctgccatatatagaaggtattggtagtccgtaggtaaattgtctctttcccagaaagatgttcctaataccaagtttaggcaactaacaggctcaggtaaaacctcatattttgtatgacttcaaactatgtgtttcagtggtaggttaattgaagtgtgagctcttatttattttaaatggttctggaagcttctttgtacttaggtaggttcactgaactttttgatattttgtaaaaatacatgtttccacatatcatcctggtatatatggttcactcttctgagttccatgcaaacatctggcaaattttgaaatgtcatttctgtgctaaagctacttctgaaaccagagtagcataacaatattttctcaagtatttaaaaatgtaggttttttctaaacataatttctttcttattttggttttcatcttccttttattttgcacagacatcccgcagatgagaccaaagccacattatgtcgtgataaagaaagatgctgaaaccaatgaagcaatctattgtacaaaggagcctttcattaaggctcgtgttattgtcattcgttggctggtttctttctggctggagccaaaaccacatacaggacctcatattcctgggatggaaggtgaagtcttgccaaagaatattcaggtaatgcacaaatgaggcaggcctgttaaagttagaaatggcttttgagatttagtccattgagttcagttgccttaggtggagcgtacacttaaataatagtgctattttatttgtataaatatattttgtaaatgcaaattttaattatagaattaataagtttcttaataaagaaatgaaacgggaagtatagaagataatttcattagtatgtcagtctcagcttcttatttctgtattttaattatacaatactaaaaatattctttattgtacagataaatcttacaagtgaaaagaactgtgatcaaatggtagaaccttgatggccctttttaatttgggggcattcacaaaatgcag

SEQ ID NO: 15430 - DNA, 1048 bp, Homo sapiens
atgatctttagtgttaacagttcagtgtattgcaaccttttacaagcttgtttataattgctaatacttgcatttaagagattctttcttctggaatgattctaattatataatttatttttaggtaaaaagtttagaatggaagaacaaagaaaaccaagaaaggggattttcatttttgttttcacattttaagaaatattacttgccttatatttttccaaacatctgtaaggaaaacagtttatatcatcctatacttggtaggtaatgtttgaaattttctgaaagatcacacttaagagtaaaataatctcttactgtaaagttggcatttgttactgcaggaaactgatcatatttaatacttgtattggttggtatagatatgatacctagattcatactgaaagcaaatttatattaataggaaattttcaatgaggatgagtttttctttttttgtttttttttgttgttgttgttgttgttgttttttttaagagacagggactcactctgtcacccaggaggctggagtgcaatggcataattatagctcactgcagccttgaactgctgagctcaggcagtcctcccatctcagcctccccagtagctaggacaacagtcatgcaccaccacatctggctaattattttttttttagagatgggatctccctatgttgcccaggctggtcttgaactcctggcttcaagtgatcctcctgccttagcctcccaaagtgctgggattataagcatgagccaccacacccagccaacaatgaacagatttttaaaaacacttgttctctggatcttatcaattataaaagttagcccaccagaaatatttgcgattgtaaattaaactgaattcttgtttggcatgatccttagactatattataaattttctttttaaggtccccccatatgggggttcaatcaagtgttagtcttattcaaattctgtgtgaataattacatagccatgtttcatccagtatttatatagattggtgcaaaagtaatggcagttt

SEQ ID NO: 15431 - DNA, 1092 bp, Homo sapiens
gtgatccgcccacctcggcctcccaaagtgctgggattaaagacgtgagccactgtgccctacctatttattttttgtagtactgtattttttttaagagacaggatcttattcagtcaccaggctgaagtgcagtgccatgattgatcatggttcactgaagccttgaaatgggcttaagccatccccctactcagcctcttaagtagctgggaccacaggtgtacaccaccaggcccagctcactttttaaaattattttttgtagagacggggtcttgctttgttgcccaggctggtctcaaacctccggcttcaagccatcctcctaccccaacctcccaaagtgctgggattacaggtgtgagccatcatactcaacctcttttatattttataaaacattctgtggcaggcatgatgccccatgcctgtcatctcagcacttggcagaggctgaaagaggatgatcacttgaggccaggagtttgagaccagcttgagcaacatagtgagactctgtctttaaagacaaaagaaatttttttaagctagcctcacttgttggtatgtgcctgtagtccctgctactcaggaggctgaggcaggaggatcacttaagtccagaaattcaagggtgcagtaagctgtgatcacactgctacactccaattggggtgacagaatgagacacaatctctaaaacatgaaaataaggacagatgtggtggctcatgcctataatcccagcactttgagagcctgaggcaggtggatcgcttgagcatgggagttcgagaccagcctgggcaacatggtgaaaccccatctaggaaaaaaatacaaaaattatccagacgtgatgactccttcatgtcgtcccagctccttgggaggctgatttgggaagatcatctgaacttggtgaggtcaagactgcagcaagccaagatcatgccactgcacttttagcctgagtaaaaaaatgataccctgtctcaacaataaaaaaaaattttaattaaaaaagagagaaattctgcttcctttgggtttaatttactcttctgtttctaggtttttgtttatttg

SEQ ID NO: 15432 - DNA, 1031 bp, Homo sapiens
aaaatatattattacaattaatttccccgtgtcattttatttcttaaaatgtgattacaaggaaatttaaaatcacatatgtagctaatatttgtggcttgcattatatttctaggagacagcactgattgagacagattgctgattatgcatttgctaatctcttccaagagggacccagaaactacagttctccaatctggatctcagagattatgagagaaccaggccactttgactttttttttttaaagcttcatagtaaatagtaaatttaaaaaaaatttttattatactctaagttctagggtacacgtgcacaacgtgcaggtttgttacatgtgtatacatgcatacctcacgtttttcttgctccatgtattttttatgccttgaatgccctttccattcaactccaccactttatgtctagtgttcttcctgtccttaaaagtcttttcagatattatgtactctgtcaggccttttttctttccccacctttgtgctttattgagctttgaaagtactcttgtgtttctaaactgccatatactttgacatctcacttttagtactaacacttctactgttcatatagttattcatttaattttgcatgccctgctcttactgacagtttctttagagcagtactgtctgtgtttgagctttttaatccctaagtacctatttacaaagcctattgttaggtacctatttacagaataaatatatttcagacattataaattcttcttttttttttttttccccaaggtggagtctcactctgtcttcccaggctagagtgcagtggcgcaatcttggctcactgtagcctccacctcctgggttcaagtgattctcgtgcctcagcctcccaagtagctgggattacaggtgcacgccaccacacccagctgatttttgtatttttagtagagatgaggtttcactgtgttggccaggctggtttcgaactcctgacctcaggtatctgcccaccttggcctcccaaagttgggatt

SEQ ID NO: 15433 - DNA, 1022 bp, Homo sapiens
ggaatctcaatgtgttgcccaggctgatctcaaactcctggcctcaaacaaccctcccacttcagcctcctaaagtactgggattacagatgtcaaccaccttgcccagcccaagcctgttttattctaatttcataattctttaaactactctgtgggaaaactagaacacctttcctctttatttcagttgtatgtgcttttattttgatatttgataaactatatttaactagtatttgatgactattattcttataggcagataatagataaatatttagtattctttttttacagatgtattacattggaggctgaatagatctagggttacctgttgtttaaatcctgactctacttcttatgagctaagtttcttagactctctgtacctaaattttctcacctgtaaaatggagataataatggtactaatttcatagtattgctatgtagattataggaattagtttctgtggagtgctgagaatagtgtgcattgtttagaaaacattcgctttgtgttacacattattattttgtctagttctgtgaaaagtcacataggtagtaagtgttacagacaggagtgaaatctgggtattctaattccagtcaagaggaggcagttctattttgcctgtcagtaggttatgcagtcttttccaaggtaaaaatttccatattgtatgaactgaatataatgaagtaaaaataattaattttgttagtaataaaacacatttgagtacatattgtttgctcagcattgtgccaatttttagaaatcctgaggtagacacagtttctattctaaagatgctagactagtcctggaagaaagacaataagacatttgaaacattgttctttccataaaagagaaatgtacagaatccaagggaatagagaggaaaggcatatatccctttccttttggaatggcagaacaaaaaacagtcttggaaaatcacatagataagacatcactaaaaagttactatgccaggtgttgtggc

SEQ ID NO: 15434 - DNA, 1029 bp, Homo sapiens
ttgaatcttatgtctttttcagtttggacagtctagctgacagtttgtcaagttttttgagtgtttcaaagaaccaatttttgtttaatgattttttttggggggtctctatttcttttatgtcctttctaatctttatttccttctttgtgctttaggattagtttgctctttattttcgtatatatgtatgaccacacctggctatttttaatttctttgtagaaatggagtctcactaagttgcccgggctggttgtaaactgctgggctcaattgagactcctgcctcggccttccaaagggttgggattacaggcgtgaaccaacgcacccagccaatggtcttacttcctaaggtggaacattatggttcgattttcagatttctttctcatatagcaatttaaagctatagatttttctgtcagcactggattagctggatgccataagttttggtatgttgtattttcatttacattcatctcaaagattttctaacttctcctgtgatttttctttgaccaattggttatttagttgtgtattgctaaatttccacatatttgtgagttttcttaatttccttatgttattgatttctaatttcattccactgtggccagataacatactttgtcttcagtccttttaaattactgaagtttattttatggccttacatatggtctattttggatagtataccatgtgcatttgaaaagactgtattcttttgttgttagatgggcattcgatagatgtctgttagatctggctgcattatagtattgtttaggtcttctattttcccttctgtctagttctattcattattgaaagtagagtgttgactcttaaattaccattgttgaattgtgtgtatattccttcaattcagttctgttcagtttctgctttgggggttgggagttctgttgttaagtgcatatatgttcacaattgttatatcttcttaaaagattaaccctttaactattataaaatgtccttcttctctagcaa

SEQ ID NO: 15435 - DNA, 1075 bp, Homo sapiens
ttgttgttgttgtgtttggttaaaacatttttttaattctaaattcactgtgtgtgtgtgtgtgtgtttgtgtgtgtatctaatgtctcttctcactgaaggtacacattatagaaatagaccttggagagccaggcgcggtggctcacgcctgtaatcccagcactttgggaggccgaggtgggtggatcagctgaggtcaggagttcgagaccagcctcaacatggagaaaccctgtctctactaaaaatacaaaattagtcgggcatggtggtgcatgcctgtaatcccagctacacgggaggctgaggtgggagaattgcttgaacctgggaggcggaggttgtcgtgagccgagattgtgccattgcactccagcctggacaacaagagtgaaattccgtctcaaaaaaaaaaaaaaaagtagactttggagagaatagcagaataggtgatgaatacgtctactttaataaatggcatcaccatcctcttgtcataggttactaagacaagaaactttcatctttaacaatgtggtagaaaaagataaatttatgttgggactgcagctggagtttgaaatgtctatggggcaacctcacatctccctagcccactactgctcttttctggctttataataatatttgaacctgttccttttttctcggttcttaccatcatttctttagtttaaatttttattgtttcttgcttgaacttttgcagcagcttactagttgatctccctatgcaggtcttttttttttttttttcccctcttgaatctcttacatggccttgtcacaatctatctttctttctttctttctttctttctctttctttctttctctttctttctttttttttttttttttgagacagggtctcactctgtcgcccaggctggagtgcagtggcacgagctcactgcaacctctacttgccgggttcaagcaattcttatgtctcagcctcctgagtagctgggattacaggcatgcaccgccatacccggctagttttggtatttttaatagagatggggtttcgccacgttggccaggc

SEQ ID NO: 15436 - DNA, 1159 bp, Homo sapiens
ggctcgtctgggtgggagggcggccgcccagacttcccgcggtcggcaccccctgctcggccccagcccagaggccgccagcatttgagtccccgcccagccgcggctccgccgtcggggctttcccccgaaaggcccaggcgccacctcgcgaagtcagcttggctggctcctgagcccggctctgccaccccaaagcaaggggccgtacccgcgtccttcctcggcgacccgcgcgctcccctccctctccgttaatattctccgataatttccgaggcaaagatttctatcttttgggcgaatttgtttcatctctcttgaattcagaaatggagccttcaaaagtcttaatgtgtgtttattttttctagcattcaaatgaatgcgaagccacggattgaatcccgtcactctttgggggttagcttctcccgatatttcacacggaaaacaaaactgggtccctcttatttgtacttgtccttaacctttgcagcaactgctgtagatgcggctctgtccattctctaatagattttaccaggggctggtgacagagaactgatttcttttctattagggtttagcacatctttgttgaaggcctgtagaatgaccagggattagatttgcatctcttagacgccctgtgtggtctttgtgcgaagcttgtaactgttaaaaatgacttgttaggaagcgtgtgggctctcatcgctctccttttgacagaatgattgtgaaattcagattggccctgtaggatttagcccacagattccacctgaaccctaagcaattagaccctaatctccctgcaatcatatttgagttaggatttgttgcactttgtttacttcaattaaaagcagtggaataatttttttccagcttttaaagtgaaatctccaggcataaaaccttaggacttcttagaaatgcttttggtagtgatgaggatttcttttccgtgtggtttcctccaagtcctcatgaccatccccttccttctcccatttaagtgactcgttttttcccctgttgctcgccaatgcccaaagcgtcttcacaggggctgaattcgcggcgcaagggaagaactgtgtggagatgacgcccagctggaggggcgcccaagctcaggccgtcgcccagg

SEQ ID NO: 15437 - DNA, 1065 bp, Homo sapiens
atctaccccaatccaaccctttgcaattcaattactgcatattcatataaagataggaatatataagttatattaggttggtgcaaaagtaagtgcggttttggccattaaaagattgggtgttaggcaccattaaaagtaatggccaaaaccacgattacttttgcaccaaatgtataatatgtaagttatatatgtatatatactatatatgcatatatagtgtatagtgtacaaatatatttctaaagcctccactccccagaatagactcgttcagtatttgttaagaagatgatagatgtaaaattactttggaaataaaggcactgcataaatttgagattttataattttcaaacacccttgtcttgagacttttaaggcagcaaagccattttatttcttacaggcatatctttcttttggccatatcttcagaagtactcaaacaagtggaagtggtatatctatgctgagactgagtcacagactagtttaaaatagaatatcactgagcacacaatgaagacagtgcgaaatgctgcagtcatgattctcagctaatttagaaaaaaaaaatgcttcaattagtgcaaacattttttgtctttaaaaaatatgcttgtacatttgtttgggaacattgaaaagcccttccttaccctgttggctaccacagtaactcactcagtattgtggctggtgaatgacagggcctgtttcctcccatttgttaagtgtgtgcagtcctttggctatgagaacagcggcagataggtatctggctcctttgcaatgcagcctagggtttgagccacattcctttctgttgtgtgtgattctgatcggatgttaagcaccaaatatgtcccaagtgttacttcattgtccactctgtcagtgtggcagcaagtttccatcctaataaaagaagttactcagatggatattccagatgtatttaagctgcttttattaggacaatggagaagtccaaccctgtcttctaaatgcaatcaagagtggtgtggctttgcctttgtaattttacaaggggttgta

SEQ ID NO: 15438 - DNA, 1865 bp, Homo sapiens
gtaggcattctgcaatggctgtggcccagagaatggtcatgtagacccatattaaattaagaatttgttaacatacatgagggatccactttgttgagtctatacaaaaagggtttgctgagcaaatgaaataacacaaatatagagaaaaattattatctcactgtgtagaaagtttgccaaacttttcatctgtgttggcttacaatcagtgtgccaattacaaatatgctattgattcataaatcaggatgcatatacttagaaacattttgttagtatttggtttgaatccatgataattagtatttatgagaaagtaataaaactatattcatttaaaaatatatttacccattttggtttttcatggattcagactgggaaattatatatgtgcataagaaatcttggaaaatgaaggcgctaagtagcctttgcaaataagcaaacatacaatttcaaaaaaaaaggtttcaagggagagatggagaagaatatcgtggaactgtgaaagcagcaattttagtagacaggaagaaccattctttaccgagcactttgagcatccttccacttcagttagcaacttccttcacaaacaaaaacagtgatgttctagccatgatccctctgggttgcgcagggtaacgaggggtcactgggtactcctggcactcgttgagcaggcttgcgaagtcggagcaagcctggcctggcgctaagtaaggatagatgcacttctctgcatgaatcttcggcagctcatgttgcagatagggttaaaggttgtagcggccccgtgttccactagcaaaacatcaaaatgttccttctactgagaaggttcagaataccaggtggaataacctctgtggccatgtaggttggttgaactgtctgttttgatcataaccccatgcatggtcttgcatttctttgtgctaatggcagatagcactattatggtgcctgcatgaataatctattattttaaaatataaattctcccattactctgtcagccataaataccttctttgctaacatgctgttcagaatcactataatctggggagggccattttatattctctgttcacatgatctaagcagcatttttgcatgactttggggaataaaacaggaaaaggggggaaatttaaaaaatacaataagcttaatggctttttcacttatcgtttctttaacctctttaatatactatggggggatatgtactaagcttttgtggaaagggggtcctattttgtaaccaaaggaaagtgaaaaatatttctggaacattttgactttcaacctctttaatgactcaaaaaaatatggaataataaaataaaaactcaaagactgccaacttaggcctcacaataacttttctgccaaaaactaaaaatactgctatgcatacaaagggttctaacccactaccaaaaagaaaatttctggcttagtcaaaacaacatacctactatctctacctcaaattctagagtaaaggaaagaagtaaaattataaattattaaaaatgaatttcatgtgtttggtatgtctaacccctaaaagagactgttatccttaaaggcaagaaagaatggctggttacacggtattttattatcttgaatcaaactggtgaataatttctagattactttctgaataaaacataaattattatcctttctggctatttttccagatactctagcaacatatttaaatttgatgcagtttgattgtgtttttaaaaacacaatttttatggatggatctataggacattatgctaagcgaaataagccagacacagaaagaagagtattgcataagtgaaatattg

SEQ ID NO: 15439 - DNA, 1027 bp, Homo sapiens
catgtgcacattgtgcaggttagttacatatatatacatgtgccatgctggtgcgctgcacccactaactcgtcatctagcattaggtatatctcccaatgctatccctcccccctccccccatcccacaacagtccccagagtgtgatattccccttcctgtgtccatgtgatctcattgttcaatttccacctatgagtgagaatatgcggtgtttggttttttgttcttgtgatagtttactgagaatgatgatttccagtttcatccatgtccctacaaaggacatgaactcatcattttttatggctgcatagtattccatggtgtatatgtgccacattttcttaatccagtctatcattgttggacatttgggttggttccaagtctttgctattgtgaataatgctgcaataaacatacgtgagcatgtgtctttatagcagcatgatttatagtcctttgggcatatacccagtaatgggatggctgggtcaaatggataaactgggacacttggtgaaactcttggggtctgtgggtgaagggcatatatagttctttgtattctttcagttcttctctaaatttggatttatttcaaaataaaacatttttaaaagtcatcacaatttttaaaaatcaccaggtaaaaaatgagtcagaagaaacaaaaaagcaaaacgcttaaacctacaaaggttttagatatttgaattataagatttacaaatataaaatattataaaatatttaaacaagcaaatgatggcattttaaaagggcacaaagaacaagagactttcaaaacaggtttgaaaaataagtttatcttgtaaaaataaaaaagttgaagttaaaaactgtgtacacattgagtttacatcttctcaatgtaaacagaagatcaaatgaaatgtaacagtttcccccttttgggggcaaactatttcatacttccccttagtctttgtttttcaaacaatatcatgagcagcttcacataatgtcagtgtcgttgca

SEQ ID NO: 15440 - DNA, 1049 bp, Homo sapiens
attacctcccttctcaggttcttgtgaatgctttaaggccttaatacaattacacattcaaaaattcttggctccttttattactagaggatactggttctcatagttgagcacagggctccagtaatgctctctgaagtccatgttacccaaggtttgcatccatatgcccttctccaggcaacagcaggtccataagtgttgaatgccgtgtgccagggctgctgcttctctgcttcaccgtggcagaatgtaaagatggtgtgaagcttgaggaatcaaaaccaaggtgggctgacaccttgaatcgggtggtcaccattaacagtcctcccattctgttgaatgttattcagcaacctgaatgggcaatccactgtggtcaacagctttgtacagaaaccagcactctttgctcatacccaggtaaagcagtcaggtgtgtgatgttcttttggtgcttatgactaaaaatgctccactggactatttacattatcaggactttaacataaaacaggattcagaagtatttaacttttgcatgagtccattggaagggaaaactgtaagctgtttaatagaatgatttgcattgatttgttttccagcacatgaaagtaagaactccaagttgactgatgataaaattaaagagcttgggaacatgactgatttttttttttttgaagcagggtctcactctgttgcccaggctggagttcaggctggagttcaggctggagcgcagtggtgcaaacatggctcactgcaacctcgacctcccgggctcaagcaatcttcccacctcagcctaccaagtatctgtgactacaggtgcacaccaccaccacacccagctaattttgtttatttttcgtagacatgaggtcttactacgttgccccagctggtcttgaactcctggactcaagctattctcccaccttgaccccccaaaatgctgggattacaggtgtatgccaccgcacctggcctgatttcagatttttaaaattagagtaatattttgtactttggaaagtagc

SEQ ID NO: 15441 - DNA, 1100 bp, Homo sapiens
gcacacgtatgtctattgtggcactattcacaatagcaaagacttggaaccaacccaaatgtccaacaatgctagactggattaagaaaatgtggcatatatacaccatggaatactatgcagccataaaaaatgatgagttcatgtcctttgtagggacatggatgaaattggaaatcatcattctcagcaaactatcacaaggacaaaaaaccaaacaccgcatgttctcactcataggtgggaattgaacaatgagaacacatggacacaggaaggggaacatcacactctggggactgttgtggggtggggggaggggggagggatagcgttaggagatatacctaatgctaagtgacgagttaatggatgcagcacaccagcatggcacatgtatacatatgtaactaacctgcacgttgtgcacatgtaccctaatacttaaagtataataataataataataaagaattatgccaaatctgctgtgccctataaatggaacaacaaagcctggatgacagtacatctgtatacagcatggtttactgaatatcttaagcccacaatgaagacctactgccaagaaaaacagatttctttccaaatattattgctcattgacaatgcacctggtcactcaagagccttaattgaggtgtataaagagattcatgttgttttcatgcctgccaacacaacatttattctgcagcccatggattgaggagtaatttcaatgttcaagtcttgttattaaagaattatattttggaaggctatagctcccatagatagtgattcttctgatggatctgggcaaaataagttgaaaacctagaaagaatttatcattctgaatgccattaagagcatttatgattcatgggaggaggtcaaaatatcaacattgacaggagtttggaaaaaattaattccaattctcatagaagactttgaggggttcaagagcagatttggtagaaatagcaagagaacgagaattagaagtggagggtgaattgctcaatctcaggataaaacctgaatggatagtaagttgcttcttatggatgagcaaagaaagtggtttcttg

SEQ ID NO: 15442 - DNA, 1057 bp, Homo sapiens
tgatttgaaaaaaaaaaagtgactttttcatatttactgtgtttttttttgagatgattaggtgaatctctaaatgggaaatactaagtttcatgtattttgcaagtcattaagcttctcaatctaatgacttatttatgtactagtatcttgaaatgttatagtttgtttgtttttttataaatcagcaaccttactatgtacagcttaccagagtgatatatggattataatcctcaaactttttttattatttagggcaaatagctctgcacttactcttattaactacatcgagttttatttaacacagtgttggcactggtttctttggaaaattagctggcattcttaaaactacattatttataagagtttaactttagaatgtatttgaatttatactaaatgtttacatgtattattttcttatatattcaactttaaataaaaattatacttattttatctcacatgtttagattgcctatatttattttattagtgaggagagatagaactacagatttgtcttttaggaggttatctctgtctttcctccttttattccatctatatcttacatctttaatttcactctttttttaaaaaaacttgctgtggctccccagtgttcaaggatgatcaaagcctccttagttcttcaccatctggtcttacctgtctttccagccccaatgtccctttctagcctcagtgggttgttactcacttccctttttaggccccaaatacctctcgcagtctcctgggatttgacatcctcttacacacttttttaatttttttttaccagttgtctccttgacctggaatgaccttcctcatttcccctcctaacacatttccttaaattcaagacttaatgctatatgctgaaatgtctttctaactcttcaggcatgccccagagctcccactaccaatgcctttattattgctatgttgcatagaacttccagaatattgagaagacagaggacaaacaagtaaactatttcacttgtgatatgtgatattaaggaaatgaatagga

SEQ ID NO: 15443 - DNA, 1034 bp, Homo sapiens
tgtgtttggcattattgtagtcactgaacgtgtgttattgttattgttgttaaagagaagaatcatggtgagtaataattattagataaaactatgaacatgttcagatactgcattgtaaatcaaccctagaagtatatagctgcaactacataccctagaatagtgtatcaatacctggaaaataataggctcttaatgcttgttgactgaaaaagcatttggtgaattcacttaatgaaaaagcaattggtgaattcacttaactgggtggatagaaataattgattctcatcctattatacctcttttattctcagagcttacattcagcataaaccagagcacacaaaactcctgcctctcagctgtgaacaatttgatttattaagtcagttaggatagatttaaacttgaaattgatgagacagttacagttgagcgtttcctggtgtgtgaatgtggaatgaactttagacaataatactaatgctgtgttcagatagagatgtggtagttgtagaaatatctactgcaaaaattaggtttacttagtttgctttactgagttatagcagtgttgaaagcaaagttcaaaatatccttctttagtattactgaagaaacactttaaaaaaatcctaatttccattggaaaaataataggccaaactactgtgaagaggagcctacagaaagggatctgctaatattagatctgaatgatttgtcttttgtccagtggccatctgatttccacatgggaaaataggtacttcaggatgggtggggaaaaggaagaaggaaaggaactaacattttttgaatatttgctatgggctaggcactccactgtgcgctaggacatttatatattctagttaattcattcttcataaccatcaggtattatcactcccctttcatttctgaggactaaaggtttaggaagacaaaaggagaaatagatggtgtccctgtaaagcccactctctctttttaaaaatgatttgtatagtgcctaatgcttaatg

SEQ ID NO: 15444 - DNA, 1075 bp, Homo sapiens
taaaataagaaaaatgaacctaaatttagaaagtctatgatttttttcaaccttttaatcctcattggaggccattcttttttaatttatgcacataaaataccacaggaagagatggtataaatttgtggactgtggagaatgagtgaacatttttgaatcaggatctttaaaaggggtgaaatttgagtatgattaagttaggaaaaagcctcgcttacggcggaagtcagagactctgtatacattatgggcatgtcatggcttttaaaaagttatgttagacttctatacaaattgtgaaggaatttgtataaccccaaacaaaattctgtgtggttctgaacttttcctaagttgaaaagagagagagagagagtaagaaagaaataatgctggttagtattctgatcagggacaagccttactgtcgggtgggccggtcgtttgcactgcctgggtgttttcttggttactaattttctcagaaggaaatgatcctatggcttatgctagccacgtttgtgcatatatgccctgtaattggcatttattaaggagaccttcagtttgatggatgactgtcagagctgagcctgctggctttaaagacagttgactttgcttgaattttgttacattaattcattagaactctgcactgcttcaacccactctttgtttactttcttataattaagatttttgaacaatcgatttttagatacgtggcaggaggccattccacacttggagacttagtctgacagaaaaatatgcaccagaacaaatattcataataaaaacctgtgagtattaaaactgaggtttttgtagtctctttaattgctgcccagttaattagcagcttttaaacataaaattgcttattacttatctttactttgtataattaggtgtcttgttcctctactttctttaaaagtgaatcctataaaagcaacagctgtagaaatattttcagtacaggatatttttagagcttgtatgcattatgatatattaccaacaatgtaagcaaataattaggaaaatgaaaggccatctgactcta

SEQ ID NO: 15445 - DNA, 1113 bp, Homo sapiens
agacttggctaggctttcagacaaagacccttgctatacttaaaaaaatgagagagacagggtcttgttctgtcacccaggctggagtacaatggcacgatcttggctcattgcaacctccacatcccaggctcaaatgatccccccacctcagcctccctagtaactgggactataggcatgcaccaccatccctggctaatttttgtatttttgtaaagatagggttttgccatgttgcccaggctgatctcaaactcctgaccacaaatgatctgcccaccttggcctcccaaagtactaggattacaggcgtgagtcactgcgcctggctgacccttgcttagtgagggaaataactcagaggctttcagtgggaaatcagagaggagaaaatatgtatgaatgtagacacagttgatgctcattatttgcagatatcatatttgtgaatttgcctacttgctgaaatttgtttgtaacccccaagtcaatacttatggttctttctcagtcattcacagacgtgtgcaaagtgatggaaaatttgcatcatctaatgcacatgttcccagctgaacaaggtgatactctgccttcctgtttccgttgtcatactgtaagaaggtcctttttgcagtctatttagtgctatgtgttggggcttttttgttcatgattttactgtttaaaatggcccccaagccattgtgcagaagtgttgtctattgcttttttttttttttgagactgagtctcattctgtcacctgggctggagcgcagtggtgcaatctcggttcacttcaagctttgcctctcaggttcaagtgattctcctgcctcagcctcccgagtagctggggttacaggtgtgtgctaccacacccagctaattttttgtatttttagtagagatggtgtttcaccatgttagccaggctggtctggatgtcctgacctcatgatccacctgcctcgacctcccaaagtgctgggattacaggtatgagccaccgcacccggcccattgtctattgtttctaaaggcaagatgcgccttatgagaaaatctgtgtgtcaggtaagctttgttcaggcttgagttatagtg

SEQ ID NO: 15446 - DNA, 1048 bp, Homo sapiens
caccattattttcatagtttatagctttttgattagatgatctcaatagctacttatcttcctgggatgtttctcaggtcttcactgagcaaaaacattgactgtattgagttttttccagttgccagttactgagtttgggaatgagaggatatcatggtataagttgggtcctgcacctgcaggagcctcccagtactgtgagacctagaaaagggagccaggaatgattttactgaggaagtaaataattatgttgggtattgaagggtgagtaggagttttctgagcaaacaagaacatgtaggcagaggaagtagcacttgtagtggaacggaagcatgaaagcttattgtccactcatagagggacaacaggtttagcatgattgatgtgtagggtctggaggaggggaaggagacagggaacagtaatggagttatagaggtgggttagggcaggtgttggtggttttttttttatggtgtatgaggtatttgtttacaaggggggatgtgtagattctatttaggggagataaattggtgatacagaggctgaattagcataaggggactagtcggaaggttgttgcagttatttagaggagggtagatgaaaacttaagttagggcagtggcagtgggaaagagaaggaggactgtatttgaaggagaatcacatggatttggtggtagattcgatttgggaagtcagtggagaaagagcctcacagagactgtgagctaaggtgtgatactattaggcatgaaagggaatgtcaacagagggactggggaatagttatctatgatttatgtgtctgaggttggaattgttcagtaggtggttgggaaatagatggggtgtccaaaaaagtttgatagtcatcagcatatttatcagccagtgattctcgtgtttgtgtgtttgcatgagtgtgtgtgtgtgtgtgtgtgtgtgtgtgcacgagtgcacacagtaaggtggggtatgtgtatcaggcccacctgaggggattttaaaacaacatccttatctgtaatac

SEQ ID NO: 15447 - DNA, 1018 bp, Homo sapiens
tttgtctattttgcctcttttttgattccctatggattttaagatttttttttttctgttccgtgaagccaaatttttgatagggattgcattgaatctgtagattgctttgggcaatcttgtcattttattgttattaattcttctcatccatgagcataggatttttttccatttgtttgtgtcatctttaatttcttttacagtgttttgtagttttccttgtatagatcttttacctctttaattatatttacttccaggtattttatatgttttatagctatagtaaatgggattgccttcttgatttctttcttggctagataactattagtgtatagaaatgctactgatttttgtatgttggttttgtatcctgaaagtttactacattcatttatcaaatctaacagttctttggtggaatctttaagttttttctagatacaagattatatcatcagaaaatagggacactgtgacttcctcttttccaatctgaatgccttttatttctttctcttggctgattgcttcggttaggacttccagtactatgttggataggagttgtaaaagtgggcatccagaaccagtgttctggttcttagaggaaaggcttttaactttctgctattcagtatgatactagctatgagtttgtcatacatgacctttatttttttgaggtatgttccttatatgcctagttattaagaatttttatcaagaaagtatggtgaattttataaaatgctctttctgcatctattgagatgatcatatggtttttgtccttcattctgttgatgtgatagagcttgatcattgatttgcatatgttgaactattcttgcatccctggaataaatcctgtttgataatggtgtattatctttttgatgtgctgctggtttcagtttgcttgtattttgttgaggatttttatgtctatgttcattagggacattggcttgtagtttactctttttgttctgttcttttctggttttgg

SEQ ID NO: 15448 - DNA, 1026 bp, Homo sapiens
aggggctattagctttcacctaaaaggccatctggcagtctttgatactgtcattaaaagaaagtgggtagacagttatgtagcaggtgtttgccaattagaagaatgctcccaagcaggacatcgtggacacactctccacagaactgtatattttccaactgcaataactgtgtatttaagtgaagaaaagtacattgtagagcttggtgttatgagtctgtttcctgtggaaagtgtggcctgctgtgctggggaagctgctgttttctcttctggtcaagatcttgctcaactgccttaacagggtacagggtgaagcatccacagaatgatcctgtgtgtacatttaacctgttctggggacggcactgtttgttttggcaaaataggaaaattgacaaaatcaacaatttttgtagagattagaactttttctaagaataacaaatctgaagattacttatgagtagcagtaaagatgtcactttgaagtgataagtatactgaataaagaacctccaataaggaaggatcacatttcactttatttagtggcttagagccttttcttcaaggcaatttaaaagtaaatctgcagaggtttaaaaattaatctttatcaaatccttgtgagatgctaataggttaggtattctgcatgtttgaaaacatttgtaaagaagagatgaaagaatcacagagcagtgcttctcaaacttgaacatgaatcctcaaggaataatgataaaatgcagatttccatcgagtaggtctgaggcgttgcattctaacaagctctcaggtgatatcagtgctgctgctgtggcaggcagaccacaatgtaaatggcaatgtcagctaagagcagcgttgtcatgttttgggattcccataggaagaagtccagcagtcacttggaaatgtgcattttggactcaggagactcagttttgggagccatagcatggaataatagctgaagttatgagaatagatgaaattgctcttctttaattatttact

SEQ ID NO: 15449 - DNA, 1027 bp, Homo sapiens
aagaggctgaggcaggaggatcacttgaggccaggagtttgagaccagcctgggcaacatagcaagactccatctcttaaaaaaaaaaagtgttaacctcttggtataacatatcaacatttattgagtgtccagtatgtttaggactttgtattggctctttagggtgcagttattacccatgcctttggagagcttgtagtctaatattagagataaaatacatacctaagtaaattacaaggcagaatgggatatttgtccttagaaagctatgaagtattacaaaggttagaagaggaagatggcaagaggtcacatagtggtagcaggaagagggtgtgtaatcagaaaagagctcagaaaaaagaaacatttcatttaaagaatggttatttcagtaattggaaattgcatgaggaagggaaatctaggtagagaatagtatgggctaagataaaagactacatgcagagctgactagaagaacataaaacggaaatgtgttgtacaagtaaattgtggaggatcttgaatgtcaggttgaggagtgagaagttgagtatttatttggtaagtaatggagagtcattgaaggtggacagagggcagatttgagtcttagtatagttgaatcttaagattaaatggaagcagtctgtaggttgaaagtatatttacgaaaataatccaagtgagagggagtaaaggcaagatggtgaaaggaatagatttgggagatattttaaaagtagactcaataggacttgattagaagttgcaggaaagtaattattccagggcatggcaactatgcacaaaatctgaattctgattgaatcctggattaaagggagagaatagctataaagaacataattgggataatttgtgagatttgaatatagatcatatatcagataactagtacagaattattaaatttcttgagagtgataatggtgtggttatgtaggagattcttcttgatcttaggagatacatcctgaagtatttaggaataaaa

SEQ ID NO: 15450 - DNA, 1049 bp, Homo sapiens
ttttggggtcccaagacttactttcctttcacaagattaagttgcagatatgatagtcccaaccccttgaaactttgtatttcctatgaaccaggataatctcctatataaccacaatataaaactattaaaattaaaatgttaacactgatacattactaccagctaattctcagaccccattcaagttttaccagttgtcccaataatttcctttactgaaaggatttagttcagtcctgcatttatggctatatctatttaccctccttcatcctggaacagttcctcaatctttcctgatctttggaagattcagaccagttatttggtaaaatgttcttcaatttgagtttgtcttgaagtattctcgtaatttgattcaggtcttgcatctttgggaggaatatcacagaagtaatgctgtgttcttattgttacattttacaggtggcacatggttttcatttgttctgttactgatgatattcactttggtcattcattaaggtagtatctgccagggctctccactttaaaattactctttttttacccctttgtaattaataaacattgcaaaatattaggaacccccatgttgatttatttcattactgctgatgttaactttccttacttggttaaggttgtttttgtcactgtaaagttacaggttttcctattgtaattataaatatcttattaggagataccttgaaaatatgtgaataaccagtgtactcagcaaacttttacccactagtttagcatccattgatgattcttttctgatcaattattattatgatgcatgccaaatagtggctttctaattccatcatttctacttttattaattggctttctacttgaggaagagctttctctcctctcccatttacgtatttatatatatataaatttatatacacatatatatatgtaaatacatacagaatacacactgggtgtattcttacattcttattttatacaacaagatacattcctttactatcataatttactttgatgcttaagttttc

SEQ ID NO: 15451 - DNA, 1047 bp, Homo sapiens
ctcctaacagcaggttattaacgctgccagaaaaaaagtgtcccctctaccggtctggtgaagaaacctcatcgctacgggcctgggactgtggcacttctagagattctcgttaccagaaattgacctagcttctcatctggaagctgcctttctagaggttggtgagagagatcacccaggatttcaaaaccaactttaggtttcagagcacagtcattggggtgctgcaggaggctagtgaagtgtacctggaggctagtgaagtgtacctggtgggttggtttgaagatgctaatttgtgtgccatctacggtaagagagttggctctcatgcccaaagacatccagttggctcgccagacacggagtgagcgagcttaagtgaaggcagattttaaggcattttatatgaattctgtaaaatactttggtttaatttgtgactttttggggagaaattatttataatatgttgcatttgtgcttaagtcattccgtcttttgggatgaatgtgaaaagtgactgttcatagacctcagtgacgtaagcactgttgctcaggagtgacaagttgctaatacgcagaagggatgggtgacattttttcattctcatgacgcatgtttctgtaagttaatgacttgttaggtagctattaaggaactagagttgataaataaatgtgtataggttccttttgcaatataactggttattacttgatccaagtgtttaacatttggagctaagtctgaccatacattactgtgatagaatgtgggccttttcaagggtgaagatacaagccttaaccacagtataacttgcagtttccttaaacaaacaaagaaataaaaacctagcatggagtacattatgtgcatttataatagctattttaaatattgtagtgtcaacattcaaaaattaattcttttacattcgcaaatggtggggagtcttgtcattaaggtgtgtataacttagaatccacttggttttctcctaactggactgcatttgttttcatagtagtaaaatgt

SEQ ID NO: 15452 - DNA, 1023 bp, Homo sapiens
ggcaatggtaagtatttgtaatgaacttgaatcaatatgaaaattacactgtgttcagaatattggcataaattaatggagcatttaatacattttggaaatatttctactgaagatggctaaaataatactatatatttaaaagactagcctttagctaaaaaatacacacttaaggccgggcgtggtggctcagcctataatcccagcactttgggaggccgaggcaggcggatcacctgaggtcaggagttggaggccagcctggccaacatggcaaaacctcatctctactaaaagtacaaaaattagtcgggcgtggtggcgggcaactgtaatcccagctactcaggaggatgaggcaggagaagcttgaacccagcagggggaggttgcagtgagccgagatcgcaccactgcaaaaaaaaaaaaaaaatcacttaagtaaattctctgagaaacaatgttgataaatagactaagaaataccataacttatatgtattaaatatttactgtgtgcaaagcactgttttgagcatttgacaaacaagtattttgtcatttaattctcacagcaaccctggagtagatatcatttcatttcacatataaggaaataggcatagaaaaattaacaattgtgtctaagttgtaaaaccagtaagagtttgggtagaatttaaacccagaagatagaactcctacattacatgacttttatcctgctgatcctaaagactacgattaccttactattaggtagataattctatttttccacttagtttgtaaaatttacagatattaaagctccatccatattctccatgtaccagtattcttgctgtatttcttgaagtgcattaactgcccttggtatatttatcagtatcaccaaatctatggaatcacaaagcaacagaataatcatcatgtaggtgtatgaatttatgcctaacacatctaacatacaaagtgtgtgtgtgtactatataacctaatctatgcgtataattttat

SEQ ID NO: 15453 - DNA, 1034 bp, Homo sapiens
acagaagtagcagtaagtggagtagctctgtagtgcaagtatgactggcatgttttagagacagcatggtgaagaccattatcctaagctaacacagaaacggaaaaccaaataccgcatgttctcacttataagtgggagctaaacattgagtacacgtagttataaaaatagaaacaatagacactggggaatacaagactggagagggaggcagcagggtaagagttggatactatgctcactacctgggtgatggattcatttttacctcagacctcagtattacacaatatacctttgtaacctgtacatgtgcccccagattctaaaataaaagttattttaactttttaaaaagaaacagaacattactagagccctagaagttccctttgtgacccctaccagttaccactccctttcctcaaaggtaaccattatcctgacttaacactgtgggttagttttacctctttttggacttcatataagcaagattatacagtatgttatctttagaatctgacctcttttgctcaatgttgtatgtctgagacctcactataatagttgttcattaatttttattgatgattagactgtaatttatctattctattgctgatggacatttgaattttttccagtttttgtatttaatgatcattgctgctatctgcatacatatttgtgcacttctttttagtgcatttaatgtaggcattcatattgggcttatacctaggaatgaaatttctggatcataccgtatacatatgctcagctttagtagaaataaccaaaaagcttttcaaaacgggttgtccatttgatactctcattggtaatatatatgagttccagtttttccacagttactaacatgttagcaagtgtcagtgtttttaattcaagtgtattatattgtacttttaatttgtatttctctgataactttttgtatgtcctaaatgagtcctttgatagttctgagtattacaaaattctccctttcattatattaagctttt

SEQ ID NO: 15454 - DNA, 1047 bp, Homo sapiens
tttacaaatttgtgagaagtttcattatgaacactctgctgacaaattgtgaatttaaagccacatgtttctatgttaaaaaggatcaaaatgtttggttataaatcctcaggattaaaagtattagaaataattttacatattcaggcaagaagagaaaagctatttaagatttcccagaaatattttggaaaagagcagcactgggaaatagaaattaatgtaatcagttgcaagatacttgccttctataattataacaacttaatctgttaggcacctttggctattcaataatcattggatgttgtaatagaatgtaagtggcttttaatgtagctccaaggatatttataaattgtgttattgctgttattgttttaaatgtgagtgaatattaaattataggaagtggtatcaagtgataggaaaatggcattaggttttgaaattttattttgataatttaacacatatggagggtttgctatatgtatgagatattctgttagatgctgtgggagctagagagatatactctttttcactcaaagagagtaaaatatagtgggagagaccctaataactattttggtgaaggatgaatctaattccttatctctgacatcgtaagaagtgattagagacctagtttatgcataagcaattccttagtgtccaattaggttttattggcatgaaaaagaaatattaaaaaacctaatatttatagaactccaaatctcctagaattggataatgtattttctagtaagaaaactatagaaattttaaatatatatatttcctgtagtatcaagactctggctgacattgagagaaatatatgtacatgttgtgtttattttcagttttggtgttggattcctggtattgtcacctaagtgctcattttcaggaaaatcagattctacaataaacacttactgcttaaagttcagtaaacttgtgataacctcataacctctgtagtctaaaagttaaggaattataagatgtcacatgtcaagttaacatccagttcta

SEQ ID NO: 15455 - DNA, 1006 bp, Homo sapiens
gatggggtttcatcatgttggtcaggctggtcttgagtgctgacctcaagtgatcgccctcttcatcttcagcctcccaaagtgctgggattacaggcacgagccaccttgcccggctagtctaccatattcttattttccaaatgtgaccaccctaactttgtcccttgtgctttatatgattgttgcatttcaatacagcatataatattaggaatattatccctttggtgatgtggatttaactgtttgtggaaactagctttaagatccaaatttggaaaatatggagaggccaacccagaagacttttattgtttctttgaaaagttagttttaccttttgcaaaagatcttagtgccgtaacattttaaaaattgtatttccaaaattagctgggcatgcctgtaatcccaactactagggaggctgaggcaggagaatcggttaaacccgggaggcagaggctgcagtgagccaagatcacgctattgcactccagccagggcaacaagagcgaaactccatctcaaaagaaaaaaagaaaaaaatgtattttatgtgccaacgtgactccactattacaatctggtaatcttaaaacaattttacagtgagtacttgccagtgtattccaataaaaataaactcgtttgtcctgtgatgtaaaagtgttgcaggtttatgatggtgctaataactaactggttttcataatgtatggcatgttacagtttacaaaaagttttttttttgttttttgtttgtttgtttgagaaggagtctcactctgttgcccagactggagtgcagtggctcaatcctggctcactgcaacctccaccttctgggttcaagtgattcccctgcctcagcctcccgagtagctgggattacaggcacccaccaccgcacccagctaatttttttatttttagtagaagatggggtttcactatgttagctaggctggtctcaaactcctgaccttaagtgatctgccca

SEQ ID NO: 15456 - DNA, 1051 bp, Homo sapiens
gaatttattttccaaatcggggacagaggcaatatcactgtattcattctaattggttattataaaaacacctagtaatatcaattattgctgctaaaacagttcaaatctttgtgggggggaagtcaccatcccttattttaatgccttatgatttcataggaattaaatagtaatgattttttttaactttaggaaataactgaaatcatgttatggtttggtgaattattaacagaatcttattagaagaatttaggcttccaaagaagctggaagttatttgaaattaaattatagatgtgtaagttactaatagtcacatcacagccttgaaattagatactgagggttttgtttgtttatttattaccaaatccatcaaactctttaaactgactttggtcattgttggctattgtttgtcattcttttaaaggacacaaattaataactctgtgtgtgtgtgttgttttttgtttttagggtccaccaaaatatactaaatctgttctgaaaaagggagataaaaccaactttcccaaaaagggagatgttgttcactgctggtatacaggaacactacaagatgggactgtttttgatactaatattcaaacaagtaagtctaaatggaatcttatgtttttggcttaaagagattctaaatacttgggtggcagacagatgagtagttagcagtacctttttcctgactgtcacctactttcatccagacatactttcccccaagatctacttggaagaggtcttcagttcactgattattggctggctaaagacctcttgttctttggaaagcaaaagataaggaatctcagtctaaacctggttaatgtcccaaagtaaggcattagtatttgaatagaaaaggcaggatagtatgctgttttgtgatataagtataggtcctacccctctaccctttgttaagaatgtaattatttttacagccagaattttattgatggatgatctttgtaaattttttccttcttttaaaatacatagtattgtaattctgaaatca

SEQ ID NO: 15457 - DNA, 1048 bp, Homo sapiens
aggaggctgagcagggaggatcctttgagcctgggagccagagattgtagtgagacaagattgtgtgccactgcactgcctaggtggcagagtaagaccttgtctcaaaaaaaaaaaaaattttttttctttgaccacaaatgtctgctcattgtctactacatcatgccctttcctacctccatattttatttcttccttagagtgtccttttactatccctatttgtcacttctgtgctccctttaagacccagctcctgggctcattgcttcctctggaatttttaccatgtgagactttgctgtatacatacacaactgcatacattcctaagcacatttgtattatttatttctacctttattttaatataaagacttgtctaatagctcttatgggattttaaatcagtcattgtcaatatatttattgtctattatatattaaatagcattgaggaaaattttcatggtatgaatgagtattgtacaggaaagaaaatataagttacgacagaaactcacacttagcaattagaagtcagtataaaagtactcaaacgaaaaatttgataacttcatctttgataactgcttcatatgtagttattaccaacttctggtgattctgcctccaaaatatatcccaaagccattcatgttttgtcatcctcactgttagcaccctggtctaaacctaaactactatagtaacttttttcctaacaagtctctccacttctacttttgcttcccaagtcattttttatatttcagtcacagtgatctatttaaaacacaaatctggctgggcactgtggctcacgcctgtaatcccaacactttgggaggctgaagcaggcagatcacctgaggtcaggaattcgagaccagcctggccaacatgtgaaactccacctgcactaaaaatacaaaaattagccaagtgtggtggttcatgcctgtagtcccagctgctggggaggctgaggcaggagaattgcttgaactcgggaaacagaggttgcagtgagccgagatcacac

SEQ ID NO: 15458 - DNA, 1061 bp, Homo sapiens
agtcagcatggtgaattagcatctaaaatggagttcctctagcctctactcctctacgtactactgtttttaattatctaacttggaaagttacaagaagaaccaacttatcagtcctccaaaactattttgtgataatgagaaaataccttttatggggtgcctgctgataataaatacttgttttctagttgccaagtttccaggacagtgaagatgatgatgatattctgccaaatatggacaaaaatccaacaactccatcatcagttatctttccattggtaaaaactcctcaatgtcagcatgtcagtcctggcatgctaggttctataaataggtaaatattcatgcatatgatatgttaattctctgcatcagagtagtgaggaacatttaaacatttcatgaggaccatagatgccagtaatgggaagaggcattatttaaaaaatcaagaatgtgtagtttctagaagttaaggatggacaagttcatcaaatcggggtgctattcaataaacagcattgtgatataacccacatttacttctggatcaattcgaaatggatcaaggttttacttgtaaaaaactttaaaaaaaaaaaactaaagaaaccttggagaattattttataataccagattagtgatggtctttctaactatactataaaacctacaagccattaatgaaaagatgaataaagtcaactgtgtaaaaatgtttaacaaattttacctggtaccaaccactacaaacaaaagacaacctgagaaaagaatatatgcaacttgtcacaggcaaaaggctaatttccgtaatatatacagcattcctacaaactaacaaggaatgcattgttaatttttgtgcattgctagtgagaaggtaaagtagtgcgatctttgcagcaacaatttgtaagtatcaaaattataaatgcacatgccctttgacttaggaattttacttatagaattgtgaatgtacagcttattcattgtagcattgtttaaatggcagtacctcaaaaatctatcagtagggactaattaaa

SEQ ID NO: 15459 - DNA, 1042 bp, Homo sapiens
ccaacagtcccttaaaatatcaaattttgtcgttctgttcagaatccccagtaacttgtcatctcaatagaaaacactaagcctttaccatggtttaccgagctgtacttagttaatcctggagatctccaacctcaccacttattccctctcacttactcctttcaaattatgccttccatgctgcctacctggatctctgcgctgactctctgtgcttagaagaatctttttgctgatatccatgtgactcattgctcactttattcagttctctcttccaagacgttccctgactgttttgtcttaaaaagcacctcatttatctaatgccttttatttatttttcatagtaattaccaccacctgacattttcatattggtttagatgccattatcctgcttgcctccacccccaaccctaacacacacacaagaatgttggccctaagaggggcagctgtttactttctcactcaatctccactatctaaaacagtgtgtagaactcaacaaatatttgttgaatgaataatgaatgaacattttgatatcttatataagcagtataatagtatggtacaggattattatctccatctgactggtgcgttgatatatctcaggtagttccaaatgtgggagaaggcaaaaagagagtattatttactgttacttccccaagtcctacctataattttttacttttttcagaaagaaacatttaaaaggggcttaaaaacagaagccatatttgtgtcttgggtgagggtaagacaagatggtggatcccctcgccattactactgagacccatggcttataaactatcctacttataattttttatttttatgtatttactttttgagacagagtcttgttccatcacctgttgaggctcactgaagcctcgacctcccaagctcaagtgatcctcccacctctgcctctccagtagctgggactacaggtgtgtaccaccacacccagctaatttttaaacttttttttggaatcttactatgttgcccaggctgg

SEQ ID NO: 15460 - DNA, 1032 bp, Homo sapiens
gggctatagaagcagttgatcattcagcttatgttttcttctggttaaattgcatgcttgttgcaaacatctttagatgttaataaaattatttagaaaatggtcgggcgcggtggcacacgcctgtgatcccacactttgggaggccgaggcgggtggatcttttgagctcaggagttcaagaaaatggtaggccacttcatcctggccttcaaagataaacactgtttacaatttggttcaccgcttccagagtttttctctatgcctgtatgtgttttatttatttacttaaaaatttttttaaacaaatgcaattctatgttgttactttctttttcaatttaatgtttcttggatacttttccatataagtacatatatatctttttattgaatacatagagtaaattgtatggatgtggcgggatttattttgtcctttattggtagacatctgggttgtttcatttcattttatgctgcagtgaacttccctgtgtagtgggtgtgtagactgttgcctgttggtaaataactgaagctatggagtcgggtagaatcggttcctctttctcacttattgtcaagtgaccttgggcagcttacttaaccaccttataccttaatttctcttttttcaaattgggagtaataacagtacttaactctttagagttgctgttagattatatagtggctggcatgtaaatattcagtaaatatcggcaattatggtacatatatatttgcattcttacgcagatgtttctataggaaaaaacaagttagaagtggaatttccgtgtcaatagtatgcatacttgcattttgaaattaatatttaccaatgtgatatgaaaaagaaatctcactgttttagtttgcatctccatttattagtaaaatcaggtgtcacaactcgtttattggccttttgtattctattaatcacctttcatgtcccatgaccattttctgttttgtatattttttaaagttgatttattaggtctctttgaatgttattta

SEQ ID NO: 15461 - DNA, 1048 bp, Homo sapiens
ggaagtatagcctatgggatttagtgattgaatatatgtagggagtgaaggactagacaaaattaaataagtctggggtttctagtttgaacactgggtagacagaggacaggtgagtagagataatatgataataaatgttctggaataaagaatgggcttgggagttaagcagacctgggtttgggttccagctttatccctgcgataatttgggctagttacttagtctatttaaactacatctctttgtccacctatacattgaagatgagaggtacctccctattttgctgtgaggattaaatgaggtaacatatgaggattatgtgacctcatttaatcctagacccatgccttgctcatagtgtttgcaatcaatagcattagttgtaataatagtagtaaagatttgtggaggccagagattatgatttctgtatatcttatgtggtaggtgttgtgatttgtgatttgctttttaaaggtctgaagagagcttgattggaaaattttaaacttctgtgttattgggaacttgggcgcattagtttatttggtattaacatggaaggcctctaatgtgagataagattatagtaatgtcaccactccttacagtggagttgtgattcctctaggagttttcagatttggctagtcagtttttaaataaaataattttatcctatgataagctaatgagttttttttttttttaatgcattcccaaaacgaagttaaacactggcttccacaataatgtcaggtttatgccattacatttagggtcttctccatgaacttcaaagcaaataagatagtaacatactcaaactatcatgaatagaaaatagaccaactaatgaaaactctctagaatgtttttatatggatatttaaaatatgaattttgctatcatggagatacatatattattaaatcttgattaactttataacatagggagtgatgtgctagagccatctcttcatggcctgtgaaagattattcttaaacacaatgaccattacaaattaaatgaca

SEQ ID NO: 15462 - DNA, 1033 bp, Homo sapiens
attttcagtgttttatgattttaggcagcatttttgttgcaggtatccattgcatttagcttgatttctcaaagtgtatatttgttgagtcagaaggatagagtgacttttcaaaagagaggaaaacatcattaaagagagaatagtacattgtgaatgcaaatccttagagagctcatagtggctcctgagaataagtgaagtaggtgatttgatgatgtgatgcttcctagggaatatggctcagaggtctgcacttcataatatctgagatctggaattagtctatctgttaagccaggtgtatagacatggcatttgccaaataagaaatgactttaaaaatatgaggttgttccaaaatagttccccttgttctcaagcagtggctctactgatttattatctggcttcatggagaggagagagtttattatcaagaaacataatgaccttctagctcagtgcactttatttacctgaagtaatactgagatgggggaaaatgtctttggactcttggtttatctcttaattccaaaaaagaggagaaaatagtccttactcatttggatatcattatctcacaaattatagcttattaaggtaagaatgcccatatatggtgtaaactcataattttttttccaaatgaaaagatgactccagaagattaaaacaatgtgacttggaaagtaattagggagggtaaagagggataaaatttttccacttccctctgacaaaataatcaaataaaaacttgggagaatttaacctttgccgtttttatacttgcgtttactcatcatttttaaaagaaaaccatcaactatttccattaagcattacatgtaaattcaaactctctaagatagagtaacaatgtaattgaccacatgagttgtatttttgagtcatatgctgtatacaaaattgcaatttaaaataattgcatggaggggaaaacaaaacaggtgacttaagacatgtggaccttccatcctatgaagagaactgtggagaaacaaat

SEQ ID NO: 15463 - DNA, 1034 bp, Homo sapiens
tttttccatgagtatatgtaacctcctaaattacatgaattctattgaataagcttttatactgtgactgtggggtgtcacactttatgccagatgacagcaatgaataaaacacagaagatctatctatctatctatctatctatctatctatctatctatctatctgtctatctatctatctatcacatttgaaatataatttggtgaatgcagtgataaagtagaatttgggtacagaatagggaaatcatatttcttggattcagcattcatttggaaacttgcgaagtattgccagataagatagccggagtttcttcccactaaacattttgtttgagtcccaaataattttttaaacttgtgattctgtggtatctctgccttgctaaacacaactttccactcttggaaagtaataggttttagtgtttctctgtttactgagcaagtgcttcacataggtgagttactctgctgttgctccccataattgctttttgatgtgttatgttatactgttggccaataaagtgcttgatcaatatgcactacatcccagataatcctgttattttcattggctctactatgctttgtttggcatgtggctttccaagcacttaagattgggaacatctcaaacgtaacatcagaactgaatgcctactgtttttttattttttgattatggccattttggcaggagtaaagtgatatcacattgtggttttgattggcatttccctggtcattagtgatgttgagtattttctcatgtttgttggccatttgtatatcttcttttgagaattgtctcttcttgtccttagccaacttttcgataggattgtttgtttttttgctgattttttttgagtttgttgtcgattctgggtattagtcccttgtcaaatatatatatagtgaagattttctcccactctgtgggttgtctgtttactctgctgactgttccttttgccatgcaaaagctctttaggttaattaagtcccagctatttatcttt

SEQ ID NO: 15464 - DNA, 1061 bp, Homo sapiens
gaatggcacaaattctgttgtcaacccctccaatagagctacatagtagccatatttaacacaactccaaatattgcaaagatgttttaaatgtgttcataactgatgaaagaaatttaaaatagttcatataaaagtataggtaaaatttttaataagtgaatgggggtttatttttagtgtgacatgaaaagttaaccacatgaaatcttttaccagcaaagaaaattacattgtcatcacgtgtgatgaatgttgataggacagatatgtatcattcacaaaggaaatcaggatagctatatataaatgtatgtgcagataacatattaaatccatatcctagattgtttgggtgttttcagccctcataatatgaagtgaatctctctttcacaataaataatatttctgcaagttcaggatttgtttatttctgggatggttggtgggtgtgcgtgtgcgtgtgtgtgtgtgtgtgtgtgtgtgtgagagagagagagagagagagataaatgaagtaaagttgcctgcaaatagtagattcagaacttcctccccaaaatatgcattcccctcttctggtaaatgtctgaagtctaccttgcagcttgttttatttcttttgtttaaaactttgctaatgtgttcagatgtagaattcatttgaataggatatgttttcagcagtttgcagtctaatgaacaacggggcttttggggtcacacagagctggagttgacccttgccagtagctggctgagtggccacagggaaattatttataccctaaggtctcctcaattatctctacaggaaaataaggtaatggtagttacttcagagttggtatgaaaaagaaatgagaaaactataacaatgatcacaatggctggtgtttggaaggtgcttaaaactcaatgtgaacggctttctgagattcttctctaacttcggttttcaatacccgcaataagggaaagaaaatatggtatcagtaggtctccagaggatgctaaagtgttggagaggtgaggaaggggaaatattaggtcctgct

SEQ ID NO: 15465 - DNA, 1070 bp, Homo sapiens
tttaaaaaggactaataggccgggtgcggtgattcacacttgtaatcccagcactttgggaggccgaggtgggtggatcacctggggtcaggagttcaagagcagcctggccaacatggtgaaccctgtctctactaaaaatacaaaaattagccaggtgtggtggtgggcacctgtaatcccagccactcgggaggctgaggcagagaatcgcttgaacctgggaggcagaggttgcagtgagccgaaattgggccactgcactccagcctaggcgacagagcgagcctccgtctcaaaaaaaaaaaaaagactaatacaatttaagtgatcttagaaatgctttattattcacccagtttaccagaatattctactcttcactatatatgagactgttagatcttttgtaggcatatgagttgaatcccttaaagttctttatttagtaacaagatcataccaacagtggtgctctaaaatcattgctgtccggtagaacatacgtgagtgatggagatgttttatatttgtgctgtccaataggacagttgctaaccacatttggtttttgagcacttgatatgaggctagtaagaatgaggaagtaaatttttacttttgtttaattttaattaattttaatttaaatagtcacatatgattagtgactacctagtatatagctcagttttaactgattcatgtcatatttctaatgtttttggacaaatgtatcttgtgaacattttatatatgagctcatacaaatatggaaaatgcatttatagtccattatctaaaaaattgttctatttttatgttatgctttcttaggtgcaaactttagaaattagtgagatttcagttgtcccttttgtgtgtgacaacttctaaaagtagcctaaggaaccatttggcccattactttgtgcttaaagcagacccagtaattcacaggagaagcatatagaagagcgtttggaaactcaagacaggcctcaagcaaaaggtgtctgagataaagaagtacgtgctccaaaactgtactggcaggtaagtaatgagga

SEQ ID NO: 15466 - DNA, 1049 bp, Homo sapiens
aaaatagtagtgacaaggatatcaggattgagaaaaacaagcaaatgaaatggaaatgaaataaataaaatgagctaaaaacaaaattatgaacatttaagacaaaatagaatggatatatgtaattggtgggtgtttgtttgtttgagacaggatttcgctctgctgcccaggctggagtgcagtagtagaatctcagctcactgcaacttccacctcctgggctcaagcaatccttccaccttggcctcccaagtagctgggactacaggggcccgccatcgcgcctggctaatttttgtatttcttgtagagacgtagttttgccatgttgcccaggctggtctcgaactcctgagctcaagcaaaccacctgcctctgcctctcaagatgctgggattacaggcatgagccactatgcccattgtaattggtgtttttgaagaagagataaaaataatagaatgaaaaaaatttatttttttaaattgcagaaataagagactttatataatgaacaggcacaataagttgcaggcaaaattgacactgaatatttaacaatgacatatctattactaaagttaccagatttcaaatatatagcatgaatctttgttagtcaagcagaaaaagtgttacatatgagcataaacacgtcagtttgtcctcatagttctctatcacaatgtttgtccatagaagaatttaagcagtgcttataaagtcttgagggaaaatcttatattcaactgaaaagttgttcatgggtaaaggcatacaacatatatgttttgccctgaacatgcaaaaactcctagactttagtttctctgatcacttcttaaacaactatagtacaaatgtcataaagcattagcagagaacctatattcaaagtactgacaatgagcatgatatttacaactgtagaactaaaatataaataaatgtacggattgagatttcaaagaaacatatacatatttcaaatcttgataatgtaggaatgttataagtataaaagttgaaagaagaaatgctagag

SEQ ID NO: 15467 - DNA, 1046 bp, Homo sapiens
ttggcctctctagcacagttgggacaacttttatggatgatatcctgaaatatgttttccaagttgcttgctttctctttctctctctctgggatgccaggaagtcatagctttggtctctttacataatctcatatttcttagaggttttgttcattcattgttttttcttcacttttgtctcacagttattttggagagagtcttcgagctctgagattctttcctcagcttggtcaattctgctgttattcttgtgattgtattctgaaatttttgaaatgagtttttagctctatgaggtatgttttgttctttctttaaatggccattttcatctttcatcttctgtatcattttatcaaatttcttagaatccttggattgggttttgacttcctcctgaatctcagtgatcttcattcttatccatattctgaattctatttctgtcatttcagccatttcatactggctaagaactattcctggggaactaatgtggtcgtttggaggtaagaaggcactctggctttttgaattgccagagttattgcactggttctttctcatctttgtgggctgatgttccttcagtctttgaagttgctgtcctttggatttttaaaaaatttcatcctctttcatgtccttgggggtttgattgtagttttgtttctggaagattttagtgggccaaggctcagctaaggactcctgggctgcagtctgtatctctggagggctggtttcaggctcccagctttttttctctggcccctagaagttaggaaccttctgcactggggttgttgtggtgtttctggacctctggtaacaacattctgatgtgtggtgtcagccaaggtgcttcactgtgtggtggcaacaggatccatgatggtttgtgtgttccagcagcagcggcagcatggtgaggtgcacactcatcagctgaggctgggcactggcaggcacagttgtgccagcctccataaatatgtttgcattggtggcagtggcagtgtggcacttgtggtaggggg

SEQ ID NO: 15468 - DNA, 1044 bp, Homo sapiens
tatgaacctcaattctttcacgtgtaaaatgggaccaataataaactcctaccttacataggacacggtgaagatttaatgagataagatatttaaagtgtttcaaagtatcacagatataacaaataatgtgtgtgtgtgtgtgtgtgtgtgtgtgtgtgtgtgtgtgttttcacttcctttcttgtttctacctagggatccagtctgcttgtcttccttcctttctccccctttcctcttcctctctccttccaacctttctctttccttccctcctactctcctcccctgatttttctttccttccttcctttctctttcttccctcctgctctcctttcttcctccccctactttctccttctttccttcccttcttactcctccactttgtccttccttcctttctccctccttccctccttctctcctttcttcctcctcccactttctctctttctcttttctctcttttggcacctggcagagagcagaccagctcagatctcatatagtaggccaagtaagaatttttttgttggaaatatataaagcaaatgtttcttacttagaagatatatacaaaaaggaattgccactctctttttgatgagaagccaggactaagtcttgagcacacaaccaacaattatgggggaaaaaaatcttgattatctgagtgtcagaagaaagaaagcagaggccaacaggtttgagctgagtctagttatgtgcttagcgctcttcaggatctagttatttttgcttgccaactcatgttcccctggagctccactcttcggtaatgtgaactagggaaaaggcaaggccaggtgtcagtcccggtatcctcccatgctccaggtgtcagtcctggagagtgggaggggcagtagggttgcgccctaggcactgcagggctactgtaaagcactgcactcccatctgccatcgttgtaccagggagctcctctgatctttatagctttaggaaggaacatccttagaaggaggtggtctccttaatttataattcaccaa

SEQ ID NO: 15469 - DNA, 1034 bp, Homo sapiens
atgatttttttccaagtctttttgtggacacatgtctttatttatcttggataaatttccagtagtagaaccactggttcatatgataaatgtacatttaatgtttttttcagaggtagagtcttgctctgttgcccaggctggagtgcagtggcgtgatcatggctcactgcagcctcaaactcgtgaactcaagcaatcctcccgtctcagtcccccaagtagctgagactacaggtgtgtgccaccacatctagctaattatttttattcttattttaagtagagacagtgtctcactttgttggccaggctggaactcctggcttcaagtgatcctcctaccctggcctcccaaaatgctgggattacaggtgtgagtcactgcacgcaacctactcctgtacttcagaaaaatagatgaatttgtttatttaaaggttgtgacctggcataactactcttcagctacatctcagcttaaatgtccagttttacttatattgtaatttaagacatttggaattagaaacatttgatgtgtcttcatcttaaagaattttgacaactttttttatattgctatgatttattcatatttgttgggtatttctatatgtcatcatttatgactattgtataatgttccattatgtgaatatatcccagtttattcatccagttttttttttttttttttttgagatggcgtctcactgtttctcagactggagtgcagtggcatgatctcggctcactgcaacctccacttcctaggttcaagcgattctcctgcctcagcctcccaagtagctgggattacaggtgactgccaccatgcccggctaatttttgtatttttagtagatacgaggttcacggtgttggccaggctgctctcgaactcctaacctcaagtgatccatctgccttggcctcccaaagtgctgggattacagacatgagccaccacgcccggcccatctagtatttcttgaaaggcatttgctttcttagcatgtttttgccattgt

SEQ ID NO: 15470 - DNA, 1002 bp, Homo sapiens
tggaggggttgtacaagttggactcagtaaaaggtgaagtgtaggtatagtgtgtggttgctttaacattggtaatgcaggtggctgacgtgagatggaataaatgaaggtaggtgaaaattcttgggatttgacacgttgtcatctggaagcctattagaaatgtgttgttagggtataccctgtgcctcctgaattggtgtacatttgaacaagagcccctacgcaatccaagtttggaaagtactgttctaccacttgtggataacaattgtacaaatacttgagttctgtatgccagatgcagaattctgtagtgaatgaaaacttctcaattgaatttatatgctgatagagcagcaatacataataatgtgcattatttgaaaaaaagcaggttaaaagaggtatatgtgctagatgttgaggtcagagaagaaagccatacttaaatttggcttatgaacttaatagaggttacagcatagattctgtggggaagagaattcctggatggaatcagagaaatagcaaagttgtggctgaagagtgagaaagctggccagggtctgtagtagccctgtaggttatagttagatattgtgagatgagaatccatttggaaacttacttttgtagaggtggggtattactatgctgtccaggttagtctgaactcttgggatcaactgattctcctgcagcctcccaagtacctgggacaacaggtgtgcactactgtgcccagcaatgaacttaagttcatttcactgaggcagaggtagaaataaagctattgcaatagtctaggcaagtgatatttgcttgcattaggatagatgggagtggttgagatagtcactaagttttttttttttttttttttttggggggcagggtcttgctctatcacccaagctggagtgcagtggcgcactgcagcctcaacctcttgggctcaagctatccttccacttcagccttctgagtagctgggacatg

SEQ ID NO: 15471 - DNA, 1027 bp, Homo sapiens
actgctgagagcaagatgggtcaccagcagctgtactggagccacccgcgaaaattcggccagggttctcgctcttggtgagaaatagtttgtgattttggggaagcgttgccgtggagcgctaggctgcttaaaatctcaagtagaggaggccacgggcggcacgagggagcacgccgactgggagtcgctggtgccgccattacaggcctgtactgtggcttgggagtcccgggatgcgggtagtagccgtctgagtgcggagtcttgtaatttctatgacctgcaaaaccgctgtctcttttcttacagtcgtgtctgttcaaaccggcacggtctgatccggaaatatggcctcaatatgtgccgccagtgtttccgtcagtacgcgaaggatatcggtttcattaaggtaggcgtctgcaggcgtactccatgttgtttgggcagagaaggttgtgggggttattttttccgcgaaagacaaacggacagatcttccctggagtggtaattctgagcattcgaccaagagcttttcctctttttttagttggtagctggtgacagtgttgatggtttgggcaatcaaattaatagaatggagaaggtgaaggacttagtctttcctactcccttttttacctagatagcttagccagttttaggtgccgtgtattgtgtttggtgaaattcactttagagaagccactaaaattgttttacatttgtttcatttatcaatcttgtaagtacctattctcttttttttttttttagagatagggtctccctctgtcgcccaggttgaagtgcagtggcgttgttacggctcactgcagcctcgaactcctcctggtctcaggcgatcctcttgccttggcgtcccgagtagctgggactaaaggctcttgccaccacgcgcggctgtacctagatattttctaaccaaatatatgtattaaccgctgaccccaagtttttttttttttttttttgagtcggagtcgcactcacccaacctgga

SEQ ID NO: 15472 - DNA, 1078 bp, Homo sapiens
taactctgatcagctacaaggaaaggaggaaagagtaaatgaagaaagtcatctaactgaaaaggaatatatagaacattgtaacacccctacaactgattctgattcatctatagcagttaaagcactacaaatagatagctttggtttagttacatgctttcaacaagagtctcttgatgtttctcaaatgatacttggaaaatctcagcaacctgagtcaaaaatgcaatctgaatttataaaagaaaaaagtgctacttgttcaaatgaggaaaaagataacttaaacgagtcagtaataactgaagagaaagaaacagatggagatcacctatcttcattactgaacaaaactacggttcacaatatacctggattcgacagcataaaagaaaccaatatgcaggatggtagtgtgcaggtcattaaagatcatgtgaccaattgtgcattcagttttcagaattctttgctatatgatttggattaattctatataattttggacttttaaatattaaggttaaaaaatacctgtatctaaaattgattctgttaactgttgtcttaaaactaaaggtattaaagtataaaattaaaatttgcaattttttttaaaaaattgcaattttgattctcatgggggaaattggagataatttttttttttttgcctctggagtttaaagtttccttatggagataagttttgtgattcctgtaatagatgtgtatgttttctatttgagagttaaaacatttgagagttaaaacatttagttttaatacaacctatgtatatatacttctgtgttaaattttgctttgtcattaataaaatttaaaaatattcactaattgtgtttgtcacacaaagtaattctcaagaatgcatttaactggaattataagtacatgtgtggggggtagaatttcaaaactgtttctcagtctcactaagtaggacatatttaagcttgaaatagagcttagaggggaaagaactttactaaccaatattaatctaaacaattacgatacaaattcaccagataaaatgtagtacttttcatca

SEQ ID NO: 15473 - DNA, 1035 bp, Homo sapiens
tattggtagtcaattcagactcttgaataatggatagcagtttaaaaatagatattattactacatatcctttaagaaaggttacaaaggaagaatacaaagattacttatttactgttcgtattgctcattgtaatcataagttcttcctgtgggaataccatcagaggcagccttggttcgcctcttttctgcctacattcactcctttgctggccttctccagtgtcctctggctttaagtatcatctgtgtattgacaccttccacatttatatttccacttcaacctaccttccaaactccagactcaggtatccagttgcctacttatcaccatcccaacctaagtgaactcctgatcttcctccccacgagtgtccctaacctcttctgtagacttctccatgttagttcatgacaccttcatggtctgaacaatgattattccagttgttcaggccaaacactttggggtttctctcacatgttttttcaggaagtcccattaacttcaaattatatccagaatctgctctctctctatacctctacctccacaaccctctaccacagtggtccccaacctttttggcaccagggactgatcttatgggagacagacgccagggggggtgggggtgattttgggatgattcaagcgtattacacttattgtgcactttatttctattattattacattataatatataataaaacaattatacaacttaccataatatagaatcagtaggagccctaagcttgttttcctgaaaccagacggtcccatctggggatgatgggagacagtgacagatcatcagacattagattcttataacgagtgtgcagcctagatcactcacgtgtacagttcacaacaggattcgtgctcctgtgagaatctaatgcccctgctgatctgacaggaggcagaggtcaggatgtaatacaaccgatggggagtggctgtaaatacagatgaagctttgcttgcttgcagcctgctgctcacctcctgctgtgtgg

SEQ ID NO: 15474 - DNA, 1031 bp, Homo sapiens
acaagtgagtaaccctattcttaatggaatgtcatccagaaatacaacctgaaagactaaaattgcagtatcttatctaagcatgataatggtagtactgatagctgataacaattttgttacaagcctttaggaagtaatcagttttaaggagaggctttgattctgatgggaactgaattaaattaagacagagaggcctggcacggtggctcacgcctgtaatcccagcactttgagaggccaaggcaggcagatcacaaggtcaggagattgagaccatgctggctaacgtggtgaaaccctgtctctactaaaaaaatacaaaaaaattagccgggtgtggtggtgagcgcctgtagtctcagctacttgggaggctgaggcagaatagcgtgaacctgggaggcagagcttgcagtgagccgagattgtgccactgcactccagcctgggcgacagagcgagactccatctcaaaaaaaaaaaaaaaaagagagagagaaaattgggattgtcttgaagatgtgtagaaaataaattttcactttctctaagcttttctataggaatctatgccatatggtcgtacataatgttgaaaatgagtacaccatttaagagccaagtactctggttacaaaaccagtgagttcgtatttttccagctaagatgattgcctaattgttttattaacagtacagcaagcccagccttctgtatatcttcttacatgaatatgtacctcttcttgaattttttttttttttttttttgaggcagtcttgctctgttgcccaggctggagtgcagtggcacaatctcagctcactgcaacctccacctcccggattcaagcaattatccggcctcagccttctgagtagctgggattacaagcatgcaccatcacgcctggcttatttttgtatttttagtggtgatggggtttcaccatgttggccaggctggtcttgaactcctgatctcaggtgatccgcctgccttggcctcccaaagtgttgggatt

SEQ ID NO: 15475 - DNA, 1032 bp, Homo sapiens
gtattgcaagcgtttttcacactttggggattgctgtttttcactttttaatagtcttttttgatgagtagcatttttaaattctaattgagtctgatgtatcagtcttttacggtgtttgtgtcctgtttagggacacaaatttacaattttcaaaatgtgttatttcagtcccagttaacacagttaatcaagacaaaaatctctagggtggggcctagatgtttatagtttaaaacccctagagtgatttggggatgtaatcagggtaaagaatcattggtttatttaataaaatacagagtcttgaaagcctctagaataagtgcctagcctagctttgctgctttatttcctgttcttcctccatgtgtaccctgacccaaaccaaatgtgatgacttgctattactgttctcttcctttttagacttgcttttccaatactgttttactttatttcttcctcacagttctttatgttttgttaatgtattcttacttctctgtgtatcttctctccaccctatggtaaattccttgaagatgaggacttcagttatccaactttgtagccttcatattgtttattataatggtgccttattcagtaagcatttttgacagagaatataaagtaacaccatttctttgcaagtatttgttgacatttttttgctgctgaatatttccaaccaaaatcttctgattttgtagagtaaaatgaaaaaaatgaaagaaaaatacaaagaccaggatgaagaagaccgtgaacttatcatgaagttgctgggggtaaataacatctaaaaacattttttcttttgcttttcaaatgggcatctagcccactgcctagcgtatgacaggcattcaatacattcttgttaaaatattcacagtattgaaaatacaacactgactgatgtttcctctatgaattaaagtctgcaggttcaaacaaagaagaaaaagggaagaaggggaagaaaggaaaaacaaaggacgaacctgtgaagaaacagccccagaa

SEQ ID NO: 15476 - DNA, 1388 bp, Homo sapiens
acttaaaagctaaggattttggactataccctttaaagtgatacgaagagaatgtgacataggcaaatgattaaggaagattaatatagaagttaatggccggatgtggtggctcacgcctataatcccagcactttgggaggccaaggcgaatagatcacctgaggtcagaagtttgagaccagcctgaccaacatggtgaaaccccatatctactaaaaatacaaagttaactgggtgtggtggcacaaactccgttttaaaaaaaaaaaattcagagtatgtagactctggaggaagtctgggtgggatgtaatgaggacctgaactaagacgttggcattgggaacagaaagaagaataccacagtaataaaatttacccttccttcttaacctgtgtatttttaatccatttagtcaaccaaccggtcaacagatgttttattgaatgcctaagacctgccaatgctatgttggtacaaagactacaaatcccagtgcctggccatcaaggtgatcaggggcaaaatgtgcctagtgagtaaggatgagtcaggggtgacaatatgttgagcttggatgatggaaagaaagataaatccatgagagatgaaaaacttgcatctttttcccacatgatgattttaagcatctttgtattttctaacttggtgattatcaagtgaagcagaagccatgaccatttatatactgtatatgtgccttccccatggaacttttttagggcactaagaatttcaaattctaagaatgaaatgttttcatgtcttttttattcagggaaatgaaaaagaaaaaacttccaagtgactcaggagatttagaagcgttagagggaaaggataaagaaaaagaaagtactgtacacattgaaactcatcagaacacaagcaaaaatgttgcggctgtgcagccaatgaaacgaggacaaaaggtaaacttcaggatgatctatatggttcacagttaatttgtgaggttcctttttaattttttaaagttgaagtgaaatagaaaatgtaggccaaaaaataatcctgtgtgatttcctttgactaaaaattagttgagtagatacagcatttagggaacacagagatcactattagaagttctttagactttcaagatcatctgcacagaagctctcattttatctggaagagtaataggagattatggcttgccaaagtcacccagctagttaagtagcagagctgatatttattgagaatttagctcagtaatttttagattttggttagagttcttagatattttgctaaaggtggatggtgaagaaagaagtacttatgatagaacatactctttccacactgcccctgcccccacctccccaccccc

SEQ ID NO: 15477 - DNA, 1059 bp, Homo sapiens
tgtcagatgagtggtggcatctcattttacaggtgaggcagtagaccctgttactactattagacagtgttccttttgcagaagaatgagcacctgctatgtgggcgttatataatacgtatttaagtttttatgtgcaaattataataaaagcagcaaaagttatgcaactaattttgctgtcttggtttttggaaatacccaactaaggcagagttgtggttttcattgttgaaagggtagcaatgtccaagaaatttattgtggtaaaggatcttggagatcatttagttcaacctattcatgatacaggttattcttttgtctaagagtaccctttgggaatgatcagacacttttctgttgattttttggagaaatatgggagaaacagtggaatatttttatgacatttttaggaaatcacctggcttggttggtagtcccacactgactttccttatgataattctacagatggaggtgacacgagcagtgatgaggataaagaagaacatgaaactcctgtggaagtagaactcatgactcaggttgaccaagaggatatcactcttcagagtggcagagatgaactaaatgaggagctcattcaggaagaaagctctgaagacgaaggagaatatgaagaggttagaaaagatcaggattctgttggtgaaatgaaggatgaaggggaagagacattaaattatcctgatactaccattgacttgtctcaccttcaaccccaaaggtaattaaaaaataaaattttacatattattgtgtaagctgagaatgatgatgaggtaatccttacaaagataataccaagattgacatcagtacttttacactccattgtcttaatactttttcaacatttgattgggtctctctgcaaagaaattcccaggaccagggtagaaaaatacagtgcatatagagtggccaaactagatccaaatagaaacaagtaaatggttataaatgctaaaaacataacaaaggcaattccatcaaagaaatgtgttttagtctatataatgttttgcagat

SEQ ID NO: 15478 - DNA, 1256 bp, Homo sapiens
ctcgggaggctgaggcaggagaatcgcttgaacccaggagctgagacggtgccattgcactccagcctgggcgacagggcgagactccatctcaaaaaaaaaaagcctcaatacatttaaaactgttgaaattagacaaagtaagttttctgactataatggggtgaaattagaaaccaggagtagagaaaatgttttaaattcgtaagtatgtggaaattaaataccacagttataaataagcaatggaacaaagaggaaatcacaaaagatgccacaaaacactttgagatgaacgaaatgaaaatacagtgtgtcaaaacttatgagatgcaagaagagcagcccttagggggtaatttatagctataaatgcctatatttaaaaagaagaaagatctcaaatcagtaacctaactttgcaccttaagaactagaaaaacaacccaaagcaaggagaaggaagaaaatagtaaatattagagtagaaatgaacaaaacagagaataggaaaaaaatagagaaaatgaacaaaacccaagttggttctttgaaaagataaacaaaattgataaacccttggctagactgaccaagaaaatagaggactcaaatccctaaaatcaggaatgaaatagggaacattacttccgactttacagatattgaaaggattataagggaataccatgaacaattatataccaacagattatgtaacctagatgaaatggacaaattcctagaaagatataaatactaaaactgactcaagaagaaatagagaattgaaataaacctgtaagtacagagattggattaataataaagaaaaacattaaaaaaatactcatcaaagaaaaccctaggccagatggcttcactggtgaattataaagaaggttgaatgccagttcttcacaaactcttccaaaaaataggatcagtgggaacacttcctaacccattctacaaggccagtattacaaaaccaaagataacacaagaaaactacagaccaataccggttataaatatagacaaaaatctttgacaaaatattagcaaactgaatctagcagcatattaaaatgactatatacgatgacaaagcgtaatttatctcaggaatgaaagcttggttcagtatatggaaattaatgtaatataatctactaataaaggacaaaaaacacacatggattatctcaacttatgaagaaaaaccatttgacaaaattcaacatttgtttgtg

SEQ ID NO: 15479 - DNA, 1048 bp, Homo sapiens
gtggtttgttttttaaggaaatagacaaactgaaaggagagctcatagaaatgaacctacaaatagttgacagagccattcaggtagttcgaagtgctttagctaaccagatagattggacagaaattgggttaattgtgaaagaagcccaggctcaaggagaccctgttgcaagtgcaatcaaagaattaaaactacaaacaaaccatgttacaatgctgctaaggtaagtttgactcttagtcaagcagttaatgcttgtctttattttgttattttaattgttcactgtattaaacattttttcttcatattttgaaattctcaaagaaagggaaaaaactaatttagattaaaataaataatgaaacttccagtactgtaaaccatttataattttattgaagaagaaaattgaaaataaaagtgatgtcattgacgttagtgaaatgctattgaatatttttaatagaaatccatacttgttatcagaggaggaagatgatgatgttgatggtgacgtcaatgttgagaaaaatgaaactgaaccaccaaaaggaaaaaagaaaaaacaaaagaataaacagctgcagaagcctcagaaaaataagcccttacttgtagatgttgatctcagcttgtcagcatatgccaatgccaaaaagtaagtcatttaactttacattttaggccaagtgttatctgcaataaattaaggaattaaggacattttaaaaaattttaaatttcacttgtacatgcatactttttttgggtgaaaatacttttttaaatttagttttgttaattatacagtttgttctgatttgttctgtataatttgagaatttgtcaagttagaactaagtagaaaactgaagaataaatattatacttaaaatttaagagaaatatgtttttctaggtattatgatcacaagagatatgctgctaagaaaacacaaaagactgttgaagctgctgagaaggtactgagtatttcttagagtgaatgttagttgtttgtgcctgcgtaatttaatggaca

SEQ ID NO: 15480 - DNA, 1053 bp, Homo sapiens
taaaatgactctgatgtttatatggagcaaaagcatgtgaaaatgttcaggataactctggaaaatactagtaatgatttattactgtctgtgtaacccttcacagattaaaatatgaagctatagtaattaaaactgtaagtttttggagaaggaatagcataaagattccaaaaataatttgaaataatatgggaatttagtttatgaacaaagttcctttcaggtcatggagggaaaggtggatgattcaataaaagctacttggacaacaggctgttcaaaatgaaaccatatatccacatatactggttataaacatgaaatcactatctctaattttcttgaacgcaacattattttgtaagcactttcctgtttttctacatagttgtttagccacggttaattgacacttgattggcactccttttttcctttttttcccccaccattagatattgaaaaagtacttgtttctctgcagaaagcagaagactatatgaaaacaacatccaacttcagtgggaaggtagcaccatgtatacttactatatattgttgtgatttatttgggttttcagaaattaaacgttcattaaaggatcattatatatacattttattttaatttggaaaattgttatctgtaatatgcttattccaggatagtttttttgttttgttttttgagacagtcttgctctgttacccaggctggagtgcagtggcatgatcttggctcattgcaacctctgcttccctggttgaagtgattctcctgtctcagcctcccgagtagctgggactacaggcacgtgccaccatgcctggacagtttttatattttcagtagagatgaggtttcaccgtgttggccaggctggtctcgaactcctgacctcaagtgatccgcctgccttggcctcccaaagtgctgggattatagacatgggccactgcacccggcccaggatagtgttttaaaagtttttgttggtttataagtttttttctgttccctatcttttatagaaagtacaatgtcaggtt

SEQ ID NO: 15481 - DNA, 1047 bp, Homo sapiens
tgatgaaaagtagattatccctatatcttggctattgtgaataatgctgcaatgaacatgaacatatatcttcaggatagtgatgttgttgctagatcacatggtaattctattcttaattttgtgaggagcctttatactgttttgcacaatggctctactaatttacattcccatcaacagcatacaaaagttccctgttctccaccttctccccaatgctttcatattttgggccattctgtatggtttactgtaccgtatgacagtaatgctgtgcagtatgtgctatagccatttttgcatctactggtaccagttctgaaatagcagcggcgccctttctgtttagagtcgccttctggtggtaggaattctggttgctaccatgtgtagcctgcaagcctctagcagctcttttgcagcgacgccgagcgccgggcgcggtggcgcgtgcctgtagtcccagctactcgggaggctgaggctggaggatcccttgagttcaggagttctgggctgtagtgcgctatgccgatcgggtgtccgcactgagttcggcatcaatatggtgacctcccgggagcgggggaccaccaggttgcctaaggaggggtgaaccggcccaggtcggaaacggagcaggtcaaaactcccgtgctgatcagtagtgggattgcgcctgtgaatagccactgcactccagcctgggcaacatagtgagaccctgcctcttttgagttctcaccttataaagtagcctttcttcccatgcatctatcctaagacaaaagaaatgcagaatttacattcttacaggactattttcctcactacactgtgaatcccccctcccaccccacccccattgggaatcttcttgtttttatttttatcttatttcaccattatctagctaaacacttgcacattcatgctgccaagtgtttatggagcaccgattgtacaccaggtactgcggtgagtctcaggggtaccaagaccgaggttcgatgagaatcctgtaatcaattgcagaatgctcct

SEQ ID NO: 15482 - DNA, 1118 bp, Homo sapiens
attgcgtttttctctcgctgcgtgtccggacgccacactatgagcattaagcgcatactgaccaatttctgttaagcaggaacgtggtgttctgatcaaaacacagggagccgcggccgcaaccgcgccgataagcttccggggtcccaaccctgtaaggcagaacggctgcccagctcggatgacgccacactaacgtagcctccagaccgcccagtgtgggtgtgtccaagctcacgtcgcccggcgtggcccccccgctccccaatgacgtaactgccctgcagcttctagtagcttttcgcagcgtctccgaccgccgggcgcggtggcgcgtgcctgtagtcccagctactcgggaggctgaggtgggaggatcgcttgagcccaggagttctgggctgtagtgcgctatgccgatcgggtgtccgcactaagttcggcatcaatatggtgacctcccgggagcgggggaccaccaggttgcctaaggaggggtgaaccggcccaggtcggaaacggagcaggtcaaaactcccgtgctgatcagtagtgggatcgcgcctgtgaatagccactgcactccagcctgagcaacatagcgagaccccgtctcttttgcccccctccctcattaagggtacctttgtaagtaaatagtgtctttgaagttaagaagtttgcctcctttccggttcatacgtattaagaaacatactaatgtgcacatttaaagacgagtcctctcttcctctaaaggaaaaaatatatagagaaagatgttactgaggtttatagttggctttctctctccactcttatatttatccactgttttacgtttccttcagcgcgaaagctcaccagttgacgggatgcttggggatttgcaaccgcctcatcgctgccccctaccggcgcatattcaaaacgtctctgcgaaaagctgttattaccttcggagccaacaggggctgctcgtttacccacagacagtcggaaaaaaatggccgccggatcacagagagcaaaaagtacgttctcttaaagaatttccaagttcttcccgcggccgttcaggatgctgcttgcagttaccaacattattcccctgcact

SEQ ID NO: 15483 - DNA, 1048 bp, Homo sapiens
agtataggatgcatgtaaacattgctgcccagtcacggtgggaatggcagctgggatgggaggaagttgagaacattgttacacaacatgtactgttatttaaacaaataacaatcttagaaaaataaagaagatacggggaagaaaatttttgttcactgttcatttttacagtttgaaagcaactgccacgagcattcgaaggccaatagggacagagcaaatcctcgtttctaaatatgggagcctgggtttgctggctggagctccaggattaacattccaccgccctggacccttactcaattcctccttccacggttctttgctaaacctgagaccagatgggtagcaggccattaaagtacagcagaaagtcatttttctgaagtctgagacttgatctatctgcataacaatattttcagagtttatatttattaactctaaaagagcaatgtgactttaaaatatgtttgtagcagttgtttcttgcctaaataatctttcactgtgtaatgagtgcgtgtgtgggatgcaggacttaactaattcctcaggctaactgaccatgtcttttactaacagacaagaatgacaaaaccttggattgtgtctgtttctccatcagccagtgtaaagtggcacataggctttacttcagaaggggtgtgcaatcttccctgggccacactggaaggagaagaattgcctttgggccatgcgtaaaatacactagtgatagctgatgagtttttaaaaaattgcaaaaaaatcttataatgttttaagagggtttacgaatttgtgttagtccacgttcaaagatgtcctgggccatatgcggcccatgagcagtgggctggacaaacttgctttctgcttctgcgttatattaaacttgcaaggcctttctgtttgcaattaatggaaaatattgtcatgaatactcaataggtggtcttcatttttagaaacctttatacattacctataatacagtaacttattttgttgaattaattcacattttttaattttcacaggt

SEQ ID NO: 15484 - DNA, 1032 bp, Homo sapiens
gaatttaaaagggaaatagtgctaagacacttaaaatgaaattaacagtggttctctacctcaagtctccccactccttttcttgttctccaaggacacttccacatttctaaatgatgtttttgtagtctctcttgagtcattaattttagacaatgtttactgatctcctcttatggtggatgagaatttcatgtctaccctgcctatacttaaccacatttggggcaaatattattcactgctatgcttcctttcttgtatagctctgtttcctggagttcataattgcctcattaatgtttagatttgtttgtttgtttaggtttgtttgtatgtttgtttagcacctttccatgccctttcatagcagttttccataaagtcaggcaaatcagggaacctagcagggttttcctttttcttttcttttcgtttccctttccctttcccttctttctttcctagaatcttccttcctggtgcctttttgtcccccgttccagtttggactggttgatattcaggtattgaccctgctgtcatcctagaactttctttcattgtcatcctagaaattccctttgcctccctcctgtgttggatccttgtttttggattcctcatcttctttcttgatatgctccctgattttaataggagtagctcctttagtagctacgtgagaaaagataatacatatgacttaaactttttaagttattgcatatatggaaacctattatacctttttttgtttattttgtggaagcctattatacatttaattgttaatagtttagctggaaatagaatgtaaaaaataatttgactcagaattttgaactcattttcctccacggtcttctgcctttcataattcctgctgaaaagtctaataccattcatttacttactcagtacataatttttaaatgcctgataatgtgcaggcactattctagatgtgagagtgatagcagtgaatgaaatagacaaatatctttctctcaatgatcctacagtttcaat

SEQ ID NO: 15485 - DNA, 1024 bp, Homo sapiens
aggttgggccaggactggtggctcatacctgtaatcccagcactttgggaggcagaggcagaaggatagcttgagcaggtgttcaagaccagcctgggagacatagcgagaccctgtctctacagaaattttaaaaattagctgggtgtggtggcattcgcctgtggtctcagctacttgagaggctgagagtggaggatcattagaacccaggagctcaaggccacagtgagtgagatcctgtttcaaaaaaaaaaaaaaaaaagaaagaaaaagggttggtttgagagggcagtaggtatatataaaattatagctgtttttattaagtatatataaaattaacttagagttgataatatttgttgctgctttttctattactagaaagttgggggaagaatcaaacaatgcagttttgatttttctttctgttttttcttagcaattgaaagcatgtagtgaagaacaagaagacagagaatgtttgaaccaagctattactgctctcatgaatctccaaggtagcatggaccgaatttacaagcagtattcacctagacgtcgacctgggtaattccaaagtgttgaaaacgtgaatgcctctgcttacttcgctgtctctgatgcctggttttcaaagaagtgtgatttattgtgatagttacattattgaaagttgtgcttgtcatacttttatatacttttatgttggtcttttactctcttttttccttttcctttcctttttttttttttgagaaggagtctctcttgcccaggctggagtgcagtggtgtaatctcagctcactgcaacctgcagccttagcctcctgcgttccaatgattctcctgccttcgcctcccaagtaactggaactacaggagcccaccaccatgcccagctaatttttgtatttttagtagagacggggttttaccgcgtcggccagactggtctcaaactcctgacctcagcctcccaaagtgctcggattacaggtgtgagccgctgcgcccag

SEQ ID NO: 15486 - DNA, 1030 bp, Homo sapiens
gctggaatatagtggcacaatcatagctcactgtaacctcgaactcctgggatcaagtgataataatctgtaccatattggtagaaaatatattcttttaaacctaatgctttttctctttttaaaaaaataggagcaagcatttgatccttatgaaacattatcacaggacattctttcaccagagtttcatgaacatttcaataaattgatggccagacctgcagttgctctacactttcaggtaaacttaaattgaaggttttttttttttttttttttaataaagcaaataaatatctcactattttatccttcaaatatttgtaattctggaatcctcgtaatccttcaaatcttgttcattctaaacctgttttggattatcttctgttttctctctggagttctgtctgttcttattgtagaaatcttttatagtacaacatcatgagtactgaatgaccagaagaatttggcacatactagatctggggtataaagatgaatttggctgggtgcagtgactcatgcctagaatcccagcattttgggaggccaagacaggtggatcacttgaggtcaggagtttgagaccagcctggccaacatggtgaaaccctgtctcgactaaaattgcacaagttagctgggcgtggtggtgagctcctgtaatcccagctactcaggaggctaaggcaggagaatcacttgacccggaaggcggaggttgcagtgagccgagatcgcgccactgcactccagcttgggtggaatagtgagactctgtctcaaaaaataaatagaaaaataaataaaaaataaagatgaatctggagtgtgatttcaggattatgttccctataggaggaagatttggagaaatcttaaaaagttgagataacctcaacctcctatgtactcatactgatttttctatgaggcctacaatttaaaggagataaatactgtattgagggagagtatgcaagttagttggttcaggaatacacttagataaaatgaaaat

SEQ ID NO: 15487 - DNA, 1103 bp, Homo sapiens
taaatttttttatgtgtaaaacataaactgtttgctttagatagatagcagccaacctttttaaaaaactcatttctgtgttagtatataatacaaaatgaggttgagtcatttatattttgggtaaaaagtggagcattttagattttaacttcagagtgtttgtgaggaactcttgatgtaccagcaagtatatttttggtgtttcatgttacgtagcttaactcttttatccatacatatatgtgtatatcaaagtccttcccttgatcctctcagcattagcactgtttggggagttgcctttactgttggcagaattccactttccctgaggccatttggaaatctacctagtagcctgtgggataaccttaactcttagaactttcttcaaaggatggtggtgagaatggggtatactgccaggccctggcctacgggagtttgtagggcctacttttggaggcaatccaaccctgatggctgtacctatgagctatccctgtaaacacaggagacatggtgtctatattgtttaaggactggctctgccctcctgggcccttaatctgtgtctagacttcttggtcagaggtttcctcatctttctgcgcatacactattatctaaagatcttgtaaacatttttgagttgtaatcgtaaagtcagtttctaagcttttctaacacactcaaagggagtttttgaaatctcttcatcagggcttaaggtagaaggacagggtgaaatggttgggaaagcaaaagctgcctcgagatgttttcaaatagtttgtactcattaaatagcttaagaatggaaataaaccctgaagccctgaagggaagaacagtgttgataccaaccaactctacttttctggcctcaaatcctagaaagtattgtgggtttgttgttgttgttgatgttgttaattgcttgtattttctgcttatgggaaggatctcacattaaagttatcttattttaagtttcttttgtccctgggataaaatgagaaaatttaccttttagatatggcaagagatggcaggtcttgggttgctcaggaagcccaattttgaatattaggaaagac

SEQ ID NO: 15488 - DNA, 1028 bp, Homo sapiens
aaaccttttaatttttatttgctcatgaaaagtctttcaaatgtaagatgcatatcaaaaaaaaaaagtacatctgagctgctggccccattatagatttggtcatgaaaataatttaattgtagagtttgaaaaacaggattactggtatcctaatggtactgaaatttggagaattggtctatctgattgttgcctgttgtgtatccttgttaaggctttaaagagaaaaaatcggaacaggaacccatgattttttatattatgcattactgaaaaaaacaaaacttttcagatgttgtaaaagttatggatgagtctggatattgttctctgtacctgatgaggtgaccatcacaggtccttggaatgaggtcagtgagatatgtgtgcataggtaatgaaattatatgtattacacatatttttgtgtcttataaatgaagaaactttactttcccagggtcacacagctcccaaagagttgcccacctcaagatctgactcagaactggtattttttctgtttggttcaaccaaaggttttttgattactatgtgccacacactatgttaggcactgtagatagataagaagatgaataaggcatggctgtcaacctgaaggaggttatagtgtaaaagaagatatagtgataagtattctgatagagctggtactctctcttataccaatgttaagggaatgcttttagcttagtacaattgtttaagaaagcctcagagacaaacccccacttgaaagatgaatgagtaaaataacttacaaaagaggcatattctgcttctctctgaggcctccacagaagtgatatatactttatatgattccaagttgtaatcattagtgtttcatatatttagggatggcaatatatagtagaacatgtagtttggttattttctaaagatgttttgaataaagtccttccttccctgccaaccttaccactgctataggaatattgggtaaaatgcccattgtacggggtcacttgttttttttc

SEQ ID NO: 15489 - DNA, 1079 bp, Homo sapiens
actttatctttcatcgctgatgatacattcacctctatccatgctccttacctttttttttttgaagcttatagtagctgttgaacaagaagaaattcccagacttcaggccctatatgagaaaggcctccagaatggtgtcccgggcctgaggctgatccagcaggaggatataaaaaagaaggagccatattgtagggtaagtgattaacaaagggatgtttttatttagggcttagtcctgagacatggaggctgagggtgagtgtataggaggcaggaataatataaaatcagttagataatcctgtcacagaagtagtgaagtgacagacacaagagggcattgtcacaaactctggacacctgatttctttctctgtgagaaaataccaggtctgaccaacatgaagacaagaggaggcctgagaccacatggcatgtttggaaaacactgagcagtgaggtgtggttgggagcattgggtatgtagggaaatataagagatgagactgaaaaggcagggttaggcccacataaagggtttggcattcatgttaataacattgaagtttatccagtaggcacggggagccattgaacatttttggaggagggcagctgtagtgtctgatctatacgataggcggataaggctggcatgagtttgatcctcctgcctcgacctcccaaagtgctgggattgcagcatttcactttcttaatattgtcttcagattaacagaaattcttaatgttatcaatttatgcatatgtttgtttttttatggttagtgttttttgtgctctagttaaattttctggatgcattcaaagacttggtaagaaaaataaaataaaatagaaaaaaaaagaaatctttgcctagcccagggtctagaagatattctatgtgtttttctaaaagttttattgttttacatttcacatttagatctacagtccatttggaattgatttttatatatggtataagttaggggtcaaggtgtattttttccccaaacagatatccagttgtgtcagcatcacttatcaaaaaaccattattttcccac

SEQ ID NO: 15490 - DNA, 1022 bp, Homo sapiens
cgctgggactacaggctcacgccaccatgcctggctaatttttgtatttttagtagagatgtggtttcactatgttaactaggctggtcttaaactcctgacttcaagtgatctacccacccaaattgctgggattacaggcatgagccaccatgcccagtcattttgttgttgttgttcgttttggtttttttttttgagttaggatctccctccgttgctcaagttggtctcaaactcctgggctcaagtgctcaagtgatcctctcaccttggccacccaaagtgttgaaattacaggtgtgaaccactatgcctggccagaggcatattgtttaatttctgtgtgtttgtatagtttccaaaattcctcttgttattgatttctagtttcattccattgtggtcagagaatatacttgatataatttcatttaaaaaaaattttaaagacctgttttgtggcccaacatattggtctatccttgagaatgatccatgtgctggggagaagaatatatattctgtagctgttggatgaaactctctgtaaatatctgttaggtccatttggtctgtagtgctcagtagtttattctttgtgatgcttttgtgaggagaattgttttcctactttcattttttataattcattgctaatgcatagaatatgattgatttctgtatgttgattttttttaatccagtgacctttctgaactcattttgttctaattgtgtgtgtatgtgtgtgtgtgtgtctatgaattccttaggctttactatatgcaggatcatgtcatctgcaaataagttagttttacttcttttccaatttagatgtcttttaactacttattctgcttgcctgatttccatgggtggaagctccaatactgtgttgaacagaagtagtaaaagtggaccttcttgaattgttcttgatctaatagagaaagcattcaatcttttacccttaagtatgatgttagctgtggattccctttatcagattaaggaag

SEQ ID NO: 15491 - DNA, 1074 bp, Homo sapiens
aaggcgtgagccatcgcacccggcctgcctacgttctaaatggcttgttttgagagttcttttatgtatgagtcctttgggagatatgcagttactagtatttttttccaatttcttagtttttttatcctcttaacagagtctttttgcagagcaaaagttttatgttttgatgaagtccattttatcagttttttttcttttatggatcatgtttttgatgtcaactctaagtcccaagattttgtcctattttttcctaaaagttttaaagtgaatattaggtgatgtaaaaaattttgtgttagtttttttaactataatggtagtgtgtgtttttagagatgccttttagaaataacattgaaatatttacagatgaaataatgtggtgtttaagatttgcatcaaaataatataatacaggaggggatgaaatagagtatagaagaagcaagatttgctgtgagttgataattagtgaagctgggtgatgtatatgtggggcttcattgaactattttgtctaactttgtgtaggtatgaacttttccataaaaagcttaagaaaattatctgttaaaccattcattggtgttaacttgagattaagtgagttgtagagaaagatgtctctttcagcctccgtggttagcttggcctgcaactgtcctccagcattcatctatgactattgttctgttcacctgtctccatagtggatgcttggagatttgtgcttttgtttgtgaaacatatttcaatgattttgtgtcactggataaaacagtgattcttcagatttgagaagagggagtgaagggtggcacatgtagttggaaaaagcatattcagtatgatagttttatgtttgaaaataagaagggtttattgatagttgtagtataatctgcaaagacaatatcttggctgggaatctgtaccaaggtaataattctaagtggaaggtctacctccccaaaagcttttgtgttataattatcaaaaggcagcaaggggccaggcgcagtggctcacgcctgtattcccagcattttgggaggccgaggcggg

SEQ ID NO: 15492 - DNA, 1058 bp, Homo sapiens
tataattagccaggcatggtggctcacgcctgtaatcccagcactttgggaggctggggtgggcggatcacttgaggtcaggagtttgagactagcctggccaacatggtgaaaccctgtctctactaaaaatacagaaattagttgggggtggtggctggtgcctgtaatcccagctactcaggaggctgaggcaggagaattgcttgaacccaggaggctgagattgcagtgagctgagatcgtgccactgcactccagcctgggcaatagagcaactatatatatatgtgtgtgtgtgtgtgtgtgtgtgtgtgcatgtgtgtatatatattatatataatatatgtatatatataattataaattgtatatttacaataagtttacaatttacaataaagctttaaaagaacaacaaaaaattaaatatacctctattgcttgtacgtttttctacttttgatagaaacatggacatattaaatatttcacttttaactctagtataagaaagtcaataatgcaagagtgatgataaagagcaactctcacttggcatcatgatcagggagcaatagggagtgggtgactgcggtgacctaaagcatacaagccttgtctaaagtgaacagctgctctcagccctagctcataagtgccacagagtctacaggcctagacctgctgatccccagcatttgcaagagactcttggtaaccaggattttaaagtaacatttcctggttaagggtagcggccgggcgtggtggctcacacctataatctcagcactttgggaggccgaggtgggcagataacttgaggtcaagagtttgagatcagcctggccaacatggtgaaaccctgtctctactaaaaatacaaaaattagccaggcatggtggtgcacacctgtattcccagctgcttgggaggctgaggcatgagaatcgcttgagccctggaggtggaggttgtggtgagccgagattgtgccactgcactccagcctgggtgacagagcgagactccatctaaaaaaaaaaaaaaaaaa

SEQ ID NO: 15493 - DNA, 1048 bp, Homo sapiens
agtctgttctttaaagctgtaacttttcagagttgtgtgatattcctaacacataatacgtactaggctgggcatggtggtgcgtgcctgtggtcctagctactaaggaaagaggccaaggcaagaggatggcttaagcccagcagttcaaggctatggtgagctatgattaggccactgtattctatctagcctgggtgacagtgagaccctgtcacttataaaataaagatacttaataaatatttgttgagtaggtgaattgagggtatggtaaatgaacattttattttctccatttatggattcagtaaatactcatagagccccagttgtgcctaaaacgatgtttatgcaaagttgtacaccctgtctttcagaagctcagctcttggaagggaggtaagttgaattgccctttggctctcaccccttatagactgggttcccagtgagcagggcatgtgtacccttgcctggtaagaactctttaggtgcttgttgaatggtgaaaataaagtgattggaggcatgtttgagctgaactttgaaatgtttagggaaacgtggaatgagagataaggcatttcaggcagacactctatcctaggaaaaggtgcataagtagaaagcaccctatattgagggaacacaggtaataacccagtgtcttagccaagatgcccagtgggtgctaacaggccagggagagaaggaagggggaagccagggtccggcaggatcaagtcatattctagatttcttctgaaagaagagcacataggaatctaatgattggatgagaaatcaagaacaatttcaaggtttttgactgattgactggaagaatgaggagattgttcactgtgatagagagacccaggtgcaaatgtgggggaaaggagatgaagagctctgttttggacaggttaagtttgagttgtgaacccaaggagacttgtaaagtaggcagttgactacacaagtctggcattcaggggaagtccaggttggagacagagttgggggacataagcatatcgatggt

SEQ ID NO: 15494 - DNA, 1051 bp, Homo sapiens
attatataatgaactagaaagcagagacaaaagtgccaggtaaggtggcattcacttttagagatgctgtgggatatttatttttcttccccataatttctctcccacctgtagacctgggttttcaaggaccattacaatttgatagtataggaatgtaagacaattcaattttgctggcattgttgatttttaaacttctaaggtatttcctattggtatactcagtctattaagagaattaacatttacctgttttcaaactgctaggaagctcacagattctcattacacctcatatgtatttactgctgagcatcatcatgtcccgtttctaaaaagaagcgtttttcttaaagaagtgaaatgatcactttctaattttttttaacattttttagagatgggatcttgctatgttggccaggctggtctcgagttcctggccttaagtgatccttccaccttggcctcctaaagtggtgggattacaggcatgatccatcgagcctggcctgatcacttttcaaatgtttattagttaaccctaaaaataacatgatatcagaggggggaaaggtatttattacaagctgaaagtgtgtttttcgctaatggagagactactttacagaacttctgtgaaggtaaaatccaaatcgcaatgtgaaaggtgacatgtaatgaatatggtggaggtcaactttgtttcagttatggcctctctgttctgacctgtataactactatgtgacaagggaagagctacttgatgagagacagatgaatgaaacttccaggggatttactattattcttgcttctccattttctccagatcactctacaaatcttgtgcccatggataagtgtgtggggtcacttctagataaggaacctaaatggaaagtagcaagctttggataaattggaatgggtgggtaacagggcaacttctctatttaggtttggaatgttcttaaccaacaggatattatctattgagaggagatgcttccaaagccccgcaggggagtgctcccatgggcag

SEQ ID NO: 15495 - DNA, 1062 bp, Homo sapiens
tatcttggactgattctttaaggtcttctgaacaagattccagggtaacctcattttattctttcttggttattattaggggtgaacgggtgggtaggtggtgttttaggctttttttttttttttttaattcttacctatgaaaaaaatattttcttatattttagatttaaatgactaccaagaagtttgctgattgctttcattttggtagtagagtacaagatagttaattattatttctctctagtagagattttttaagaatctgtatatttgagctaataacactgtttatggagagcatattatttgattgtgtgttaaatggcttctaaaaagctggagtcctcaaaagaatatttaatatattttaattatgcttccccaaaatcttttttacttttgtttggtaaaatattaatatgttaatattttatattactgttatgaaaataaagccaattctgtttgagttgacaattatgaattgtatcatataaacttttctctaactctcttactgcttatccctactcatacttgtctttggaaataagcttaaaaattacacagggtacatcttagatagcaacgcccaataggaggcatgtacatgtgtgtttagctgcctggctagctgggtagcaaactatgtagattggggaaatggagaaaggaagggtgtttaatgtttaggcagaatatttctgttctgagaacatacagataattttgttgaggataaaactgtgtatatgtgtgtgtatatatgtatgttttctaataataaaaagataaatattgttttgtattgttatattatcataccatatatagtgagaaatcagatgatgtttaccatatccatccctcttacttaatacagccatattttttattatatggaattgtagccctgttatccttgtatcatggcttataatattggttggttttacttttttaagtatttccatctgttatatttaagacttcattcacaatgatttttaatccaaggtaatttgttaagttattgataaataggtctgtcccaga

SEQ ID NO: 15496 - DNA, 1044 bp, Homo sapiens
gcctatttaattttaatgcgatgatattaatagtactgtgtcctcttcttgatgtggattaaatatctttctacctctaaagtgattttcacattggactatatacaattaaaaggaaccagggaagcttatattaatgcattttcctggccagtcagtggaacttatctgtgaatgggaaccccatgatcccatgaatgggatgggaaccaatcgtatgaatgggatgctttatacattgtccttttttattcagtgaaagtctaatgtataatataaatatcaacctttttgtctcttatgactattaaagagttatactgcaattgtaatcactataatgttactgaataaaattatccattgtttcacattaataattgtcagtcctaaaaaatagtagtaacttaaaattcctagactatgttattgatgtatgtagatcttttggtaaatttgatatttgtgccataaaatagtggattacaaaaggaaagaatatgagactgtcttggtagtaggggtttaatgatgtgaaaatatgaattttgttttggaatgaaacaacaagcatacgcaaataagagttaatttggtatttcaatgatgttagttattttccaagaatatataaaattttctaatcaaataagttaacatttctttctttataaataagatgggagcatgcttttcaaaagtttttgatggctgtcctttgaaaattaattgtgcaacatcctggatacatcctgatacaaaaggtaaaatgtttgaattttatatacatctccaataaaatatttattatgggaaagatctttatgatcagtgacttgaagttgtttattttaaaaatacgactttagagacctaatggtataggaacctgcaacaacctaaataggtcaatagggttttggtttaaaggcgttaaaatttaggagtgtataggagctattcttgattaaaggactaaagagaaatcacaactgattgcatccttaatttagaattttcttttaccgtaaaaggacgttattg

SEQ ID NO: 15497 - DNA, 1276 bp, Homo sapiens
gaggtgaagtctgtgggcctccaatactaaagagaaaagtaacaaagttgatattccattgtaacatcatattctttattttatgcagttctgtagtattccattaatgtagtctattttatctatcttttctcgtatagttttgggttttgtgtcatatttagaaggctttctcgattccagagttatcaaataattttcctattgtttcttcttgtgtttttagtttctttttttaatatttaaaaacctgatatacattatttggtagaaggtaagaagtatggattcaacttgagtttctttctagatgactactcatttgtttcattatttattgaaaatgcaatctttctactcatggatttgatatgccatctttattatataccgaattggcatagatattttagggttgtttctggaaattctattctattctggaaattctattctgttgcatgtctgtttttgtgccagtagcatacttttgattattatatcttgataatatctgttagaactaatcctactcctactctctgcccctccccacaacacacacatatgtaccttgtcacacttctttttcattatgacatttggctattgtgccttcttccccacataaacttaagaatcagcttatgtggttaaaaaaaaacagaaaaattcattgtttttacacagatcttattactttgggagagttgacatatttatgatattcagtcttcttaatcaaaataggcttcttcagagataagatttagttcttttatattccataatattagcccaaaatactaatatcctcatagagtaagttctggttgcttaaagcaccagacaaagcggtagagtagaaggtcactttattaatgacttgtctttaaatttttgtgaaacttcttttgtatttatcaggaatgttttaccactttgcttttgttggtttgatagattttatactatttatttctactctgttttttgtttcagtgttttaaattgaagtggtagcttacatacagtaaaatgctcaaatcttacgaatactccagggtaaatttttaaatatatacactcatataactaccacccagctaaaaatatgagttagaacatgatcagaatctcagaaggttccctcacgagagccttcacaatcagttttcttaaattctatactcgcctgccctctctccgcccaggcgaattactattctgatctctgtcacataaactggcttttacctgatcttgaccttcaggt

SEQ ID NO: 15498 - DNA, 1049 bp, Homo sapiens
agttgctaaaattgctccctcctctttgcctttttttctaagaaattcatcagcctctttgggatttaaatagtctcttatattaccccatgcctacctttcgtgccgtccaactcttttggtatagcacaatatttacatactaggtaaattatgcaatgagaaaaggacattttgactcctaagtagtacctagaaaagaaggtcatatataaatgacacagcctatctatttctgattgttagtgtaatttttgtggttgtatattactgttctgttacttaattgtattttatatgaaagacaaaactgacacagatgtttccacggaatatattgtactttaactaagtggcccaataaaaaatcatggtgttttagactaactgttcctaagttaatgttatttactaacaccgaaacgtaatagtagtgaaatatttttgtacgtctctttttattttaaggtcatcaacattccataattttgtcaaaatagcactaaccaaaaacccaaaaaaaagaccaactgctgaaagacttctgactgtaagtcattgaaattacgaggggtcttcctatagtcataaattagacatatcagtagaacaaaagtatttatgtttttaagataaaaatgttagtgatctcttacagcaggggtcagcaaactttttttttttttttttttttttttttttttttttttggaaacagggtctcactctgtcacccagactggagtgcagtggcatgatctcagctcactgcagcctccacccccaccccctgggatcaagccattcttctgccttagcctcccatgtagctgggattacaggcgcgtgccactaccacctggctaatttttgtatttttagtagagacagggtttcaccgtgttggccaagctggtcttgaactcctgacctcaaatgatccacccgcctcagcctcccaaagtgctgggattacaggcatgagccaccatgcctgaccagcaaattttctataggcgggtcacatagtaaatattttaaactttgtg

SEQ ID NO: 15499 - DNA, 1032 bp, Homo sapiens
aactaaaaaagaaaaaccacattatcatctaaatacacacagggcatttagcaaaatccaacattcattcctgataaaaaaaagttctgaacatggtaggaatagaaaggaacttggtcaacctgataaagcgtacctgtgaaaaacctatgactaactcatacttaatggtaaaagacgggatgttttttcctccaggctcacccaaacagggtgatgaagtctgcctttactactacttttcaacattgtcctagaggtttcagccagtgcaaaaagagaaaataatgaaataaaaggcatctggattagaaagtaggaagtacaactctctttattcacagaccacatcatcatctgtgtagaaaatggaataaaatctacaaagtagctactagaactaataaattaggctagaaagattgtaatattcactatcaatgtacaaaaatcaatcagatttatatatactagcaacggacaatctgaagttaaaataatacaacatataataacataaagaatatgacattcttagggataaatatgacaaaagatgcataaacacctgcatacagaaaactacaaaactcctgaaagaaattaaaaacccaaataaatggagaactataccatgttcacaaaccagaagactcaatactgttgagatgataattcttcacaaattgttctgtagattcagtgcaaccccaatcacaatttgaggaggctttttattaaagaagttgacatgctgattctaaaattgctgtggaaatgtaaaacacctagaatagtcagacaactttgaaaacctgaactatagtgccagaaagcacatcagtgtttgtgagggttgtggggaagaatgggaaaattataaaggagcaccacataaggaaacttttaggagtaattaatatatttgatatcttgattgtgtttagtgaaatatttctgatttttatcagaaaataaattagaaatcttcaggccgggtgtggtggctcacgcctgtaatcccaccacttt

SEQ ID NO: 15500 - DNA, 1032 bp, Homo sapiens
gtgatctcagctcaccgcaacctccacctcccaggttcaagcgattctcctgcctcagcctccctagtagctgggattacaggcatgggccaccacgcccggctaattttgtatttttagtagagatgggatgtctccatgttggtcaggctggtctcgaactcccgacctcaggtgatccacccgcctcagcctcccaaagtgctgggattacaggtgtgagccactgcgcccagcccattgtgatttttaattaagttcagcagttggttgtaggttaccaagtcttatgttatttttttaagcatgaatttgtaagcaaagaaaatgtagctgtttcttatgtcttctctccaccagtatactttgatctttaaatattaagagtctagtccaatgcctaaaaatctgaaggtaataaaaaatagatgtatgtgatgttatttctctgacatttgatatcaaaacatcacctactttcttattttttgatagtaacacagctgaactatatgaatatactgtcctttttgtgtcctgtgtctgacattatgagagactcttggttttcatatttgagtgagagagtgaataacttggaaaaatagcttaacagtagaaaataagagaggaaggattgtccttcaaaaactttaaattatatttcttattaaataaatgttatgttaaatgttgtataaggtcactgcgaaaataaaacatgttttattgggatgatgtgctactgttgtggatatttactattttaaaagtcatctgggtaaaatcttattatttatttttcttactgttcagaggtaggcttattttgtgactgcctaaagagaaaatatggttctaatgatgaatgtgaagctctgaaccatacctgggagcaaaatacatgttatgaaaactgtaaaagaagtaaaaagtactttcaacttggtgaagatagacataaaacagtgccgtcactagtgcaagtatagcaatgcatcactagtgtagtccccagattgacttgtggat

SEQ ID NO: 15501 - DNA, 1042 bp, Homo sapiens
ggcaaacccggagctgccggccggcgcgcgggaggaggacgcgggtgcggtctaggaagtaggtcccgggctccgcgctcaacaaagacggggccgcccccattaggtacggagccggccctgggccccggctggcggggaggcctcgtcgggcagttcgcgggcggccggggagggggaagggccgcagaccgaacggggatacggggcgccgggggcccttccaggcccctttctcttccacggcccctggcgggacggaagggaaggggccgggccgcgagggcgcgggccgctgggggtcgtagcctgcgacgccaaccagcctttgctcgtccctcgtgcagacggagctgcgggcggaggctccatgttgggaagcggcgccgttcgtgcttgttagcgggaatccgggagccgcggggtgagctggcgggggccgggccctaagtgaagatggaggccccgctgcggcctgccgcggacatcctgaggcggaacccgcagcaggactacgaactcgtccagagggtcggcagcggcacctacggggacgtctataaggtaagtgaggctggccgtgcttttttcctgcggtcgactgggtcccgggaatggggccactttcctgcgaagtattggggcgagaggaggatgcttttattgttgcctcttggggagaaagcggccggggtcccttttactcggttctgagcaccctcgactcatggcttgttctaatcgctaccaacaggcagaactaaccacacagttgcaaaccgctgttgcactttttttgtggtttaaaggctttttaatagggcttatttatggtattgaagggaatttgaatctgcttgtggaattacaccgaaggatgctctagtgttagcatggaaaaatgcttcatggaagatagacaggaaagaatattgacattcagacatttgcatttttttaaaaaaatttgtttcaatggatgagtttgactaaaaaagccatatgaaaccctgtctctgagctttaactgtaagcaaactaa

SEQ ID NO: 15502 - DNA, 1045 bp, Homo sapiens
catgcccatagtcacacctacttgggaggctgaggtgggaggattgcttgagcccaggaggttgagactgcagtgagccgtaattgtgccactgcactccagcctgggtgacagagtgagaccctgtctcaaaaataaataacaataaataagtaatacataaaattcactttgaattaatttttctgaagtatgctttagctgcttcatgtactcttagatttgtttacttcattttgttttcactttttagggattgctttttctaaattttgatttaattttgttgtaagttacataggatatttaaaaggttgcaaaatcaaaatgataaaacagaatgcatttagaaaattaattctacccctgtcctcttccaccccatttccttcctccccctgtaaatacccaattttattaatttttgttacatatttcattgcaacactttatgaaaatagatacaaattacatatatatgtaaaatatgtattcatattattctctttcatatgtattgtgttaggtttctgtagctgtaaaacacattacttccaaactcattggcataaaacaataaacatttattatctcagtttctgtggttcaggattttggaagcggcttagccaggtcattctgactcaggatctctcatgaagttggagttcacacacgtcagctggggctgcagttatccgaagcttcgctctggctgaaagatccatttctttctttctttttttttttttggagacagagtctctctctgttgctcaggcttgagtgcagtggcgcgctctcggctcactgcatcctccatctcccaggttcaagtgttctcctgcctcagcctcctgagtagctgggactacaggcatgtgccgccacgcccagctaattatttgtaattttagtagagatagggttttgtcgtcttggcccggctggtctcaaacttctgacatcaggtggtccatccaccttggcctcccaaagtgctgggattacaggtgtgagccactgcgcccggccaaaagatccg

SEQ ID NO: 15503 - DNA, 1053 bp, Homo sapiens
gagtcactgcctccgctagggatcccgagggggtacaaaagcaacaacaataaaaactcgtggagagtaggttccacgacatgcgcatgcgacgaactcccgcactcagcggggcaggtttcgtccttcatcttctcagtcggcaggacctgcttctcgctgaggatgagtgaggacagccgcagctcggcggggacggcccggtagcctagagcgccggcacccgagtcccgccgccggagccgcgcctggagccgcggtgggggaggggcagcggcggcccgcgctgcgtcgagcttcccagaattcccagcggccgcggggaaagtttacgggatgtaggcggcggcggcggtagtggtagcggttattcggcggcccgcggcggaccatggccctggccctggcccggcgtcgctgggctttcctcacggcgtccccgagcagcgtcgcagagcgggccgacttccgggaaggaactgaccagcgactgagcggcggccggcgcgcttagcgccctgaacatgcggcagtccctgcgggcgaccccgggctccggacaggcggcggcggaggcggcggctcgggagggaaggaggcggcggcgccggcggaggtggcggcggagacggccggcgcccggcgcggagccctagggaggcagttcagcgcggcctcgggcctcgtcgagaaggatgctgtcccgaaagaaaaccaaaaacgaagtgtccaagccggccgaggtgcaggggaagtacgtgaagaaggagacgtcgcctctgcttcggagtgagtgtcaggcggggcgtgcccacacctggcccaggcggccaggtgctccggggaccctggcgggggcgccggcgggtctccagggcttctccttcgtccttggtcgcgtgaaatactggttttgagattttcttgtgtctgaagtggtattcgttgattgaaagcccataagagtaagaaacttgggttagtcccccccgcgcctaacccccccaagagcaccccctaaaaataacagacttcctcgccccaccaggcaga

SEQ ID NO: 15504 - DNA, 1069 bp, Homo sapiens
atccataaaagagagataatcataatgccagcctcattataggtgaggactaagggaattactatatgcaaggtgtttagaataaaacctggtatacaacaagtgctatataaatattagctatctatctcatcatcatcattctcttgtcccaacgactgacacatcaccctcatttaatatttgtgcacgtgatcactaagccattaccaaaagcccctaggtaggtgtccgttgagtgggttgtaaaggtaatgcatagaaaggtcattatattaaaaaaaaaaaaaagttagtggggcaaagtgatgaggtgactgtcagagatactgaagagacacttaataagttgtgattaatttactctgaataatgcattgaagtgaagccattttcaaagcataatttggattaaattacttactgttccaaggctcatttcactaaccaggaagtgtatggcgtgggtagagatgagtctgtcctttccaatatctgttcagtcgttgacatatactgctcccaatcagtttcctggcaactcagggttaaggtcctgcatctcaagctcttgccttcacttcattgtttttagtactacaaattttaggatgtctcctagtcaatatagactgcatttatctgtgataacaagaacaacacatttcagcagcaacaatgatcaagtttatttcttgtccattccacttgtccgttgtgggagggacaagaaagccctgcttatcatagtcatagagaaacaaggctaaaggagattccacctcagcatgcttccccgatcacagggtcaggggaaaggaagcacgtcaaaccacatattgactcttgaagcttttacctggaaatggcccatcacactactcatgttttattggtcagaacaagtcacatggccaggcctgggcttaaaagggagagtatgtacaatcttcctgcagggaagtgccccaaatatttggagacaataatacaggcttctgtaggaaagatttgactgaaagcaaaaaacccatctaaaagtggcttaaataattgaggggttattttc

SEQ ID NO: 15505 - DNA, 1057 bp, Homo sapiens
atagatcccctggtctgttgaacagacttcaacttaggctgaataaactcttcacaccatgtttctatatttagaatgagcctattgtttgaaaaactgaaagaatgaccaactgaattctcttcaatgacagttccaatgggcagctccaacagcgaccctcagagccgcccgtaataaatacacaatagaaaacagtgtgcttgaatgcaaatgcaacctcaaggcattctctccagtcacctcagcactcctcctatgtagaaattctcaagtccctgctgccaaggttgtcagctgcctttccagacattgataggcaccttgcctcttagggttaaatgtctgtagatgtgctgaacctggaatgttactagaaacacagggaagacttggtcagagcaatgtcaatagccaagaaatactgaacttgtatctcattttgtgacccataatctctgccttaccttgcagagtggtaaagctggtcttaacctagttcacaggaacctcacacaggtgactgaaaaaattccaagacatgatgaacattctaccaagtgctcttcttacagtaatatcagctgcccattcagaccatgcccttcacagctttcctttgggagtacactggggttggatctaaaagaatctgcccccataggccctatgtgggcactgactttaaccagacttgtttgattgctttggtaggaggtaaagcctcagccctctcttccagagctgtttttagattgaacagtgaaagatcattaagatccataaatggcattcaggttttagtggatgactttgggaagtctcactaaagtatatataggaagattctggtgtgagtattgggaacaagtggccatttcttccatacaggtaatgttgaagaggggactgtgtcctttctgcataaagaagcagtccccctgatctattcaggatggaaggcactttccaaattgcctctagagcagcatgatattctgtgtggtcccagtttttataaagcaaaaagtggctcagataaactacatagatgagc

SEQ ID NO: 15506 - DNA, 1882 bp, Homo sapiens
ggcccatgcctatagtcccagctacatgggaggctgaggcaggagaatcgcttgaacctaggaggtggaggttgcagtgagctgagatcatgtcgctgcactccagcctgggtaacagagtgagactctgtctcaaaaaaaataaaataaaataaaataaaaataaaagtttgcagtttacacaatcaatcctggaagcattttatttacactgtgggtcccactgctgagctaacttgcatttacaaaacacctctagatactgtcataatgtatccagaaattcaattagagagagtgtgtgtttctgggccaacagaggcaaggttagggggcagaggtaatataagtgagctggcccaagccatgcaacttagcctcatagattgaagtcatcacatgaattaaccccaaactggtacccagtgatgtcagagcatgagtccagatgtgctctgtgcgtgcatgggatggcttccaataaagtcaaatgacacagtcacgtgtcagtttaggtcctctaggaaacagacaccagagagaatgagaagtgcaagtgacatattgggggatgcctatgaaagacaaaggggagagggagcaggatgaggtgggaaggcttcagactgtgacacaggtgtgccacctgtgaaaagtgaaggggaaagaagcagcattctcagggagagcctcagaccacagtgccactctgagcaagtggccaggctgatggagcctgacactaaagattgcccattagagaagtctcggccctagtgtcccagccacatggagtgtcccagagagcgcagctttggtgtgagctctgagggagcaagtcctctttgaggttctctgaaagaagatctaagctgtgcacttcttgggctgccttaattatgcttcaagggtcagaagggtccaactcttgtttgaaccgagactcaatcccagcctgcaaatgactttccctgattgattacaacttgctttaaaagtccagagacttttatctcttaatgaaagatatttaaatgagggtgatttattactttgaggtcgcggtgatcacgaaagtatgactgagtatatgtgattgatatgggccataatgcttcattcattcacaattcagcagaccaaattaaagagatgcgtgtttaagtttcaatcctgccatgactgtgatcttgggcaagtcacttctctctcagcttcagctccctcatgtccaaaataagtgggttgcactaaatgagatccagcatcctccagttcaattattctgtcattctccttccttcgagcttgactctgatgaggccgggaataaaaatgaatgatttctcacttgaattttcgatgcactgtgaaacatagttaatcttcctcttctctatttcagtgactgtcacaaagatcaagctagattttccaaagcttacctcttagactcaactcagctaattatcagctgatttggcagatcactgtaggaatcactaaaataactccttatgcaactttaaaaatctagcatagcattttaaatattatatgagatgttatagcttcataaatttcctattccatttactttcatcatacttgaaatcagatcactgaaaaacctatgcaaaacatattctaagtgctattttttggtgggtacagattcacaatgtcactttgtttgcatatcatattttattattattagagcaatggctttatctgaaacatgaaagataaacttttttggctgggtgcagtggctcacgcctgtaatcccagcactttgggaggccgaggtggatggatcacgaggtcaggagatcgaaaccatcctggctaacacggtgaaacctcgtctctactaaaa

SEQ ID NO: 15507 - DNA, 1055 bp, Homo sapiens
tctcacttgtccctgccacactcctgtgtactttcacagaggaattctggatggttgtgagtgttcacaatctgaaagatcactgaaaaaaaaaattaaacaaataaaatgtgagatagaatttgaaatagagtggccttaaaaagggaagacatttgaaaacattggtataagaagctgctactggaaaatttaattttgaaccacagctccgccagacctcttcaaggaagtcagtgagaatagcttcccccttgtattttaagagaagaatttttagcctaaagcttgattttacaggctaaaagaaggataaatgctggaaccctgatcaggtcaggggaaattcattcttaaggaaaaaacaaaagctgccccagaatgatcaagaaagtgtaaaaatcaatatagctatgacagccccaataacaggagttccagtaaaacacaatgctcttccttagatttcagtccagaaactgtaatgctatccttttccaaaccataaaagatagattaattggaaagtactttggatttctagtagaccatttattttgtgcctaatgaagttaaataggataacataacacccactataaaatatatttttctagaatgtcagcctgagtttctgctaatgaggctgtaattttggcacattcaccttttatatacaacatcactgggggtaaataaggaaaacggaaaactaattctcagcacatggaggaatagattcagacagatgcaaatatctctgggttagttctttcttttttttttcctctccactccctttgactttttgtccatttgctaatttgtctaaatctgggacaatatcaagatctgaagattattgagagtctagccttttttttttatccttttggtcttttaaactgtatccaccaagggcttataaattaagttctgatgttttaattacacatgacatcatgtatttcagttacttttttaattatacctatgtctacacaggtacatttgagtttcttatcagagacattgtaagcatttgcatgatttaa

SEQ ID NO: 15508 - DNA, 1044 bp, Homo sapiens
ttttcactcagaccagctgctattcagcaagaatgcactatctaaagttttactctcttattagctacggatttaactgacccattctgattccacaccaccctcaagcaatgggatcaatctggagaaggctggtaccttttttcaaatatccctaaattgtaatggcacgttttctggttgtattttgattagaaaatcatcttaccctctttccagaaaactggaagtggcatttggtctttcagacttttcttttatagaaaacaacatattaagttttgtcttctacttttattagagagtaattaaaaaaacattttccacttaattctaaggttgtatgatcagctcttttccaggtcataggaaggaaattttaagtcttctcctagtcagccaagggctttactgtttggttgagaatagatttcagatacctacttcctcccccaataaatattaacccagaattgtctaagtacacaaagaatcccaagattcatgagtcatggtactgaagtgaaatgccagtttgttcattctgaaccaggacgaaacaatgacctaacagttcaccaagcctttttagcacatagaccattggctgttaatccccttaagtgcctctactcacctaagggtgtatttatttttattgactcaagttgaatataagagccctgagtatgcaccaaggtcatgggcaaggacagtgtgatctgaatagagtcccctataaatcatagggggaaagctgccagagggttagcggggatggaatgagcacacacacttgcatgtaatctgttaatgctgatagcctgaaatgcatggactcaaaacctgcgttcagggttatctttaacagtgtaccggtaatagctttccagaaacagcttgtagttctgctaaagtctaaactttcctcagatgccatttgtattgttcagccaccataaaggggaatgacagtctacaaatgagccttcagagaagataacacagtaaaattgcattcccaaccaccatagttgtgaaggt

SEQ ID NO: 15509 - DNA, 1049 bp, Homo sapiens
tatcagggacttgagcatctgtggattttggcatcctcagggaatcgtggaatcaatcccccacagatactgaggagacaactgtaccggaccttaaacaaaaaggattaaaggattaccttatgcttgggggaaattgttttaaactataatgggaaggcatagcttatatttaagaaagaactttttgaaatagtagagaaagaatgttagtgtttacttaggctgcagttcattagtgatatcccatcaaaacctatgatgagagagagtactataggaaaaagcactggccaggtgtggtggctcacgcctgtaatcccaatgctttggggggccaaggctggaggatcacttgacaccaagagcagcctggatgacatggtgaaaccccatctctaccaaaaatatacacattagccaggtggggtagcatgtgcctgtagtcccagctaccagggaggctgagatgggaagatcacttgagcccaggaggttgaggctgtggtaaactgtgagtgtgccaccacactcagcctgggtgacagagggagaccctatctaaaaaaaaaaaaaaaaaaaaaaaaaaaagaaaagtaaagaaagaaaaaagcatttatttaaaaaagataaagaaaaattttaaaagaaccacatgtaaaatggagaggtaaatggaggtgggggaaggtgtcaaggtcatggttgggttaagcatgaaattctcctaattaacctcaggtcttgcttctggttgtgtcacatgaactgcctggaggaaggagattggtctgttagtgatgggaatgtaattgtgaacaggcaggacaaaattttacctgtgtattgtgtactctctcctgagttgctctgtgctactgacaatgtctgagaattcaaagagacacaacagtccttcagactctcctttaaccagtagatatcagtgtcatatcctgacccaagaaatgacctttataaatttgccacttaacaaaataaaactgttcaaatgatcaatagacacttgccatccagaacagatggtg

SEQ ID NO: 15510 - DNA, 1092 bp, Homo sapiens
tctaggcactgatctaagtaatttctatgtgttaactgagggaattcccacaactccatgaggcaagaaccattactattctcattttacagatgaggaaactgagactaagaaaccaagaaacccaaagtcacagttcacaagtgccaagaccaagctttccccttaaagagccagactctgtattctgtgccttaaccactatacctgccattactgcacagaagagaacctacatatagctttggtcacactcctcctgacaaagttgaggtggcttgctcttatatgggaacaacaagtcactttttttttgagatgtaactcacataccataaaatttacctttttaaagtgtgtaattcaatagttttaattagattcattcacagagttgtgcaaccagcacagaatctaattccagaatatttttatcatcccaaaaagaaacctcaactattaagtcaccactaaaaccccacaactcctggcaaccagtagtgtactttctgactctgtggatttgtgtaatcaggatatttcatataaatggaatcataaaatatgtggccttttgcatctgtcttcttttacttcgcataatgtttttaaagttcatccaccttgtagcatgcctcagtacatcattcttttttatgactaattatcctgtactaatatcctattgtattgcatatagcacattttgtttatccatttatcagttgatggacatttgggttacttccactttttggctattactaataatgctgttatgaacattcatatacaagtttttatgtggacatgttttcaattaccttgagtatcatgatatagtaaaaaatatatttggtctttgtccgtggttcctggctcagagctcctaaaacccttgggatttcctgagttagaagtgtcttgaccagaggtgactcagggtgggcccccaggtcccctcaggatgggagctggtcactgtgaagtccaaatgtgaactcttgcatttctctaatgactagtgatgttgagaatcttttggtcactggaaagaccaaatgtgagctctaggggtgggaactttcagtg

SEQ ID NO: 15511 - DNA, 1041 bp, Homo sapiens
cacaatatagtctatatattcctgtggtaaatgtaacaggcagcatatgttcatgtttttacatttcttttgatttacttctagtacaattagaacattctgtgtgccatgtaaacatttttacagatattaaggaaaatgttacagagaagacagttattcctctttgtacccaggcataatggaaagaactagataacaggagatccaggttatagaaccaatgctgccacttacttgcaggaaactttttgcaagtatcatcacctgtctgtacttcccacctacaaagatataagggagttaaaattacaattgtgaaaggattttgataaggtaaattaaatgtttataatttactaatttcagttcaacacaaccataaacattcatgtcaaacagagtcaatgtctcaccagtcaacaattactgcgtaaaaatctcatcccccaacttggggtacttttctggatccttttcagagcatagggtacagtccaaagctgctctgaaaggtggcctaaaagagtgagactcttcctcatgggtccagagagaatattcagttgaattaagctcaagaaataagaatactatacaaagatttatatattaaacaaaagtattctgtttttctctaagtaagctgaaatagctgataaggctccgtttttttcagattctccaataaagatattgttaccagtttgaagtagcagaaattgtttctcctgtatatgccatgaaaagatgctattaattggagtttcaggtcaaatcacagtttgcataaagtaagagacaattatcacagccatctgttcttgtgtaatgaaaataatgtacagggaacatttgtccttaccatcagtatgataaattgcactttcctcacctaaacaagttggtggacttttcaaagtgtatatacacatacaacttaactttggcctacagaaggatagaagaacctataacaagataaatgtttaagaatcaaatagttataaataaatatcatttgtttatcagttttatcag

SEQ ID NO: 15512 - DNA, 1041 bp, Homo sapiens
tccgaattgcctaagaaacccaaaaatatttttactttttataggctgtgtacctgtcatcctttcttctatgagcccagagaataaggatgctcattttgatgaagtcagaattacctaagttcattaataaactccccattaaattaaaaataaaaaaaacccactaatataacgtaacctttcacacttctagtattttaataatgttgaatggtgcttgcaacaattaaaaccattttttgaataggtaatgcacgtgactggtaaaaaacaactttaaatacagcaagacacatggtaaaaagtaggtctccttcctacctgagccttgcgatcccctacagattccttaccctcactaaaactgcgaaatgacgagcatgcttagcacgaatacacatttttgacacaaagggtagcagatcatacatactgtcttacactttgcttttatcacttcactctagtaaaatattttcaaacctttcaaaggacaccgttggtggttttaatcaccaaggcatttcattatggtaggcatgcatgcaagtatccatacacacttaaaaatcaaattttaaaaaaatggaattttaattaggaagatgacaattacaactcaaaaataagtgtgaaaacttaaactataatttttaaataaaaaaccaaatgctatctttgaaaaaccgaattcaaacaatgtttaacagttattgcagatgttattaaatagtctggttgccaaacagttaatatactgatgcttgtacttggcaaacgtactaagatgttttccatattatgttattgtttgaatgcctcttaaaataactcaaaagggacaaatgtgcagcaggactagaattttatagcattttgttgtagttgatttatactttatccccttgggttttgaagtctaacaaaagcatcccaaatacgctatgcattgtctgactctcctctcacttactttatgattaaagctgacatgatcactatagaacagttccaaggcaatttacataattgtcggaa

SEQ ID NO: 15513 - DNA, 1029 bp, Homo sapiens
tgcggatttcattaaataaaaggaatgtaagttggcttttgtttgaagtgtcaggattttgttgttttgagaaatatgatggtgaaaattaatcctcatggtgctatgtggagagtgtaggggcctgaattgtttgtactgatatgcctggcaaatttagatttccattttgtaagtattatttcaaaaccctagataatatttttttcttatttcttctaaaagtggaaagtaaagaaaatacctggttaatgggggtgtggttctagatagtaagattctaattagtcaagacagaatgtgcttcttagctgaaaaatatttgggcctcatctggctcctttgcatctacagacgaatgttacagggagatggtgccaacaacgaaagaaaaaaaaaccattgttggatatatttgtctttattgcagcattgctgaaaggaagttaatgacttatagtctaaaggttagttcaaaggtaataacttccttgaattcactgtcaatgaaacatgctgtaagatgtgttgtttttttctgtgagcgactacccatttgatttctacactgaacacgtttagtctagtgtgttaactcacatgttccttgattttttttcttcctttctattaagcttacctttaggtgtcagcatttttctgctcatgctcaaaggtcttctgaagctgacacctcactgggtgttgatccacatatccaaagcccatgcagtcgcacagattgtgtgagtgaagtcatagtgttctttgcttctttcttctgtttctgacctctgcagatgtagatgaatgctcagaaaacagatgtcaccctgcagctacctgctacaatactcctggttccttctcctgccgttgtcaacccggatattatggggatggatttcagtgcatacctggtaagtttcagagggccagattaggcacatgaatctcttagctccttcaaggatatttttctatgacagcccactcttgatttagcctggtctggagccttggtggatt

SEQ ID NO: 15514 - DNA, 1047 bp, Homo sapiens
tttgtttcctctgactgtttatgaatagcctgtcttcaagctcagtaattctttcttctgcttgatcatttctgctcttaaaggactctgatgtattctacatatgttagtttagttgcatttttgagctccagaatttctgctggattctttttaattatttctgtttcttaaatttatctggtagaattctgaattccttccctgtgttatcttgaatttctttgagttttctctaagcagctcttttgatttctctgtctgaaaggacacatagctctgtttctccaggattggtctctggtgtcttatttggttcatttggtgaggtcatcttttccaggacactgttgatactgttggatgtttgtctgtgtctgggcgttaaaggtgttctcttctcttactttctcccaaacaaatggagtccgtctctctgttctgagccacctggggctgggggtggagtgacgcaaccaccctcaggggccaccaccactggcactgtgctgtgtcagacatgaagccagcacagtactgggtctctcccaacacttgctgtaaccactccctggctactgcctatgttcacttaaggccctggggctctaaaatcagaggtggctaagccagctgggcctgtgttcttccctttaggatggtgaattcctccaggaccagatagaggagcctcaccccatggccactgctaccacaggcccacagggagtactggcaggctactgctcatgttctcttaaggcccaagggctcttccatcagcttgtagtgaatgctttctggcctgggactcatgcttcaggatagtgggcttgcctctggcccaggtaaggtccagaaatgccatccaagagccaaggcctagaattgtggcccccccaaaacccgcttggtgttctacccttctctggcagagctggtacctatggtgcaagacaaagtcccctttacttttccctctacttttctcaagcagaaggagtctcaccccatagccaccacagctaagaatgtgcttagtctcac

SEQ ID NO: 15515 - DNA, 1050 bp, Homo sapiens
gcagagatctaatttttgcatttttagtagagatggggtttagccgtgttacccaggctggtctcaaactcctgagctcacgttatcctcccacctcggcctcccaaagtgctgagattacaggagtgagccactgtgcccagcctggatgctctttttttctttctcttgcctgatttctccagctaggacttccaagactgcattgggtaagagtggtgaaagagggtgtccttgtcttgtgccagttttcaaggggattacttccaacgtttgcccattcagtatgatgttgactgtgggtttgtcatagatggctcttattgaggtgtgtttcttcagtacctagtatattgagagtttttaacatgaaggggtattttattgaaggccttttctacatctactgagataatcatgtgatttttgtctttagttctgtttatgagataaatcacatttattgatttgcatatgttgaactaaccttgcatcccagggatgaagcctacttgattgtggtagattagctttttgatgtgctactggatttagtttgcatactttgttgaggattttcaatgttgatcaggaatactggcctgaaattttcttcttttgttgtgtctctgccaggttatggtatcaggatgatgctggcttcatagaatgagctggggaggagtcccgcctccttaatttttgggaatagtttcaataggaatggtatcagctcttctttgtatgtctggtagaatttggctgtgaatccatcaggtcctgggctttttttggttggtaggctatttattactgattcaagttcagaacttgttactggtctgttcagggaatcaatttcttcctggttcagtcttggtagtgtgtatgtgtccaggagtttatccatctctttcaggttttctagtttgtataatataggggttaggagtgcttttagttactggggttttcttgcttctcagctctccctgctgacagagctaaaaaacagatgtatgtatgtgtgtgtgtctataaaaataatta

SEQ ID NO: 15516 - DNA, 1028 bp, Homo sapiens
ccaacaaacagaaaagaaaccatatatggttttagacttgttgagtttgaggaggtttccgttcaaaggaaaacagagaaggtagtaaggatatatgggtctggaacttcaaggagtttgggccaaagacataaatttaggattcattagattgtctatggttattgaggttgtgtaggacaggagtgaagaaaaacaagagaaggcagcttaagctgagccttgagggacctccaactctactggctgaagagcctgcaaaagggaacaaaaaggagaagctagaaaggaagggaaaaggccaacagggaatggtgttgcaaagatcaagggaagagagtgtttaagcaggagtgtttcatgctgagaggttaaaataagaatgggatagaaaaatactgaagatcctaagcaaatgcattttctacaattagtaattacaaatgtgcattttccttttatttaggcacatctactatgcttcttactagaataaactgtgcagattggtctgatgtatgtactaagcaaaatgttactgaatttcctatcataaagatgtacaagaaaggcgagaacccagtatcttatgctggaatgttaggaaccgaagatctcctaaaatttatccagctgtaagtattcagcttcattataagatctctgaatgtttaggtctttagaagttctaattctcagactttgctaacacttaaaataggttaaggaagatactagaattgagatcacaaaatgaatatttatgaaagtctgtgtacatttcaacacttttcgggagatagcaattttgtttaatgagtctgattttctttaagaataatatttaattttctatattttgtaagatattatcctatgtaatatattgtttgctatgtttagtatgctttttttttacaaactgaaaatatcttaaaaaattaatttgtaatatagttatatgtttatccagcaacaggatttcatatccagtgaatataacatcgatccaagaagcagaagaatat

SEQ ID NO: 15517 - DNA, 1027 bp, Homo sapiens
ctgtgttctggtctcttgtttcctgcttattcctgtaatggttcctatatttgaaccttcagagttagaggacttgtccctagtctcagtttatttgattcctgtcttcagtgggagtcgcctgtttgaagatttctttgtggccacagcctctatattgtttcctgactctgtggccttacttaccctctgatgctgccttctctttctggtttttatttccatttttttaattgaccaataataactgtacctatttgtggggtacatagtgatgtttcaatacatacaatgtatggtgatcaggtcagggtattgagtgtatccatcatttcaaacatttatcgtttctttgtgttggaaacattcaataacctccagcctgtttctagtatttcttttgcagctttgccttttttgtttatttttcatcttaacttcctattatcagtaatccatactggcccagaatgttgtatggtgttgtgcctgtatctaattcttccccctccctctgtatcactcccgtttacaaaggaaaactagataagggttaggaaagaatttattaccatctgagaatgtaaatcagagacaggtgcaccccagagaaaatcagcaaaatggaatcagaatgaaaaagactagattccacagaagggcaatctgaaaaaagaaaagaagcatgtgttccagcctgggcaacatgacaaaaccccatcactacaaaaaatacaaaaattagccaagatggtggtatgtgcctgtaatcccagctccttgggaggctgaggtgggaggattacttgagcccaggagctggaggttgcagtgagctgagatcttgccagtgcactcctacctgggcaacagagtgagaccctgtctcaaaaaaaaaaaaaaaaaaaagcagcatgtgtgactgaaaatagtgtgtatgttattaatgaataggttgaaggtagagctgaggagtgactaaatgtacaagtgatggtagcttatttagaatataagaaaagaggga

SEQ ID NO: 15518 - DNA, 1044 bp, Homo sapiens
gccagttttcaaagggaatgcttccagtttttgcccattcagtatgatattggctgtgggtttgtcatagatagctcttattattttgagatacatcccatcaatacctaagttgttgagagtttttagcatgaagggttgttgaaggccgggtgcggtggctcacgcctgtaatcccagcactttgggaggccgaggcgggtggatcatgaggtcaggagatcgagaccatcctggctaacaaggtgaaaccccgtctctactaaaaatacagaaaattagccgggcgcggtggcgggcgcctgtagtcccagctactcgggaggctgaggcaggagaatggcgtgaacccgggaagcggagcttgcagtgagccgagattgcgccactgcagtccgcagtctggcctgggcgacagagcgagactccgtctcaaaaaaaagaaaaaagaaaaaaaaaaaaaaaaaaaaaaaagggttgttgaaatttgtcaaaggccttttctgcatctattgagatgatcatgtggttttggtcgttggttctgtttatatgctggattacgtttattgatttatgtatgttgagccagccttgtatcccagggatgaagcccacttgatcatggtggataagctttttgatgtgctgctggatttggtttgccagtattttattgaggatttttgcatcaatgttcatcagggatactggtctaaaattctctttttttgttgtgtctctgccaggctttggtatcaggatgatgctggcctcataaaatgagttagggaggattccctctttttctattgattggaatagtttcagaagcaatggtaccagctcctccttgtacctctggtagaattcggctgtgaatccatctggtcctggactattttttggttggtaagctattaattattgcctcaatttcagagcctgttattggtctattcagagattcaacttcttcctggtttagtcttaggagagtctacgtgtcgaggaatttatctatttcttctagattttctagtt

SEQ ID NO: 15519 - DNA, 1125 bp, Homo sapiens
ttttattgtcttagccaggatggtctcgatctcctgacctcatgatctgcccgcctggacctcccaaagtgctgggattacatgcgtgagccaccacgcccagccattccttagttcttttttttttatgtgctgccattttttaatttttttattattattatactttaagttttagggtacatgtgcacaacatgcaggtttgttacatatatatacatgtgccatgtttgtgtgctgcacccattagttctttaagtaacttttttctgtggttgcattttgactacaagtaattttttttttaaagaaagcagtttaaaggtctttcgttcctttcatgttgggagaataccctctgaatatgttttaatcttccattctagcatagagcagagagaaagagaaaggacagttcactgtatagttcttcactatttccctccaggttcacttccttctcttcgaatagttgagtattattaagaattctcaggattttgtccttcaccatcgggggtaagattaggactcatacctagctttactaaaaatctgttttttctttgctacaacattctggcttgaagttgtgccctttcctaaagtttctgctcatgaattttttttttgctgtatttcaaaactcttttttgttttctttgatagataataaggaggaagattctctgatcttatttcactttatgatgcttactaggaattatgtaatattagttttttttattatactttaagttttagggtacatgtgcacaacgtgcaggtttgttacatatatatacatgtgccatgttggtgtgctgcacccattaactcgtcatttaacattaggtatatctcctaatgctatccctccccgctgcccccaccccacaacaggccccggtgtgtgatgttccccttcttgtgtcaatgtgttcttttgtcaataagtaagaacatgcggtgtttggtttttttgtccttgcaatactttgctgagaatgatggtttccagcttcatccatgtccctacaaaggacatgaactcatcattttttaaggctgcatagtattccatggtgtatatatgccacattttgttaatccagtctatcattg

SEQ ID NO: 15520 - DNA, 1028 bp, Homo sapiens
acctggctttcttcttatcccagctgggtttctttctggattctctagctctgggcttgctcagttagtacagaaagagtttgtcccaacacatacctcagtgtttactgagagaaagtttaagttttctggcctggaatctccaggcctggtatttaggtctatctggggtccattcttggactcttcccctgaattaagtctgatattctctttggtaacagagctagaaaatatgacttgttaaggacacaggtttacatggacttttctaatttaatgttataagcctgttgtccactaagacctttgctgacattggctgtctttttctgcttgggtctcctcttcctctctcacctacaaaaattggtagtttaactcctggaaattcaaaacttacaggtgaaaagttgtgcttatcactttacaaatgttccagtcccaataatatgttaacaaaaggcctttagaaattcctgacaaccatgggccctgatacttgtagactaacgagccaatcgtaatgagtgaagatggtcttttgaggaaggaattccttggaatccctttcctgggacagaggggtagctatcttgatggtgggggttctgtgaagcttagcaaaaagtccaagtaatagatatgacatttgttctcaggaagcttactagttagcagctgtttttccggtggatacctgatgactatctttgacccagaaatgggggtgaagaaacagaaaaagaagtcttttcataaagaatgaatccaaatttgacaccaaatcctggagtggcatatccacattgaacaacttgatgacaaagtggttttgaaacagctggccctagatgtggagaggaccgaggaccctgttatctaaactggttactccgtgaggctcagctcattcagtcctgctttagtagtgtcctgttcttagtgctgtactaatgctgatttatagaacacgaattccacaaatagattattccccatgttcctgctgtgtgccagacacttgt

SEQ ID NO: 15521 - DNA, 1050 bp, Homo sapiens
tattgagcataactaataatttttttaatagtcaaattcaagtcttcatgtcttaaaagtactattcttggaattaataagtgaagtgagtatacacatttctgttggctcccttattataattgtgattagaaaatgatattttaaaatcattttgaaagtttttgtatgtgtacatgtgtgttgtgtatatggtattaaacttggaggaagaatgccaaatgttaggtttaaacgaaacatttattatattgttgttttaggaagtttttaaggtccatttacaaagttaaagtacatcatgataaaaacagaaataagaataatgaggcaatagtaaaataagggtgtgaaaatatgtaatgagatatgtttagttatttgttgttgcatgctagttggacaaatgaatctattctgtgtttgcagattttaaaattcatttttaaggggcaattcataaacattcatgaaacatttgttgttttagattccccaagaacatctgtatttcttgaagaactgaatgaggctgttagacctctgcaggactatggaatttcagttgccaaggtagaaagatatttatgttactaaaatattagtgacgaacatcttacaactttatggcttaagattgaatatcttaaaatacttccatttcatatctttttccaaactggaaatatatttttttcataagaataaacagaagcccagaaagatagtttcaggttattgcataacatactgcatatagaggggacaaaaagctgtttaaaaatttttagcttagaatttaactttatgttataaaccattctattgggcccatggtatcatttttcaaacctatagttaggtttttgttctgttttgttttgcctaatgaatatttcataataggtagccacaattcagctgtttttaaatttttattagcacaaactgaagtaacaaaatggaggtaaacaaataatttttttctgttcttctaagtctttataattgtttatgtttcactttttcgcatttatttttagaacaaag

SEQ ID NO: 15522 - DNA, 1643 bp, Homo sapiens
ttgaaggaatattcttacctctactttgtcaccttctactggctccttaactaaaatctgccatttggctctctggttaacagtcccttcctgtaaagtctaaaatcttaattctaaatccacagtttaattcacaagctagtacttgactttttttctgtatttgacatttttgacaacccctactttaaagatttattcccttgacttcttacattttgctcactcctgaaccaccccccaccttttggcctcttcatttattccttaaatgttattcctcagacctccattttttttttctctcttaatcacaacaccacttctcacgcttgggtaattttaattcagcagttcctaaatccttatctttagccagactcctcaatccatctgcctgttgcacttttcttggttgtcccagagacacctgtgtgtgtcttaaaacattcattctctgcaaaacctactctaatgcctgtgtcccttactttggttaattttagaaccattatattctaagttttctaggctcattcctctcctccaccttcccctatcatttagtgtctaagttttactgattttatctccacctctctgatacatcactctttcatcttcattgctattattaataaatacctacagtactaacctgcctcctatacctagctggtctcctctctgttgctcaatgttaccacagcaggctttctagaagcactctgacagtgttactccctaatatccttcagtgacttcaggaactttcaggagaaagccaaactcctctgtttggtgtacaaggtcttctgatgtgtttcctccaccgaatgttctggtgaaacagacttacacttcttcagaagccacatttggccaggcctcccgccttggtaaatgctgtactctttgcatcaagtatgctagtcatccttccccacttggaaaattcctatgcatcttgcaggcctgacataagcatttcctctgtgaaacctcctttgctccactcaaggagagtcatctaacttccactttcgtgtcaccactgtaattacaacctacctctattgtatgtcacttaaatcgtactgtattgttttatttttcaaaagtctttactagaatgtgagctccttaagggcaggaaaaggaacctttttattttttgcatctccatagcatagtttttggcatatgaatgtttaataaatgtttgttgaataaattgattttaaagtgacatctttattatattagaggtcctacctatattccaaatactttcactcccttcactttacagcaagggtcagtagagtcccaaggatttgtagactttagggggtcaataaagctgaaattgtattcaagatttggtgtggtttttggtgggtcatgaaaggggtctattcggggaaaaaaaggaacttctttcatgggaaaaggcagcatcattgaggaatttcttgaataatcaaataataccttcctaggattataaggtagataaatggattcctgtttaagattctgaagggaaggggagaagtgttataaattatttcatacaacaatttttcttagcttaatgtttgaataaataaaaatgttggtaccagtaccatgctgttttg

SEQ ID NO: 15523 - DNA, 1068 bp, Homo sapiens
gagatttctaaacattgtgaaaagttgaatagattatatatttattctcataatactttcactaatactaaataaaatttggggaacactttttatttttatataatttccaatttacagaaaagtttcaaaaatagtacaaagagctctcttacccagattcactaattgttcatacgtgctttatctttcatgctttctctgtacacacacacacacacacaaatttttcctcaatcatttgaaagtcagttataggcatcatgccccttaaaccctaaatacttcagtgtgtaatactgaataattactaaaaatgattttctcagaaaaaaaaactcccacaattctggaactataatactgtaagccttagaataaataatactttcaagttccaatctaaagttctttttgagttttgttgcccgttttatgcttgatgtgtatagtaatagggtaggctatttattttattaaaattttttttagagacaaggttttgctgtgttgcccaagctggaacttgaacgactgggctgaagtgatcttcccacctcagcctcccaagtagctgggaatacaggtgtctgccaccatacccagtttcatttttgttttttatacccgaagttcatttcctttgtctccctaaaactgaactgtaattttgggaggttttcattagtggaagctcttcatttataaagctatttgaaggggtttaggaatttatatcacatggtaattgtagagaaaaagaagctatatacctcaaaatcgtgccctctttacatatgtcttatcaggtataacatgttgaaatgtcacattagtagtaaagtggggtttatttatatagtggttaagaaatgtcagtttacactgctgtatacttcttcttctgtgtccctaaggcctggtacagtgccaagcacatacttggtatccaataaatatttgttggatgaatgtatgcatatgtattcagtatattttaaatgaataatcacagaagtaagtttaataatttgtcctatttttctctgtcacttcctttttctctaa

SEQ ID NO: 15524 - DNA, 1027 bp, Homo sapiens
aatttttttgttgagttggggtctcactatgttgcccaggctggtcttgaattcttggcctcaagcaatctgcctgtcttggcctccgaaaagtgctgggagtacaggtgtgagccaccaccatacccagcctgatttcatcaaaatatttacaaaaatcttcctctgcttttcattctttctttctgtaatgaaagaacctgattttatgcactcagtttttttgctgttagataatacttattcttgacttcccatctacctcctacttgaagcattcttgctacaaatacatacctcagtgcttatataatctgcctaaacagcttccaggaactagaaagtgagggggaagatgctgtaataagacttctttttttcctactattttcaatatgttcctttttttttttagtttacttgctgctttattggaaagtgttctggcatcagctctttttaaatcatgcagattagaaagatttctcacaatgttttaatttgatcaaaactcggaaacactcacctttaatgtcctatgaagtttaggtagagagtcttgatgtaacagaatttttctgaatcttttacaggaaagatgtaaaaaacaaaacatgctactatcaaagatttacttttttaaaaagcagtttctggtaaacatcgatttaaacagtcatatttacaaattaattttaaaaatctcatcttgtttccttagtaccctatcaatgtatggttagaaatagaggacttgtatgaaggagaattatttagcattcaattcaaatagaatacgatctcatttgaagacttgtaaagtatttgagaatttgggcaagaattggtcagttggtttcactgaatataaatcacagcatgcttgatcattctattgactggctgtaatttaaagtgatgacctaaaactgtatgtctaaacaaggaaaatctgtaagtgatttaggtactggttattttaaggaccatacctttttctaacctgagataattaggggatatactc

SEQ ID NO: 15525 - DNA, 1019 bp, Homo sapiens
caccacacccggcctccttcctttgtttctcctgaaaagttgttttaaaattcctgacacattgttatatttgtggtgcgttagaatcaatggaatacagtcttgtgtagtagctttttaaggtaactgaggataagaaaggtttaataagacattttattttacagacattcagtcccctgaagctgaatatgtagatttgcttcttaatcctgagcgctacactggttacaagggaccagatgcttggaaaatatggaatgtcatctacgaagaaaactgttttaagtatgtgtcattttcatttagaaaaattcctataagatgtggtgatttctctttataaacaaaatcataatgatttaaaattaaaaatcaaattcactttgttaaaagatgtgtttgtacaaggaaacatgactattcattaatccagtttccttctggggaaatatatagacgtgagtttccacagatttttcctttagacctttatgggagtattgtaggcccttgacaaatgttccttgagtcgattataggatctcattttatagttaaggtaacctagagctggagaggtttgcttcatttcccaagatcacacagtggcagtgtagagaaaagaatatacaactcttaattctctttttggtgctctgtacacccttgtctgtggctttaattattttacagttaaattgatttcagagaacaattataataggtatcatttttgagcactcactgtattctaggcattgtggtaagcatgttatatacattttcttcttcagtccttgcaataaccctgtgttgcagtcatcactgtattatagacagagaaactgagacttagagaggttaaatgatttgttcagtgtcaaagatctagtaagtgaaagagcccgctttgtacggggtaaccattaggctggaggcagttgctgatcactgggtatctgagaaatgcttcaggttactcacacgtaagtcttgaggtgctaaactttgtactc

SEQ ID NO: 15526 - DNA, 1033 bp, Homo sapiens
ctgtctcaaaaaaaaaggggatttagcaaattgcaattattactacttattttaagaagactgtgtctaaagataacaatttaacgtgcagctgcagagagtacatttacatatcattctgtgatatgtgacttttcatttagactaaataacttttaaattaaaatttcccattattttattatgaaaaattaaaaatatagcagagttaaaggaattttcccttgaacattcttatacccgtaacctagattccaccaccttttttttttttgagacggagttttgctcttgttgtccacagtctggagtgcaatggcgcgatcttggctcactgcaacctctgcctcccgggttcaagcaattctcctgcctcagcctcccgagtagctgggattacaggcatgcgccaccatgcccagctaattttgtatttttagtagagacggggtttcaccatgttggccaagctggtctcaaacctctgacctcaagtgatccacctgtctcggcctcccagaatgctgggattacaggtgtgagccaccgtgcccggcctagattccaccattttaataaactcactttaccacatgtctgttcatctgtccatccttgtagccatccattagaacatcttatttttcggatgcatttcaaagtaaattgctggcatcagtatacctcctcctaaataagtcattagctagatggatttatgtaagtagaagtatattattaactagagtccaatatttgtttatatgtgcttttaataaaagtattaccatacaatgaaatgtgcaaatcttaagtgtgcatttgctgaatgttgacaaatgcatatacctgtgtaacctaggcttctattaagagatagaatgttagcattatcctgcaaagtttcctcatacccattccattcaaaccacactccttcttcagaggcaaccactgttttgaacattttccatcatagattctaaactaattttgctcatttttaattccatgttttcttgtacacacacag

SEQ ID NO: 15527 - DNA, 1057 bp, Homo sapiens
aggcctgtttcttcctatgatatgagcgggtggcttccaccctcgctgtctaatacagtgggcactagccagccacatttgactatgaaatgggtctagttcgcatcgaatacacactggatttcaaagacaaaaaaagtcaaatatcttatgaataaatttaatgttggttatattttgaaataatattttgcacattcggggttaaataaaaatattttaaaaataaaatgtacctgttatttttactcttttgctgtggctactaaaaatataaatgacatatgctgccctggtctagatgctctctaatatccctttcagctttaagactccgccgggaacacggtggacacgtaattcgtacgatttgattgtctcgcattgagatacggaaggattggccgggagtgagcgggctggggctgggcggggcggcgcggggcgggcaccccccgccccccaaccccgcaggaaaacacaggcccctccggctttcgctctcgctctgggaactggaaggacccccgactcccgcgcagggtctggggttgtgcgcgtcgggttgcgtctccaggccgggggcgtcagggagccgggggcggggacgggcgcgggcgcagcggaccgggcggggccgagccgggaagctggtcggtgcgtcagcctcacgcggcgggaaggaaccggtccgaggccccgggctgccggcgcgggcgccgcggcacgtccacaggctgggtcgcgaggtggcgatcgctgagaggcaggagggccgaggcgggcctgggaggcggcccggaggtggggcgccgctggggccggcccgcacgggcttcatctgagggcgcacggcccgcgaccgagcgtgcggactggcctcccaagcgtggggcgacaagctgccggagctgcaatgggccgcggctggggattcttgtttggcctcctgggcgccgtgtggctgctcagctcgggccacggagaggagcagcccccggagacagcggcacagaggtgcttctgccaggtgagcgatgtgcgcgttggtgctgag

SEQ ID NO: 15528 - DNA, 1031 bp, Homo sapiens
gggctcaggtgatcttcccccctcagcctctggagtagctgcgactttaggcatgtgccatcatgccctactaatttttatattttgtagagatggggttttgccgtgtttcccaggctggtgtcaaacccctgggctctagcgatcgcctgcctcggcttcccagagtgctaggattacaggtatgagtcactgcacctagccttaaatttcatttttaaagagggcttagggtgagttttgtatttgtcctgtttattagtgagctggagattactagataaaagtatatttgactctaagtaaaaatgctttggtgatttaaatgcttatcaacttacatgaatgcagtgggaaaagccataatctaaacctgtttctaaggaaacttaagttttataacattaattcatattgttactagaatcaatttttattaataaatgctatctcctcaccctaccccctttttaaatttcaggttattatcaacccttactttgctaagcaagaaactgaactgttacaagattacccttgaatgtctaccacaaaatgttggtttctataaaaagtttggatatactgtatctgaagaaaactacatgtgtcggaggtttctaaagtaaaaatcttgtaagaaaattgtcaaaggggctaatgctacaaggctacactcttcctagagttgaaatattttgttgctgcagccgagtgacctccataaatactggactgaaaaaacattgtaatactacaagtataatgacatttagaagattactttgggctggtgggacatgctgtgaatttagattacaaatgaatattataaaggggatgatttttaaccaaaggaatatatttttaacttgaatcttttcttgcattgtatttttctaaaagtttggcttcctttcttggtagtcaagagtatgggtaataaggagttatatgtctgctatctgtgttgctcatttaaaaaaagtatacattgaataaggctgtttatcacatgcataaaattaaat

SEQ ID NO: 15529 - DNA, 1081 bp, Homo sapiens
aggcgctggagctaacacctgcagccatagtctcctggtttcccacctgcttgattatagcaaaggttgcgccacccttggcaagccagttctgagttactcctagtggcccagcccatctcttctttgggtacatttgtacgtacacatatttttgtagataaggcctttctaactcgaagtattccgatgtggacaacagcaccagggaaaagggctccagactgatttcacaaaaatgactcccaaaacaatttcatttaacacttaaaacacagaggtgcttttcctgattcatattcctaaattgtacttagtacagtcatgtatcatttaacagtagggatacattatgagaaatgtgtcaccaggtgattttgtcattgtgtgaacattatggagtgtgtgtacttacacaaaccatgatggtatagctgactgcacacctaggctatatggtatagccgattgctcctaggttacaaacctgtacagcattttactgtactgaatactgtagacaactgtaacacaatagtaagtatttgttatctaaacatatctaaatctagaaaaggtacaacttggctgggcgcggtggctcatgcctataatcccagcactttgggaggctgaggcggcggatcatctgaggtcggaagttggagaccagcctgaccaacatggagaaaccccgtctctactaaaaatacaaaattagctgggcatggtggcatatgcctgtaatcccagctactcaggaggctgaggcaggagaattgcttgaacctgggaggtggagcttgcggtgagctgagatcacgccattgcactccagcttgggcaacaagaacgaaactccgtctccaaaaaaaaaaaaaaaaagtacacttgtatagagcagtttccatgaatggggcttgcaggactgggagttgctctgggtgtgaatgggtggtgagtgaatatgaaggcctaggacattactatatgctactatagactttattcaataattttctttcttcaaacctttgcttactgtaactttataactacttttaacatcttgacccttttc

SEQ ID NO: 15530 - DNA, 1041 bp, Homo sapiens
tcaggcagaaaactactgctctagggccttatctcatacatagtaacacctaaaccatgcactgtgacctacaaggctcctgcctggctctctgatgccacctcctgctgatctccatttcctctcctctagccaccttggtctccctcaatggtgctggaactttgttttgttcatcatcatatctctagcactagaacagtgccttcttgcacacagtacatgttcaacaggtatttgttgaattcacgaattcagcacgtctgatgttcttattctgtggtagtgattactctgcaagtagtgctgactaggttggtagtgtgttgagtcttcaggaatgctactgaaaagcccagtatttgaacataagtcacaagcccccacagtccagcttacccatcttctaacactgtcttctacttcgctgtcagaacacctacttttctgtttttatcttttgccatgagtggtattgacacttctgatttttttctggtctcctatttctgcttttattttgtgtaattttttttctatattgttactcatccactagtttctctgggtaaaaaagactagttttaccagcgttgccagtcagtaagagagcttattttttttctgtgggtaaacggaccactcataggatgtccagtatgtaatctttggatcctatccccttctcttggtgggtgcaggttgatagctcctttgatgagaaactgaggtggaattcatgggggagggacaggttttaaagggaaggatgagtatcaggggagatatatgtttctgaggtcacagttggaagcctaattgatggaaaattgagattttattgtaccattatctaagtgcaagataacactgcttacaacaggggcctgcaaagttttcttttcttttctttcttttttcttaagtatggatagtaggtattttgggcttttgggctttgtgggccgccatgcagtctgtgtctaatgttgtggtgcagaagtagacatagacaatgtgtgaacagagtagtgtggctgt

SEQ ID NO: 15531 - DNA, 1035 bp, Homo sapiens
aggtgctgaaaatacaatggtgatcaaaatagacattgcctttgtcttcttagacagtttataatctattaggaaagaaagatagcaccctcctcccccacccaccaacaacaaacaaaatgaatataaattttgatcagtgatatcacaggatactgaaatacaacagtatggggggacataggacattggagggctagggtagctaaaaaaggcttctctgagaatatggaattaatgctaaaacctgaaagatgagagagagttagacattccaggagtggagtagcatgtacaagggcactgcggcaggaaagagcttagttatatgattcttagaactaaaaaaggccagtgtggctggagcaaaggaagagtagcacaggataaatttggaggagtagataggctgtattgtgtggggctttgtagacctgatacggcatttggattttatttaagtgcagttagaagcagttgcaaaggattttcagcaggggaatggcatgaaagcgctgaaaagatgactctggctgttgtatgcaaagtgctgaatggaatgaaggagaccagttaggaggctgtggcagtagtcagtgcaagagatgatggcagcttgaaatagggtggtgccagtggagactggagtggagatttttggaagtggatttgacagtttgctgataaatgtaaggaatgagggaaagcgaaaatcaatgactttcagattcctagcttgagcaactgggttgacggttggtgctagttagtataataagagtagggataagaaaaaaaattgggttacattttagataaattgagttatctgtgggacatcaagaagagatgtgagataggcagtagggtgtataggctggcgtctgagtagaaggttgggctgctgacaccagtgacgaaaataagtgtcttttaaagctatgagaatggatgagacacctggagagccaatgtaaggaaagaagcacacggttcctagaagatgggaagggcagcagagcgtaggaggtggga

SEQ ID NO: 15532 - DNA, 1056 bp, Homo sapiens
caaagtgaagctccttacaaggtagcctcttccttaagactgcattgtttggctccctgagatacagctcaggaaagaaaatcctcctaggtagcccagtgaaaattagattttgctgtattgattaaccatttaactggcagttaacagtatttttatctgatttgaataaatcagtcactgtttgcaaaatatgtatgaaccttttttgtccagctctggtatgagattatttaagaaggaaaatagcaaatatttggatattttgttttcaaagaaaacaagcatttttgttagagcttttctaatttatggtaaatggaccatattaatacattggtctcaataggagatattttttatattgcaaaaaaaggagctgttgaaggtgactgagacaacttgtagttctcgaaagccaggctgtagctaatgaataaataatggtttctatatttattttgcattgcttaggactgtttattatagaatcacagtaataaatagaaatatagagaataaactgcagacagaaatgatgttaatttaaatgactataatcttaatcttttaatgctgatacatttttaattttttatgcagagaaaagaagcccaacaaggtaggaaatgctgtgcgtatggaaaccttacatcttttctgaactgaattcatactgattcctcttatattttgaattccaaatagaaagtgcctctgactttcctgtttggtaaaagtagagctaagtgatgcttttggtttttaggattagatgctttgaatggtaagctatttcgttgcctatcagcaagtaaatagaggagagattcggtagggcagcatttaaaacatccacaaatcaggctagtcaaattagaaaagaactttgtaatttttcagagttgcgtaaaactggaatgacctgccttctgaagccctgacttatgtcactgaaggtattaaagggcagactggatgactacttgccaacagtggctagagaggatcaaagcagcttgcagagtctagataaaaggtggagatggtggtagg

SEQ ID NO: 15533 - DNA, 1050 bp, Homo sapiens
gggacgtgggaactgagtgtccatgtgacggacctgaaccgcgatgtcaccctgagagtgaccggcgaggtgcacattggaggcgtgatgcttaagctggtggagaaactcggtgagtagcatcccagccgcgtccaactaatgacttcccagaattggtagggggaggaaagaggctcacgacgggggaggggcccatttgagaaatcttggcatctcgcaaatgctttttggagatgtaaaatctttcagtatttaagcagatagacctgttcccctttgcgtcttattttgttttgctattctctgaattttcatatgtaatgattcgagcctcccaattataaccttaattgcgtagttacgcgggacgggggatgtgtgccggggaactcgttaattcttaacatttactgacagaacgataaaagaatgaggaaagtgtgttgggagggtgatattacagtgtccgtggttatctatgtcttcagcatacctgaatgttagtgacgtttggtatagagaatgatgcaaaatccatttaagaaaaatctgtgctggaaaatgtgcaactactggcgccagtgtgaagtttctgtggctgttctacgtggtggagtgcattaaaatgttccagtcatccactcttactaggggtggggcagtgcttgacaaacttggtatccatagtccatgctcgatgtaagccgtttcgagcgttcggttttatattaataacaagccaaggaaagaactttgtgttaaaaagcagactttgttaaactaatttgaggttgacggtgtttgcttgagtacaaatatgtattggattgatatccgatttaaaataataaggtatcttacagtatgaagtgtgtgaagagtgtgcagtacacatttttgtgatgaatgaaaccattttcatctggaagagtcagctaaatagatgatttgatcataagagaaatgctcagagaactatcttcctgagctttaaagagccttttgtacataatacagttgtgataagatgattatctgtgtggcatt

SEQ ID NO: 15534 - DNA, 1233 bp, Homo sapiens
atttgctctcagcttgaacgttattggtgtatagaaatgctcctaatttttgtgcattgattttgtatcctgaaacttgactaaagttgtttatcagtctaggagcttttggcagagtcttcggggttttctaggtataaaatcatatcagcgaagagagctagtttgatttcttttcccagttggatgccttttatttatttctcttgcctgattgctctaagttgaatgggagcgatgagactgggcatcctcttcttattccagttctcagaaggaatagttccagcttttgctcatccagtatgatgtctgtgggttggttgtagatggctcttattattttgagatatgttcctttgatacctagtctgttgaggggttttatcatgagggatgttggattttatccgtattcaataaatggtgttgggataactggctagccctatgcagaagaatgaaactggaccccccacctttcaccgtatatgaaaattaactcaagatggattaaagatttaaatgtaagacctcaaactgtaaaaatcctagaagaaaacctaggaaatacccttatcaacatcagccttggcaaagaacttttggctaagtccccaaaggcaattgcaacaaaacagaaattggcaagtggggacctaattaaagcactctgcacagcaaaagacactatcaacagagtaaacagacaacatacagaattggagaaaatatttgcaaactagacatccaacaaagatctgacatccagaatcaataaggaacttaacaagcaaaaaacaaccccattaaaaaatgggtgaaggacatgaacagacacttctcaaaagaagacatacaagcaatcaacaaacgtgaaaaaatgctcatcactaatcatcagagaaatgcaaatcaaaaccacaataagataccatctcacaccagttagaatggctattgtaaagaagtctaataacatgccagtaaggtttcagagaaaagagaacatttatacactgttgtgggaatgtaaattagttcagtcactgtggaaagcagtttggagatttctcaaataacttaaaacagatctaccattcaacccagcatatgggtttatttcccaaaaggaaataaatccttctaccaaaaacacatatggtcatcacagtgctattcacagtagcaaagacagatcaacgtggctgcccatcaacagtggactggata

SEQ ID NO: 15535 - DNA, 1052 bp, Homo sapiens
gcatgcattatttctgttttctctctgcagtgatcagtttggatgacagaaactttaaacttttattctggcattgtccagttctgattttctcagctggaactggtgcatgcacatttaataatttcaaagaagtgagaggtaaatgttttctcctgcattatactgtgtttctctagctgaattgatccgtttgttatcttgctcacccgaaacaagtagttgtgccctacagtgagcaacctcagactaggctgttctaagcattctggagaaaataatcctcatcatacagtttgtggtaactcttccaaaaagtttatgaaaattgaaagatctccctatgcatcagctgtggctgccacattccgttctactaggaaggctagtggccacaactccctctagaacatcagaggataaagtacacttatatattagaaaagacaggcatattctgattatggttcattcacaatttctcagtccagggttcagtcagtgaccatagctctgaggtcttcaggctaactccaagaacccgtgccagatagaaacctactcctactacctttccactcaccttcccattcccccacctttgctaccaaagtgactttaaaagtcgagttttaggtgtttgtttttttaacagtctaggaatttcagtgcaattccgtgaggtggtgctgaccttagatgagaaatacgtggccaggctataaggactacatgtagaattgagatgggacagtgtacgtatggactgtgaggggaaagaaaaggtaaatgtgtgaaaggaaagagattggtgcatggtcatgacagtctgacagcttagacatttcagaggcattgtttatgagaaaggggatagggacacataggtctgatgacaaccaaagccctttgatgatgccatctgtcactcaaggctccccacagcctgcccaacctgactctcctgcctgcttctccactgcctaccttcaacaatcaaactatatttttgttacagcaaactacattccatttgcctttaaatgcttgca

SEQ ID NO: 15536 - DNA, 1028 bp, Homo sapiens
atgttagttcatactttcttttcaacagtaatcttgtttataatccagtgtttctgtgttttaggacataatttaaaaatatactggattttggccaggtgtggcagctcatgcctgtaatcccagcactttgggaggccaagcagggaagattacttgagcccaagagttgaaaaccaacctggacaacatggtgaaacccagactctacaaaaaatgcaaagattagctgggtgtgttggcagacgcctgtggtcccagctactcaggaggctgaggtcggtaggactgcatgattccgggaggtcaaggcttcagtgagccaagattgcaccactgcactccaccttgggtgacagagctggacactgtatccaaaaaaaaaaagtatgtatttacacacacacacacacacacacacacacactggatgttctaataactgctcttttgtatgtgaagcaagccttaggaatcttacgttttacttctttctgttaaacggcatctgttatcttttgaagtactcacactgaacatgcttcatgctgaatactcacgctaaaggcctcagacatgtaaacattcatccttagtctcttttttctctgttttctcattgggagctgaagcatcctagtctgcagaaaatttaacacaccatattccagctttgcatcacctagacagtagacaaaaggaaaagaaattgtcagtaccgtatcacagctagtgcctctgttcattccagtgatagtacatgagccccttccagtggagtcagatcaagccaaaagattttcctgtaaagtctgtagtagaagacaaatttctttttgatccattagattggtatttctatcttctcagctaattaatgagtaaggcatgtggacaatcgagaaaactaatttgagtgtatgtattaaaattgctcttctaaaaacacgtaaaatattaaagatcaaggcagagcaaaaaagaacgtagcaatcatatactagaaaaagaaactaagttttgctaaa

SEQ ID NO: 15537 - DNA, 1026 bp, Homo sapiens
tgtatgagacattactgttttaatgtttgctttgaacataatttaagaaccagatttattttctatagtgataaacccttttttctcagaactccatctttgtactcttcagatgaatatatagacactgtggcatacattttttttcattaaaaacttatggcttcatacaacactagttcaattttttaaataaactttttattatgttacatgtacttcagagaaagctaaagtttctctaaacttgacacggagtactccataatgggtacatttcattagctttattagaaaactagtaaatgcttttgaataggtagtatgacagctattttaaatgtataaacatttgtgtgccaaacaacatatatgaagggatgtgatgccactaactagtgcacattgtttctcaatgtgccattgagacacaaggcacagtaagtcaggattctgaggcattggaagggttttcttcagctgtaattgtttccacagtgcttttcatctgaggggctcaaagtttaagagtgcattcaataacccatgtactagcttcttgaggtaagtaaataaatcttgttctcatgttacatgttaatacaccaaggcaccaaaacatttaaagtgccatgaattagattacatcagaaatcagaaaagcttggattgagctagtcaccgtggttcacgcctgtaatcccaacacttcgggaggccaagatgggaggatctcttgagcccaggatttcaagaccagcttgggcaacatagtgagaccctcttctctgcaaaaactgacaaaaattagccacttgtagtggtgtacacctgtagtcccagctactcaagaggctgaggtgggaggatcacccgagcccagaagttcaaagctgcagtgagctctgatcacaccaatgcactccagcctgggtgacagagccagaccctgtctctaaaaaacaaaaaagaaaagcttgggttgaagccaggccatattcttttatatgctgttcaatgacttga

SEQ ID NO: 15538 - DNA, 1148 bp, Homo sapiens
gtcctaggctaatccatgtagatttgagcctactttggccaagagctgatctcacagcacatacagaatgatgctactatgtagaccctcactcccttgggaaatctgtcatctacctaaaagagagaaaaaagatggaacataggcccacctagtttcatccatccacctacataaccaacatagatgtgaggtccactgcactgatagccagactgcctggggtaaaccttttcagggaggacgagaaactgaaacaggttcatcaagtacaagctagcttcctaatacccactttgatggagacaatctgtagataaatatggaaggatagatggagtcaatctggttagtgacactgagtaaagtccctttaagtgataaaatgataagggcacataatataggacaagaatgaaatttaacatttgagtgcctactcaatgaaaggcagtgttgtaagacagtaatagcatattaagaataatttcaggaacataaaatcaaagtggagccaaataacacatgttataaacaggaaatatcttcctttctttgacttaaaaaacagaattgtaactaaagagtgttggactaggaaaacattatgaagtggcatttgaaagtgaagtcttaaaaattataactttgtggtcttcaccaatattaacacattttccaactgtttttcatcttctttttcctttgtaattcatcttgactcatcttcattgtgcttgagcattccagtttcttgttctatttttgtcttcccgtctactgtgtcagaatgtactacaaatctaatacaaatgtcccatggaatacaaaagattaagacatttactaactcaccagtccacatggatttcagctatttctgacttgttattgattagcttattgtaatttaaattttaaaaatgcagtccaggccgggtgcggtggtgcacacttgtaatcccagcactttgggaggctgaggtgggtggatcacaaggtcaggagtttcaagaccagcctggccaacatagtgaaacaccatctgtactaaaaatacaaaaaaattagccaggtgtggtggtggacacctgtaatcccagctactcgggaggctgaggccagagaatcgcttgaacctgggaggc

SEQ ID NO: 15539 - DNA, 1917 bp, Homo sapiens
tgcagatgtcaagaaaactctaactgctgaagaaaattaatttcaaagaattttgtaaggtagcaggtaaaaagtcatggttctctgtaatgtcattaatgtgcaacagtagtgctagtaaacatcagagtgagggagggagcaagaagagcagggtagggtttaaccccctagaaaaagggtaatgaaaacgtatgtatagaatctacaggctctgagggaataaaacttttttaggttttttttttctgtttaacatagtaatttcaaaataatagagaaacccccagttttttcttccagaacagcagttagtagaggtgcatagctgtattgcatctttttattttgagagcttaacaaaatacatactatgtcattcttacacataaattctttgatagtccgaatggtaaaatagtcaacaagactcaatatgaggtaattatgagtcttacacatattcacatattacacatacttatatattatacatattacacatattcacctctagatatagatataactattaaaattggactattataataagattctgccttttaaatcctattcccaagatttgctttactaattatttggcttgcttcaataatgtaatctgtgtaatcgtcataatttctcgtcgttaagtgctgtcttggctatatcgtgcaaatcataaaacttttcttcattaaatcttctttctgaaatttggtcattgtgattaggtgattctggcttccctcctttcttccttctacttacattaattgcctcagttcttctggataacctttattctgaagctaccgactttgattcacttgctatttgagggtaaaatggggcacaggcttagaattcatgatctgtctgtttctttatgtgaagaactagtgttgtcaattgaaacctattttattttcatccagttgaagcatcttacctagctattcttcttttgaaaagtctagacttcttttctaacatataatgcaaagatctgtttcttttagcattgttttgcatctaggttaggaactaaattagctatgaatttggggactatctgggtgttaacagattatgagattatatttcaagttagttatgcttacattttccatgaaagagctccttacaaaaattaagatgtgtactactttatgtatgctagatttagtcagtttatttgggagtattgttctaacttttggccactacatcattgaaggccatttttaatcatcagccaaccctttacagcatcttgtgtttttttttcacagatttcagacttcaagaatcgttctttaatctcccacaacttctttttccggaaaatgtaatgcagaataaagataatgccctcggtatggtatatgtcaggaatagcattcagaatactataaaaatgatctacttagagttcttctgcttattgaaaaattggatcagttcttctatgagatcccagcttcagtgttaccattacagactattttatgtgtattttcatcccatattttctagtcttaaatggtagtggttctgaaacctgaaaattgactagccacttaatgtgctaaagtatatttgtgtatacttctacaaagaaggaacctgaagaaaagcataaggtcattttcttccttctttattgtcctaaaggctccaaagaggtttgctatttcttttcatttaatacatttagatataaaagggtttctaatagtacaaagaatgtcatcattcttggttatttcaggtatcagtaaatttaccacttagggttgtaggtatgtcatagctgattgctttcaacacagatatttaatgtagtttaggggagtacattcacttttaaaaacagtattcttggatgtaagagatatttttaatctctta

SEQ ID NO: 15540 - DNA, 1095 bp, Homo sapiens
aaaaagatggaggggtgctcaccttctaactagctttccttttcttctctctttggtgactaagaggattcccaccttctagcttttagttattatttaatttttataaatttatctaactttatttctctgaggtccaagaaagattgccagaaattttctcattatagttggcaggttagagatgtgtaagactgcttccctggggttggaatttttcaggttgccagcttttctaaagggaaaagttagtttttctgttgtaggaattagtatgtcatcagcagcagtaaccctcttttgtgatactcttgtgctttcagagttatataatgcagaaagtttctttaagatatagtaaggaaatttattggaaatatttttagtattttaaatctttttcattgctatgtaagactttaacatattaatttttattaaatgttagcactaataaattagcatttgcagttgtgttttgaggttatgcatcttttgctaatactgtgtaagaatttctaactaaaactgtattttaaaaaaagaaaattaaatagtgctttctggcacttgaattttctttaacagtgatctttgtttggatcgatagtaaactctttttttcctctactgtacttatcatagtacccctaattctgtgctttgggttgaaaaagttaagctctgtatgctacaggatgtgtaataaataaagcaaatgactttcaagtgaaaataagaattacatttgaaaagaaagaaccatgtctgtttaattttgtgaaaatgttttaaatatgtttctctggaggatgaaaaaaatttttttctttgtttctctgtgtataggggtgtttgtctttttattaatccttaaattatactattcttttagaaaagaaagccttcatttgtgtatcttggctagctttccgaaagcgtttacataattttaaaacatggtcaaatggtccatacatttcccatttcgttctcgtttaatatttaataatatggaattggttcacgttagttttactaccagatctacaaaatctagtttttgtttcaagcagtaaagtctcaagtttgtgt

SEQ ID NO: 15541 - DNA, 1048 bp, Homo sapiens
aataaagataacccacaaagagataatgactttgtgatttagatactttaatctaaatttagttctctgtgagagttaaaatgaaaattgattttcttcttaccctacctcctgggctagaaaatgtttagcagtttaacaaatgaaagcctactgtttcacttgggatgaaacataaaaatagaaatcaagatgtcaacaagtaatttggtaaacattaatacttaaatctactgctggattagtgtttcactcattttacatcttattgatccaaacatgcatagtaatcagtaaaaaataggttgaactgaatgggtaagtgcagcacatcactctgcccaaaaaatgagtaaactcaattcagtcgtgagaaaactcgtactgagggtgattctacaaaataactgactgaccagcagtcttcaaaagtgtcaaggtcatgaaagacaagtaaatattgaggaatttgtcacagaatagactaaggagacatgacaacaaaatgcaatgtggtaccctagattggatcgtagaacagaaaaagatactagtggaaaaactagagaaacctgaataaagtctgtatattagttgatagtattgtaccactgttaatgtcttagttttgataattatactatagttatgcaagatgctaacattaggagaagctggatgaaggatatgtcatagctccctgtactatttttgctattttctgttaagtctaaaattattccaaaatacaaagtttaagtctagtagaggaattaaaatggaatactaaaaaatattcaattaacccaaaataaaccaagaaaaaggaacagagatacaaaaaacagatgggacaaagagaaaaataaatggaaaaatggcagacctattcacccatatcaataacaacaaatataaatatatttgtatatataagataattaatactccagttaaaaggcaaagtgacagattgtttaagaacgcaagacctgactataaaaatcacagataaattgaaagtaaaagattggaattcttactgttc

SEQ ID NO: 15542 - DNA, 1026 bp, Homo sapiens
ctgcaggcagtgggatcaactattctggtgagtataactgtacaggtagattagaatttgtagatttgtctgaagtttttcttctaaaaccgtttcttcatccatgctagtctttatttgggaggtttcttggcaagctctactgaatctaatgaattaaaatattaattgattttttcccttcccctcctaaaacatctctaaagcagaaaaactcaatattgatcaggtgatttacagaatgaagcttgaaaaaaacgaattatgtggttggaagtaattgtttacataacataattaatgtcagcactaagctttaagttggcaggggatttttttcttcttcttgttagtaacactccatattttttctctctgccactctttgctctctcttacctctctgaacatatgtatacatttgtcacaagcaaggaaactgtgtagtttagcttatatcaaattaaaatatcatttgcatctagttgattaaaagtctatataactgaggaaacttgtgacttctgaataaattagcaattaaagctaacaaatttatataataatagttgtcttttatgtgccagataccatactctggaaattctaaatatattttcctaatcggtagaatcaaatatgtccttatttcactgtaaaatttaaactaaaggttcttacatatcaataaataaggagcagcccagtgtaagagctctaggtatgtttctacagattgccatgtaatactttgttctccttatagtaaaaatagcaagttttatatatctgtgatcttatggtagtgactgaaatatttcataacttctcatcactattggtcagaataatttcaaaagtctacttcatagtatttgaaggatagaccttttatcataaaataatcttattgccattggagaagtctgagttccagatttttttttccttctgttaattcccctaagtattctgcctcaaaaatgtcagttcaccatcacaaacccagtttagccacctgaattt

SEQ ID NO: 15543 - DNA, 1042 bp, Homo sapiens
cagatgatccgcccacctcagcgtccttaagtgctgggattacaggtttgagccaccacgcctagctatgatagttactcttatcttttgagttctcaagatgtatgaagacataacacctgtatctaagaattccagagaaaggaggaagactaaatagaatacagttaagaaaaatactgacagacatgtacagaattatttcagtgaaatcatagaaggtgaagaaaggctttcctgaagaagtaaatgtaaaagctagctaaatgtagaaaataggcacaagcatcccagacagaaggaacagcatatgcaagatacagaagtaagaaccagcacaacacattctgggttttaaggaggagagagtaaatgaagggaatctgaatgtatgtgcatgtacttacatatacacttgcttgtgagtaggcattgggtaatggtggtgagagtgttgtagagttgaaactagggatactgagtttacgtaggaggcttctgaaataaaacaagaaatgattagtgtgaactcaaataatgactgtaggcctgataaacaagggatgaatttgagagtgatttaggagatggaataaacagcatttagtgtccagttgtaagaagtacttgaggaggcagcatcttggatgactcccaggtttctgccttgggtagccacctaaatactgtcagctttccattcactgtgatagggaatgcaggtggaaaaatgggtgtgtgttttgttttgttcaatttttttccaggaagctaagggtttcatgactatttgtggttgaacaccagtaaagaacctctactgcttgggaggtgagaactaaatgagagctgaaaatgcattttgtatttgagagtataggttgtattatgtagtagaaagagcttgaatgaactttgaactcaaactttggttggaatcttggttctcacattactagtagctatgtgcctttaagcaaattatttagtttcactaagacttagcttattcatttgtaaagttgggagaatgatagccttt

SEQ ID NO: 15544 - DNA, 1032 bp, Homo sapiens
ataataataataataataataataataataataataataataacagcaattatctggtacatttgtgtctctgtacaaatgtgccagaatttctctagattatatacttaggaatagactgtttcaaattctctgtctgtctctctcattaccggtgaatctgagcatattttacattatagttttgttaactatttgggtttctccttctgtaaaaatgttgttatattttaatcaggagacagaaaccactcttaatttcaacagagagagtataacataaagaattactggccaggcacggtggctcacgcctgtaatcccagtactttgggaggctgaggtgggcagatcacaaggtcaggagttcgagaccagcctgacaagcatagtgaaactccatctctgctaaaaataaaaattaaaaaaaaaattagccaggcatggtggcaggtgcctgtaatctcagctactcaggaggctaaggcaggagaactgcttgaacctgggccaagatcgcaccactgcactccagcctgggcaatagtgtgagactgtgtcaaaaaaaaaaaaaaactattagcagaggaacaaagtaacagagcaaagagaagtgtgtaaagaatacagaaataatagatacaggtagcagccactatctgtggaactgagatagagcacccaaggaagagacattccctctcaaggttgagattcagacctagttgcagagtgtggcagtggtcacaaagtgctgccccatggggactgttagaaatctgccctcgggatagtcttccccagggaggtgcctagctgtggaactcattgtaagctgcctgagtaggtgctaaaaaagtagtccaaggggagttacatagcaggtgacatttcactatgaaactgccaggaggtctggggtggttggtgccagggaagcagctcatgagaaggtgccacggctgttagcacctggacgctgccaaaaattaaaatctgcatcctgcaggaacccaataaggtaagcacact

SEQ ID NO: 15545 - DNA, 1160 bp, Homo sapiens
ctaaaagttgctattgcttagatcctttctgtaatgggaaagatccttgattgatcattcctttctatacaatggggatacacatggtacctgccttctaggactccttgaaggattaagcaaggtaatgtatataagagacctaacagggcctggcgtgaagtgagccctccagagatactcattctattattagacacaactccagagtgtgtgatgtttggatggcttctctaagctctgatccgccattaagctttcagctgtgccgttctacttgctaaaattggaagggaataggggacaactacagcatatgcactgagccaagtcatatgttaggcaaaagtccataaatgcaaattaaaatcactgtgaacttgtcattagtcttgtcattttctgtgatactagtttgctatataaagcatactctctcatgctctgagtttttttttaataattagtaatgttcaaattaacatcttttttcttcttttcagcatgatctatgttttggtgagctcttagaacaacacacagaagaattggtccagttaagtgcatgcaaaaagccaccaaatgaagggattctatccagcaagatcctgtccaagagtagcctgtggaatctgatcagttactttaaaaaatgactccttattttttaaatgtttccacatttttgcttgtggaaagactgttttcatatgttatactcagataaagattttaaatggtattacgtataaattaatataaaatgattacctctggtgttgacaggtttgaacttgcacttcttaaggaacagccataatcctctgaatgatgcattaattactgactgtcctagtacattggaagcttttgtttataggaacttgtagggctcattttggtttcattgaaacagtatctaattataaattagctgtagatatcaggtgcttctgatgaagtgaaaatgtatatctgactagtgggaaacttcatgggtttcctcatctgtcatgtcgatgattatatatggatacatttacaaaaataaaaagcgggaattttcccttcgcttgaatattatccctgtatattgcatgaatgagagatttcccatatttccatcagagtaataaatatacttgctttaattcttaagc

SEQ ID NO: 15546 - DNA, 1029 bp, Homo sapiens
acaaaacaaaaaaccaaaaaaaaccagtactcagaatgagaaagagaaggagaaagcaaatatagtaaaaatggacatttggaatatctgggtgaaaggttcttgtatcttttctgtaagtctaaaattatgccaagataagtaaaaacaaaacacctattttctttttacagttcttcctatttttcatggatttctgaaaaggcagagactagaagaaacttgtttagctatctcattctgctcatttaggggctctacttttaaaattaagatggtaaaaggaaagcattttacccataagtaaaagaatgcttccctttatggaccacctctcgtaacagatgttttagaagaaagacctgctttcttatctgaacatttactgccctttctgaatgcctaatagactgtgtttattccaggtatatgagtagaccagtgatgagtggcccaggactctatgaccctacaaccatcatgaatgcagatattctagcatattgtcagaaggaaggatggtgcaaattagctttttatcttctagcatttttttactacctatatgggtaagttgaaaaggtaaaatgaaatatgctttcactttgctgctttaaaagtttgcaggcattatggttttcacacctcaaaatccatttgaagaataacttagtgtcttaagtgtgcatggtgcacaccagcaaattcgcacacattcagtgtggcccacactggtgcttgtcaaggcagtaaaccagcctgccatcagaggcagaaggtttggtcagggatgctgcttcataagttttcagacacattcagtcagtaaaggatggtcctcattctccatggcaaagtgatgtcattgaaggatagggatgtgtgagtttgcagaaatttctgcttgtcttcagggtctctccagacattatgtttcattttttccttatcattcttcataagtggtgtgctctgccctttattttctgatttgcttgatttgagtggtatgaatgaaagaagtagttc

SEQ ID NO: 15547 - DNA, 1029 bp, Homo sapiens
gatggtccaagataatctcattcaggaggcttgaaacattaatggtttagtcttgtgaattttaacagttctctgtcatcgtttaacaaaaccaacaactgacacaactccttaagctgtggtttcagtctctgctagttcatattgcatgtttattttggacagtcttttgttaagcatggtgcttgtactggtttaaataaaatgttaacattaaaagacttccagcttttctttttttactcacctctttccccctttggagttactggtatgtacctggctagatttgtgtgagccataaactttatctggacaaactgagaggcaaaataaacaagtcatttggcagcttggtggaaggagaagataatcaagttataaaaatttctaaaacttggtctgatgctaaaatgtagaaaatgtcagtaaacagtagtagggacagacagagctatttcaaacaatgaacgcttgctttcaaagggagaattcgaagttaggagagctgtatacttcgtaagaaatcaaattgaaggtttttttaattgaatatagcttatcactatgtattaaacacccattgacaacccgtcctacctttattaccaactgtactatatggtatatgttcaataggtatctactgaatgaatacaaatcactaataacatagtttttagagtttgccatgtacttgtgattgtgtatgttgtaatagtcacaatttgttatgatggtgaaaggagtagtttatgccttcctgtctttaagaatttcacaaggaaaattggcccaagcatgggaacatttatatcttccttatttatcaaatttggccacttaacctactcaaacagccagctcttaaattttttcaccttcactaaataatacctattgtctttttgtccttttcacttttcagcagcaagaagcatttgtaagcacttagcctctgaacctgggcgcactcttgtaaccacccaatgggttctccttgcctgctgcccagacagagccaattta

SEQ ID NO: 15548 - DNA, 1818 bp, Homo sapiens
atttattgatttgcccatgttgaaccattcttacatccctgggataatcccacttgatcacggtgaatgatctttttaatgtgttgttgcatctggttttctagtattttgttaaggatttttgcatctatgttcatcaagcatattgacctatagtttttttttgttgttgtatacttgtctggttgtggtatcagggtaatgctgttcttgtagaatgagcttggaggtatgttctccccttcaatttttttgaatagtttgagtagaagtggtgttttaaatctttggtagaattcagcagtgaagccctcagatcctgagtttttctttgatgggagactttattactgtttcagtctcattactcattattggtttgttcaggttttctatttcttcatggttgagtcttggtagattgtgtgtgtccaagaatttatccattgcttccaggttttccattttgttatagtgttcataatagtctctaatgattctttgtatttctgtggtatcaatcgcaatgtttctttttgtctctgcttttatttcttttgcacattcttagtagctcctttttatatctctataatcatttaattataatataaaatattattggtctttactcttatggggtttttaacacttttgttgcttatattttttttcccctgtaattgtgaggacaaaaaataatttattaattctaagtataatcagattattttcttgttcttccttcactgtgtaaaaatagtatgcttgactccctttctaacagcagacagtgattcttgactttccccatattcttcccttcctctccagttctgatgacattgcacattattatgtgtgtggtttttgagacattcattagccaaagagaaagttaaaatataccttacatatatgagatgaacaaatttgtaggattaagcaatgtagatccaaaggttggttgattttaaagttcttttaagtgttcatgtatttaatgctttcacttaattgacatttgtgaatgtcagtatgcattataaaggtattaggtttcataactttaacatgtacatatattgaagtcatggcattttatgtgtgttttttttcttttatagagtgagtctttggttgtttgtgatgttgccgaagatttagtggaaaagctgagaaagtttcgttttcgcaaagaaacgaacaacgctgctattataagtaagctaaaagtgattgcctcaaagttacatggtcttaatttgtttttaatcttgtagctacattgaatgaactgaaccgttggaaagcaatgttacttcctctgtttcatttccccaccaccacctttagatcactttaaaaaataagtaacagctaattctaatgtcacagaacagaggtggattgtcccacctcccccatagtccttttatcagctgcctgtacagctctggagaaggcggtcgtcttggtccttgggtaatgaggattcccatctgcagtgacccatccaacccatccttcttgggggactaaaaatagcctggccattcatcctcaaatagaaacctttgcctacacctaaaatgacaaagttcagcattgtgtacatagtgactttgggcattattccagttgtagatttgaactctggtttcaggaagagtacttttaagtggcactggcactatcttctgaaaatggaaaaagtgatttgcatattgctcctcccactgtgagctatatctgacattatgcagatttcccttgtattcataggcagtatttaatatgtaggtagtgatttagaaa

SEQ ID NO: 15549 - DNA, 1055 bp, Homo sapiens
aggcaggaggatagttgttgctcaggagaacagcctgggcaacgtggggagaccctgtttcagaaaagaaaagtccatggagcggaccatttaagattattattattatgtttattttcatgtttttgagacagggtttggctctgctgcctaggctggagtgcagtggcgcaatctcggctcactgcagtctcactctgctggactcaagtgatcccacctcagcctcctgaatagctggaactacaggcttgtgccaccatgccctgctaatttttgtatttttgatagagacgggtttttgccatgttgcccgggctggtcttgaactcctgagctcaagggatctgcctgccttggcttcccagagtgctaggattacaggtgtgagccaccatacccagcccatttaagattattataagccattaattgaatataatcatgcattacattatgatgtttccttcaatgatggaccacatgtatgaaggtggtttataagattacaatggagctgaaaaattcacattgtctggtgatgtcttggtgatcctgacctgtgtaggcctagagtaatgtgtttgtttgtgtcttagttttttcctctcgtctcccccatgtcttagtttttaacaaaatttaaaaattaagaaaattgggccaggcatggtggctcacacctgtaatcccagcactttgggaggccaaggtgggcggattacttgaggttaggagttagaaagagaccagcctggccaacatgttgaaaccccatctctactaaacatgtaaaaattagccagatgtggtggcgcatacctgtagtcacagctacttggaaggctgaggcaggagaatcacttgaacccagaaggtggaggttgcagtgagccgagattgcaccaatgcactgcagcctggttgacagagtgagactccgtctcaacagtaaataaataaataaaaataaaaattaaaattaaaaatagaaaaaggtatagaacaaggatataaaatatttttgcacagctgtacaatgtgtttttgtttta

SEQ ID NO: 15550 - DNA, 1037 bp, Homo sapiens
tgaggtgattggcacagtcaatccagtataagctttggagtttgataggcttagggtttatatttggctctaccactggggatatgaggccttgggggaccacttaacctctcagacttattatttatgatccttgtaataaaagggacaataatttcctgctcagacctccttcttagacaatctgcacagtacacatctccagaaggatagcccacatatctcttgccatcacttcgtctggccacagctgtgctagtagaagtgcaattgaccccaatattgggggatctaatatctctcccatttgtctggaatttggacacagaagccaaattagttcatctgcagaactaaactgcatggtcatgtagagatgatgccacagccacagcagaggaaagctaaagtggggaaggagagagagcatcactgagcagagaaaaccaatctagtgaaagttggaaaagcgggaaaaaaaattaaaaacaaactgaaaaattatcacctcaatattgtcgcatctgcttttgtggctctgctaacaaaaaacctagagaaagaaggatgaagagttggcattctaattcttggagcagattaatggcaaatgaaacattttgcccaagattggaaaaggcccctcaaaaagagtgttcctctctgaagactggattggaattgatatagatggtgtttccaaagagggaggagtattaatgtggtttggtgagatagagactctatatgacatcatttcccccacatatgaaatgttatagcagctgattaaaaatagtagctgggtgtatctaaaatatatgaagaactcttaaactcaacattaaaaaccaaaaccgaaacataatccaattagaaactaaggaaaagacatgcacagacattcagtaaaaggttatacagctggcagataaacacatgaaaagttgttcaatgatcactagccattacagaaatgcaaattaaatctacagtgagatattactacaggcctttcagaaaagccaaaatgaaaa

SEQ ID NO: 15551 - DNA, 1024 bp, Homo sapiens
tagtctgatgggcttccctttgtgggtaacctaacctttctctctgaacattttttctttcatttcaactttggtgaatctgacaattatgtgtcttggagttgctcttctcgaggagtatctttgtggcattctctgtatttcctgaatttgaatgttggcctgccttgctaggttggggaagttctcctggatagtatcctgcagagtgttttccaacttggttccattctccctgtcactttcaggtacaccaaacaaacgtagatttggtcttttcacatagtcccatatttcttggaggctttgtttgtttctttttactcttttttctctaaacttttcttctcgcttcatttcattcatttgatctttgatcactgataccctttcttccagttgattgaattggctactgaggcttgtgcattcgtcacgtagttctcgtgccatggttttcagctccatcaggtcatttgaggagttctctacactggttattctagttagccattcgtctaatcttttttcaaggtttttagctcctttgcgatgcgttcgaacttcctcctttagctcggagaggtttgatcgtctgaagccttcttctctcaactcgtcaaagtcattctccgtccagctttgttccgttgctggtgaggagctgcgttcctttggggggggagaggtgctctgatttttagaattttcagcttttttgctctgttttttccccaatctttatggtttcatctatctttggtctttgatgatggtgacgtacacatggggttttggtatggatgtcctttttgtttgttagttttccttctaacagtcaggaccctcagctgcaggtctgttggagtttgctggaggcccactccagactctgcctgggtatcagcagcggaggctgcagaacagcaaatattggtgaacagcaaatgttgctgcctggtcattcctctggaagcctcgtctcagaggggtacccggccgtgtgaggtgtcagtctgcccct

SEQ ID NO: 15552 - DNA, 1050 bp, Homo sapiens
gagactttaggggccaataaatagggaaaagtcaaagatgtaggatgtcaagaaacttgataggtcaggttttctgacaaagcaggagggcatgggatgcagaacacaagtaaagggattactaaccttagctcagacgagctgccactcttccgcagtaacagaagataaaagatctgtacatactgaatatgtttcatagtggcacgttggggtggttcacatttaatagcttttattttggcttagaagtaggaaagaggatatctgttgttaatagttttgaaaagttgcaaaatacatttgttttcatttaatggggattaaaatactctgtctagtattatagatgtcagaagtcatctattttctaccattattaagcaagggtttcttttttgtgaaaggtgcagttacctttagcagccaaggacgagtaaatccctttaaggtaaactcttccaagtgatgttttatattatttaaatacatttgtatacaaagaaatatttccaaatgatgagatgactctccccagacttggaggcatgaaagactgatctgtgtggaaacagaagaaagcagcacttgggctgagagttgtcttttctacttaccttctaagtacctatggttttgaaagatacctctgtctttcttggggatgtggtatttgggaatatacgtatcattcttaatttggattgtaccaaatgtatttagttctaaagatgagatggcaatacaaacttaacagaaatttcaagaaaaaataagtctcttgggattttatttttcttctttaaacatacagtgctaacactagtttgctctttaggtatcagccagttccaaagaaccagccatgtcaatgaattcagcacgttcaactaatattttagacaatatgggcaaatcatccaagaaatccactgcacttagtcgaactacaaataatgaaaagtctcccattataaagcctctgattccaaagccgaagcctaagcaggtactgtttcagctaccctcatctgcagtaagcagcatggg

SEQ ID NO: 15553 - DNA, 1102 bp, Homo sapiens
tgtagtcccagctactcgggaggctgaggcaggagaatggcttgaacctggaaggcggagcttgcagtgggccgagatcgcgccactgccctccagcctgggtacacagcaagactccatctcgaaaaaaaaaataataataataaataaataaataaatgaaattattattatcttccagcaggtggcatagttttcactgaaactcagttttttcactttatttgtgtaaattttagtcatatcaaatccaatgttttttctttttttagttaggtcttactttatatggttaatgaaattttacgtaataatcttagattatttgcttctgttttgtgttttgcttttgaaagcaaagttgaatccttggtatgtataatatatttgaaatagggttcctttaacaacatgtagctatgtctccaagtgatttttctgttggtgtttaggtaccccttgttacgtggattcagaaggaattgttcgaatgcttaacagaggacttggtaatacgtggactcctatatgtaatacaagagagcactgcaaaggaaaatctgatcactactgggtggttggtatccatgaaaatccccagcaactaaggtgggctattaaaagaagtctaaagttgactctttttaaaaagtatgttgaaattctttttatgaggccctttaagtgtatttgtcttttatcttagtccaattacttgctttccatagtcactaaattaggaatttgttcatattcactctgaagttttcagtcacttgctttacttgaaacatgttgaacaaaatagaaataattaggatgaccttaccatcatttcagccacacagggagaggaattctgattaaacatggcatttcaccttttattactgtcttttattttaataaaataacaataaatataaaagttaaagtgaaaataaaacaatatatattcaattgagaattgaaatatacaattaagctgctttttgagatgttttgcttaattatcgtaataggaggaaggactaatagaagacagagtctcgctctgttgcccaggctggattgtagtggcgtgatctcagctcactgcaag

SEQ ID NO: 15554 - DNA, 1032 bp, Homo sapiens
ctaagaggatgtcttgaattgtctctctttctaggataataacattttttaggttttgctttgaaaattgtgccagtggctgggcacagtggctcatgcctgtaatcccagcactttgagaggctgaggcaggaggattgcttgaggccaggaatccgaaaccaacttgggcaacaaaagaagactccatctctacaaaaaatactaaaaaattagccatgtgtggtggtgcatgcctgtagccctagctacctgggaggctgaggcaggaggattgcttgagcttcagagttgaaagttgcagtgagtaatgatggtgccactgcactgcagcctaggtggcagagcaagaccctgactctaaaaataaaataaaatggtgccagtataatttttttcatgataaagtaatagctggtagtgatacttgaatgttattgaaaagtgaggttagaaaataagcaaactttgtcttgtatcgaatataattagaaataatatagaacagggatataaaaatttgaatttggttgattcccctccaaattcttgaaaaaaaatgaaaagaaaattgaatttggtaataaaatgagtatttagtttgaaattttacaaaatcattatttattaactgtttttctttacagaccctcaatatagtaacctggtctccctgtgggcaatatttagctgcaggtagtattaatggtctaatcatagtttggaatgtggaaaccaaagactgcatggaaaggtatgatttagtgtatcttttgtctcttctttgctcatctctattagttttgtatttgttttattttgaaacatttcaaatttgccatcagattgtcagaatgaaagtataattaaatttatattatttataaattattgtcaaaagtcatttattctttcctaactaaaatttacctaaagaaatgtacaatttatatttttcttgacagtatttttagaacctactttttaatttttagggtgaaacatgagaaaggttatgcaatttgtggtctg

SEQ ID NO: 15555 - DNA, 1029 bp, Homo sapiens
gttaatacaaaaaatattttgctttcaggtatagtaattacatttttacttttctggattattacttgtcagatttgtttggagctctttttcaccatatcatttggggatgtgaactcagggtcagaaaagacgggaaagcatgggtaaagatatctgaagagaatattggaatgaagaatacagacagaagaggggaaataaatgtaaatttaaagaaaaaatattgagagctactttagaggaaatgtgaagtgattgaggcagaaataaaattttaaaattaaacattgaaaaggatttttaaaatgtctttttaggggctgtcattttaggaattgttgctttgaaatttatatgtaagattttctttaatttatagaacatgttttaaataaaaatgaagctactactaaaaatttaaatggccttccaataaaagaagtcccatcacttgaaagaaatgaaggtcgaattgctcagccccaccatggtgtgccatatttcaggtatgtctgtgtgtttctagtgtaagaattttgtattaatatctagacatttaaaaccaaaactaaaaatttttaaccttaatatagtgggggaaaactggtgttaggtgattttcacgtttaaattttaattatttttttgataactagtacattcatgtggttcctaattcaaagggtaggaaaaggtacaagtgagaagacttcttctcagcactgtgacccaaccacatagtttgaacctttcatgaaggcaagtgttactcatttcttgtgaatacttccatggatagttcatgcatatgtagacaaatataacatgtacatttttttcttttttaaaaaatatggacaataggctgggcgcggtggctcacgcctgtaatcccagcactttgggaggccgaggtgggtggatcacaaggtcaagaaatcgagaccatcctgtctaacatggtgaaaccccatctctactaaaactgtaaaaattatccgggcgtggtggtgcacgcctgtagtc

SEQ ID NO: 15556 - DNA, 1073 bp, Homo sapiens
ttcagccccacctcacaacctctggggaggggagaggagctgaaggttgacttgatcaccagtggtcaatgatttaatcactcatgcttatgtaatgaagctgccataaaaaccaaaaaaaaacacctgtgtttggagagcttcttaggtgaatacatgaaggttcctaaacagtggtgctacctgagagagcatggaagctccttgttcctttccacatactttgccctgtgcctctctatccaactctatctgtatccggttgcctattgattatccctatatgactaataggtacctggtgtggggtttttgtttgtttttggttttcttttggctttagaagaaatgttagactacctgcattcctcatcatgggtaaggaaacccttgtgtacatggtccttcacttaacctattttcacctttatttcacgcttttctttttgcagtgttctctgtggtaagcccagagcctcttttattctggactatcacttactggctttctcttcactggtcaagcaagttcctatttaaaacccccaaataggtagcttcttattctctgataatcttcttctcacttttcagtgttacatatttatttcattgcacattttatatttttatttcagaaggccctgaagtgggacaggaaatgaactgtaatcttaattttttaaataatgaaaattcatgtaagttgggttttgtccttttccttgacaggatgtcttcatcacattttgccagtcgacacaggaaggatataagtactgaaatgattagaactaaaattgctcataggaaatcactgtctcagaaagaaaatagacataaggaatacgaacgaaatagacactttggtttgaaagatgtaaacattccaaccttggaaggtagaattcttgttgaattagatgagacatctcaagggcttgttccagaaaagaccaatgttaagccaagtaagtaaaggtctgttgtaattttaagtactttgaagagtgaataatagttggtttaatgcctgtgtgagtaaaaaactctggccagaagagttttgaaat

SEQ ID NO: 15557 - DNA, 1028 bp, Homo sapiens
cctgtaatcctagctactcaggatgctgggtcaggagaatcaattgaacccgggaggcggaggttgcagtgagccgagatgcaccactgcattccagcctgggcaacaagagcgaaactccgtctcaaaacgaaaaaactgtcagaaatctaatgcgtgcaaccaaatacctaagttcagtggtgctcagtgaaagagggtgggagggtggtttggacccatggacatttatcaggtacgttttataccctagttaggagacagcaaggcttcagtgggacctcatctgaggaaccaagagctatgcgccatcagaagagtctgaacacattaccatagggttccgaagagcaaaaggtctggggagtgtttatggaggggggccttcctgaatgagtaaaattcaaacatttagaaaacaggagcaaatagatagcctgagtgttagggagtgataactgattcagcattcatccatccatacgttcaagtggttccatcttgcagaaaggatttgaaatatgttgcaattgagtacagctagagcgaagggtgtgcagaggggaactgtggggatatgtaccaatttggaggaggccttgaggctgaggggtttgctctgtatttgatgggcagtggagaaccactgagcattgactataatttgtaaagattgagcaagtgaaagagggcatgaaggcgtggagtcgagccgtgttggagataggcagagtgttggtgagcgttaactaggattgtgatagtaggaatgaaaagaaaggcctagatagacagacttggactggaaatggaattgaccatcaagggttgattaggcagtggacacgtcaaaaataatcttgaagtagggaaactggagaagattttcctggaaaaataatgaacttgattttgaacttgggtttaagttgcctaagcaactcctagatatctgtctgagagtttacagcttgtttttgtcattcaagtgaagtttagctacagcccaacagccctagcaggtgtag

SEQ ID NO: 15558 - DNA, 1029 bp, Homo sapiens
acttgagatatatcagaaaacttgaatttgaggattggtgtttttcatcacttctggaaaattctcagccattaacttttcaaatattggctcagctttatttcctctctactttccttttggaactcccattaggcatatgttagatcttttcactttacgtttcttaccatctctttcgtattttccgtattcctgtctttaattgctgccccctgcttaattttttcagctccagcttccaatttctcttttgcagtatgaagttgaatttttaatttcatttttttatttctagaagttttaatttctttaaatgttttaagtaagaatgtaatagaatagagcaggatagaataggatccatatctgataatcccaatatgtgaaatatttacagatttggtgctatagtctgttgtttctgctggctcttgatcatggtgctttgcttcctgtgttttgttttgttttgttgtaattttgtttgttttacaatacatttatattacttggaatctcttcagtggaaattctttcagatttgggttaaaagtaggtttcttgaaagaatatttatatttgcttcttccaggtacttcattcacttagtagccaggatcactttaaaaaattgacttgaggttttcaggacatgtaggtggtattaatttaggctgaaaaggccaggcgcagtggctcatgtctgtaatcccagcactttcggaggccgagttgggcagatcacttgaggtcaggagttcgagaccagcctggccaacatggtgaaaccccatctctaccaaaaacataaaaaattagccaggtgtggcggcacatgcctgtaatcccagctactcgggaggctaaggcaggaaaatggcttgaacctgggaggcagaggttgcagtgagccaagatcatgccactgcactccagcctgggcgacagagcgagactccatctcaaaaaaaaaataaaaataaaaataatttagcctgaaaaatcacatgaagattggcttgtgga

SEQ ID NO: 15559 - DNA, 1065 bp, Homo sapiens
ctcagcctcccaaagtgctaggattacagttgtgagccactgcacccagcctggtctcagtcttttgttgagcctgtgcccctgcactgtgaacttcacaagtgcttttcaggtgtttttcctcttaggtgagacaagatagctagaggaggctggagttgggtctttcacttcccccaggtaggttaggccgtgataaagccccagcaagtagggctctggtaaaatagtttctcctgaggcaggccttgttaggaaaaataaaacgctctggtgtatttcaaaatggtttctttttcccctccccctgccagaagcacaatatttatgatctaatatcgtatgtatagttgcaatgtttttggcatttatcttgcttgattttgagcttcctggatctgtggtttggtgtctgacattaatttgggggaaattctcagtcattattgcttcaaatattgttcctattcctttattatccaataacattatccgatatttattgtgaggagctggtagagttcccagaagtaaaactcacaaaagtgtgcccccatccccaccttgactgggtctccctggaatttttaactctgagagctgcccacactgagcctctattaattcatcaattacagttcagttatcctgtcactggttccgcagaggtttctgctccagtaagttgtgattctgcttctgcctgtctctctccaatctttgaggcagcagtttgccctgtgatctcactctctgacagatctaagaagagttctcgatttttcagtttgttcagctttttacttattgtaaggccagcgtggtaacttctaagcttcttatatgccaggtgggaaacaagaagtcctatctaggttttttaaaaattcacacatcatatgtaatttatctaaaattgacacatattacttatatagtaaagaaaaaggctcatttttgcttttgtttttcctgcttgacatatgcagtttcttcctcagtaaagctcaagtcaaaggcttctaaggctagattctatataaggagcaaacaggatttgggaaa

SEQ ID NO: 15560 - DNA, 1036 bp, Homo sapiens
ccaagagctctttcatattaagacctagagctgactttttctaatatctaaagtttaccaatagtaaaagagtttcatggtgataggaaattaaataactgatttaatttagcataaataatataattaaacataaacatagagtaagttagatgggttaaagaatgttgtattctcaattctctaggacattaaattgtatgattggacagatgaagcatattttggctgcagaacagaagaaaacagattttaagccagaagatgaaaacaatgttttgattcaatatactaatgtgagtaaaatcattcagtttgttaatactttgttaacattttcattggtgtatcctactgtgccctagatttttttcttttatacttaaagattaatgagaaactgtatttcctctttagctaagctggtatacattcctgtgtaatgagtgtagaaaaacttttataggcctgtgtaaaagtctgtgcttacgtaagaaaacaagtggagaagattaaaaattccatggatgggaagaatgtggatacagttttgatggaacttggagtacgttttcatcgacttatctatgagcatcttcaacaatattcctacagttgtatgggtggcatgttggccatttgtgatgtagccgaatataggaagtgtgccaaagacttcaaggtatgtgtacacaaaaacatcaaacttgcaaataggcccaggagcataagtcagattattaaaaatcactatttacttataattagtgaaaggtttataacttttgttgatattgtatgagatagattatcacattctacctgaaacagtgttgttccaattattatttttttttattttaaattttaaatttttatttattttttttccaaagagtttcatgatgttgcccaggctggtctcttactcctgggctcaagtgatctgctgcctcagcttcccaaagtgctgggtttacaggaatgagccaccacatctggcccatatatttaatattaaacccatttttgcttt

SEQ ID NO: 15561 - DNA, 1071 bp, Homo sapiens
ctcctgtacttgtggagtttatattcttatggagaagatagacaaatgattagaaagtgcaatgaagaaaagtaaaactgagtaagggactaaaaaattaaaaaaagtgtgtatatataataattttgatatgcccttatttttatttttatttttgagacagaatctcgctctgtcacccaggccagagtgcagtggcatagtcatggctcatggcaactttgaactcctgggctcaagcaatactcctacctcagcctcctgagtagctataactacaggtgcatgccactgcacctagctaattttttctttttttgtagagttggggtcttactttgttgcctagactgtttttgaactcttggctccaagcgatcctccctcctcagcctcccaagaattttttgttttgatttaagctattttcctaaaggtttcttttcccagtaacttatgccgctgctggactgtttgtgtgtgccagtttttctgtaattattgaatattctttaaaaattttaatttcgtggttaaaaacttacactgtagctgagttctgatgcctataaagaaaaaaagtacatcaatattgccttaatttttatgtctttcattaataacaatgattcatattttctacatatgtattgattttgtttttttctcttgtaaagttcatttgttattcaagccttcaattttcttaccagttggtaatcttgtcttttacttgcgggggcagggggggcggagggaaacacctttgttttccattattaagagaaaaaaaaaatcattgttctaaaaagaactctatgtgtcaagcctgtattttctcattagctatgcatattttctttagtctcttaagtcttttacttttagctagaaacataaacatctaggaccttagagttcatctgttattctttacaaaaaggaggaaatggaaatccagagaggtcagctgacattttgaggtcagaatatggagtggcttgattccctttttattttattctgaataaattccagaataaaatcaggaatgtaatctgtagataggac

SEQ ID NO: 15562 - DNA, 1059 bp, Homo sapiens
ctgtactgtcttgattgctgtaactttataataagtcttgaatcgggtagtgtaagtcctaagtcctctaacatttttatataaatcattttgtattatgtcttataatagcttgtctgtttctgaaaaagtctgagattttgattggaattacattgactctgtagttctatttggggagaattcacatattttgatgccattataagcatatgtaaatggtctttttaagatttatatttaatttctagtttaacttacttagtctatagaaatacagttgatttctatatattgctcttatatcctgtgagaacggaaaataaatctctggacccccaaatcactaagccaaagggaaaactcaagttgggaaatgcatcaggcaaacctgcctcccattttattcctaagtaagataggaattccttgtgggcctcaagatctttcccctaaaacagttttattgaatttcaccttggcaatgtaaattgataacttatcttcacagttgcaggacaaaggagagaactcaagtcatccctcagctcacctgagagaaatgcgtatctgattgcttcctctgtcctattgtttatgtaaaaatgtagattcaccgagccagattaaggcacaagtgattattcctctacccacctctgacatgcaaattgtatattcagtgaaagggtggtcaaagactcaaaagaatacgactgtttgtctcttatctgcctgtaacctggaagcaccttctcaccccttcaagttgtcccgcctttccggacagaaccactgtacataacacctattgattgatgtctcatgtctccctaaaatgtgtaaaaccaagctgtgcccctaccaacttaggtgggcatgtgttggcgggacctcctgagactgtgtcataggaatgtccttaaccttagcaaaataaactttccaaattgattgagacttgtctcagatacttttgggttcagacctgcaacctaactaaactcacttattagttctatttgccttttttttttttttgtagattccactggcttt

SEQ ID NO: 15563 - DNA, 1394 bp, Homo sapiens
gtttaaccttccaaagataccccatataagtgtttcaggtgaccctcagtaattaagaatagctaaattatgtttaatatatcttctttaatatcatgaataaatgtgcataatcttaaaatgactatattttaaaattgttaaacttttaaaggtttctttttaaacaggactatttcgttatttagaatgccaacctatttggaatagctcactttctaaggaaacccagcaagttttactattgagtcagaattgtaaggctgaattgtaaagcaacttcagaaattagaagtccaaatctactcatttatcagatgaaaatcttccgtttagatatcagggctaactttatttcacaaaactagttattggaattagaaattaggtctcttggctattggtccatttttgttgttgatatatactaagtttggaagtactcaaagttgaaatctaagtaaaatgttttctttttttcatttgtctttatgatgtactagtattcaagatttgaaggaaagaattagacagcgtaccaacttaccacttgggccaagtatcgatactcatggggagacttttctatcccaagaagtggtggttaatcttttacaagaaaccaaacaagcctttgaaagatgtcatagggtaagagtgattgtaaatgtattttacatatacagttgttccttgatatctgtggggaattgattccagaacctccgaggataccaaaatcgtggatgctcaagtctgctatataaagtgtgtagtatttgcatatattctatgcacatcctcatttatactttaattagtctgtagattacttataattatttatatatattattacattacctagtgcaacgtaaatctctgtaaatagttgtaactttagtgtttaggggatgatgacagtacatattcagtacagatgcaaccattctctttttttttcttgaatattttttgatctgtggctggttgaatctgctgatgcagaacccacagatacagaacttacagttagagagaactgactatgtagttgtattttaagtcttaccttgttttactaagatataaatttactctgattaggaacaactattttttgtaataaaagataggatttttattttggagaacagaataattttaaaattaggaataaatgtgaatataactttaaattaaagttgagcagatcaaatttttgttatgtaggattaaatgaagatgtgaaagggacagttagacttttctcatgaagaaatggtgcatcagggaaagaacaatgttttaagagcatcaacatcaaagggaaagagtgaagatttggctccattaaaacttagattttcctctctaataaacacagtttagca

SEQ ID NO: 15564 - DNA, 1056 bp, Homo sapiens
ccttaatattgttactatacctaaaatgtatattaatctttttctccccctttttcatgaaaagaaccaccaatctttccagcaagctgatggagtttaatttaggtactgataaacagactttcttgtctaagcttatcaaatccattttcatttcctatttggagaactatattgaggtggagactggatatttgaaaagcagaagtgctatgatcctacagcgctattatgattcgaaaaaccatcaaaagagatccattggcacaggagggtgagtatttttgttaaatacttctgttaaaactgaagacattaataacttcattatatttgggcaaattatcaaatgttgactatcattagaattttctgtgaagagttcttttaatccagattgttatattattgatcaaatcttgttcttaaaccacatgttgaaatgacctaacataacatgattgaaatgtaagccgggcgtggtaactcactcctgtaatcgcagcactttgggaggccgagatgggctgatcacctgaggtctggagttcgagaccagcctggccaacgtggtgaaaccccatctctactaaaaacacaaaaattagctgggcgtggtggcagacacctgtaatcccagccattaaggaggctgaagcaggagaatcacttgaacctgggagacggaggttgcagtgagccaagattacgccactgcactccagcctgggcgacacagcaagactccgtgtcaaaaaaaaaaaaaaaagtaaagtagatatttgtcaattaaaaaataatgttttaaaactatcgagcagaacactagtaatataaaaagttccatagtttctttcatttttttttttctcgatagaataagttccaggttattgaccaggaaacgcatcttttttttgttactgttgcaggtgtgaaaaaaatagaaaatagtttgtagtttaagtaccttgaattgatgagttttgttcagagactttagcataaaaaactattaaattaataccttaatgcctacaattatttacagactag

SEQ ID NO: 15565 - DNA, 1043 bp, Homo sapiens
cttaaaactgacgtgactttttttcttgactatatgtagcttgttgcttcatcataattaaaagcataatagttacaattaagtttcaatagttataattaagaagtgcatttatcttttctggtactgctatgaatccagccctacagtggactctactcttgagtaagttttcatccccaagtgaaaagttgatctcttggccttggagggaggaggaaaaaaaatcctgtcactgctcagtttcctgtaactactgccatagcatctaggttgtagtaagagtcacgggaagtatctttttctcctgcttccctttcttagtcccagctggagaactgtggaaaacggaaggcaggatgtagtcaaggatgtttggtttttatgcatcctgattttcatgcactgttaaatagaattatgctttcacttttcatgttaggagaagttaaatgaaaacaaaattaagcttttgaatccatgacatttcattatgttaactctgcttcttttaaaatcttattggtcccatgactctcaatgaaaacaacttcatataacaaaatcaaactgtaatatatttcctcagttgaccgaaatgatttagtaatagatgatttggctattgtaatagtgtatatcctggaagtttctcagaataccttcttagtttcaacttttgttgacagatctttctgaaaagatccatgtacagtgttttaaaatctcctcaggatagacattctgagtaaggattcttatgtggtgtagataaattgtatcttctacatatacaaagtggctgggctcagaaattccttttctttgtttttgagacagggtcttgctctatcgcataggctggagtgcagttgggtaatcactgctcgctgcagcctctaccctcctggcacaatccatctgcccaccttagcctccagagtagctgggactagaggtgcctgcctccatgcccagctgatttttaaaaattttttgcagaaataaggttttaccatgttgcccaggctggtcttgatctc

SEQ ID NO: 15566 - DNA, 1032 bp, Homo sapiens
gttgatttcatgtctttgctgttgtaaatagtgctgcaatgaacatatgcatgcatgtatctttataatataatgatttctattcctttgggtatatacccagtaatgggattgctgggtcacatactatttctggttctaggtctttgaggaattaccacaccattttccacaatggttgaactaatttacactcccaccaacagtgtaaaagtattcctttttctccacaaccttaccagcatctgttgtttttttgactttaataatagctactctgactggtgtgagatggtatctcattgtagttttgattttcatttctctaatgatcagtgatgttgagctttttttcatatgtttgttggccacctgtatgtcttcttttgagaagtgtctgttcatgtccattgcctactttttaatggagttctttgtctttgtcttgtaaatttgtttaaatttctcttgtagactctggatattagacctttgtgagacggatatattgcaaaaattttctcccattctttaggttgtctgttcactctgatgatagtttcttttgctgtgcagaagctctagtttaattagaccccatttgtcaacttttgcttttgttgcaattgcttttggcatttttgtcatgaaacctttgtttgtgcctatgtcctgaatgctattgcctggattatcttccagagtttttatagttttgggttttacatttaagtccttaatccatcttgaggtaatttttatataaggtgtaaggaaagggtccagtttcaattttctgcatatggccagccagctcttccagtatcatttattaaatagggagtcctttccccattgcttgtttttgtgagcttgttgaagatcagatggttgtaggtgtgcggtcttatttctgagttctctattctgttccattggtctatgtgtctgcttttctaccagtaccttgcttttttggttactgtagccttgtagtatagtataaagttgggtagcgtgatgcctccagca

SEQ ID NO: 15567 - DNA, 1028 bp, Homo sapiens
ccagggcggcgcgctctgtttagcatcctaatgtgtgtttccttttctatgcaggctggttacatgtctgggatgctggtgcctgtaggggttgggatagctggagccttgttcatcttgggagccctctacagcattaaggttatgaatcgccgaaggagaaatggcttcaaaaggcataaaagaaaggtatggaaccaacaacagcaaaacctaatcagtttcagaacattctttgcttatctaatttacttaataaagcacacggggtttaatgatgcttgggtggtattgacgtgcccagtggtctggattagctgctgtagctcctgccttggcttcgtttgttagcatgtcttttaaagtgggcctgtttctcagctttgctctgtggcagaaagagtttaatgcttttctgttttctttctctagcagagagaattcaacagcatgcaagatcgagtaatgctcttagccgacagctctgaagatgaattttgaattggactgggttttaattgggatattcaacgatgctactattctaatttttattttggagcagaaaaaaaaaaagaacaacctgccacattgctgctatcaggccgttagtcctagtgtctgctgggtgctgggtagtagatttttcttgtactgagcagaaatggcatgttgtatactaaacgtatcatgcagtatttggttttattctgtagtgaattttccacaaccgtgggctacaactcataaatatgcaacatatatgtttttcagtaggagttgctacattaggcagagtaaatattttgtagttttccacagtgtcttttccttggtttgaattacctgcattgagaataatgattgttgccaccaaggcatgcttgactctgagatataaatcttaacaaagaataacttctcaagatatactctacctacttgaaaccacagggttgtgggccatggtacatactgcatttgcatcaaactagcagtaactcagaatgaaatcattttcattaaga

SEQ ID NO: 15568 - DNA, 2560 bp, Homo sapiens
cattttccacttgtgtaataactattttcacttttatactcagatataaaaccaaggaaaataacctaaagtctgaaaaagaccagaatcgaagtttcctgattcatattttaatgttttgaaatttatactccaggctgggtgcagtggcttgtgcctgtaatcccagcactttgggaggccgaggcggccggattgcctgaagtcagaagttcgagaccagcctgaccaacatggtgaaaccctgtctctacttaaaaatacaaaagagctgggcatggaggtggtgcgcgcctgtaaccctagctactcgggaggctgaggcctaagaatctcttgaacccaggaggcagaggttgtagtgagccgggatcacgccactgcactctagcctgggcgacagagagagagactgtctaaaaaaggaaaagaaaaaaatttatacgccaaaaaagatattctgagataacctgtagttaccactaactttgtgacaaaattataaaaatccacagccatctatgaatctgtaggcagacctgaagtttgaacgactggtgaagacatctgattttctttatagccaagttaggataacaaaatgcaaacaagtcattaatatttactatatgcaagatacagaaagatgaaggaaggagtaagaagttatccttcgtggaactattcaaagcaaaaatgcaaaataccagggaaagctttgaagaaccaagatttgagcaggttcttagaatatagattggattggatttgatttcaagaaagatgaacgtgtaaagcagaagtgggaagccaaaaacttttttccaaattagaattaagcattctttcaatgaacatttggaaatcaaggtagaaaaatatccctagggcctagctgaggagtctgtatgttgttgggttttgatagtaaccagtccaagattttgttattagacgtgggtttctgaatagacaggcatttctgaacagacatgacaggatcaaaacaatgtttgagcaaactgcccttcatctactgtggatatgttgggggatgatggaatatagtgaaagataatgggtgctcatacagcagtctagacttaaggtgattcaactactatatattaaactagattatcttttattttttaattttgaaatctggatgctcaagctctgcctgcacaaccacatgaggaagaaggaacaatgacaacaaaaataacactaaatttaaatttaagagtactacttttaggaaatagacaaaccattatttgggtacaactaaaggcaactggcatggactcaaatattttggggaagaaaaagactaaaagttctaaggaagaaaatgcgaaccttgatagtttgaaatagttaaaaagacagtgtagaaactgcttaggcagtttgattatggactattagatgatacttgggtctgataatggtataaggagaataaagtatttagggatccaatattacgcctgcagctttttccaaatagttcatgggggagggggatgtgtaagtggttaactgaagtctaactagataggtttgttgtaagcttaggatgtttacagttcttcatgttaagttgagcgtgatgggaagggaaagaatgctgatctttaaatttttgtccttagttaagttctgtatttagtgaattaattgcatcctaaaaagtcaaacttgaaaagcacattttaaatggcaaatctattttttacatgtttgtgaagtttttattttttagtaaacagaccatcagaagagaacaatggtacagagcaggggtcagcagatggattttgtaaagcatcaacttgtaaatattttcaagtttattagctgtatggctctggtttctgttccctgttccaaatgttaaagtctactgttgtattctaaaagcagccatggactgaatgtagctgtgttccaataaaacttacacaaaagcaggcagtgggccataatttgcaacacctgattcacagcataattttgtcacaaactgaaagtgttcctcaattaaagtgatttttttttcttgatttttctctgggatttattgtttttcccattccttgctaggatttaactacagaaagacagatagtaactgctctaaatattctaatttcctttatttttttgagataaggtgtcgctctgttgccctggctggagtgcagtggcgtgatcatagctcactgtagcccccaactcctggctggggctcaaacagtcctcctgcctcagcctcccaagtagctgggactacaggcacgcaccacctcacctcgctaacattttgttttgggagatagggtcttactcttttgcccagcctggtcttggaactactgggctcaagcagtcctcccaacttggcctaccaaactggtaggattacaggggtaatccccctcaactgacataaatattctaattttcaaatttccatataatagtatggagagatgaaaacaaaaggaaaagagtagaagataggaacctagcatcatactagtaagtgtgc

SEQ ID NO: 15569 - DNA, 1116 bp, Homo sapiens
cttcaacccgtgaggcagaggttgcagtgagtcgagatcatgtcactgcacttcagcttaagcaacagagcgagactccatctcaaaaaaagaaaagcacgtcactcgatgttctttctttcataagagttgaagaactaggtatatctgcttatattatggcatctatagtagcttagctgctcatatttgggtctctttagaaccagtgtctttcaaagagggttttaactatgctggtgtaaattttaagaatagatacattcaaagaagaattcaacattcatgtgacattcatactttggaactttgggaaagtataggaatgaccatagattggcttagggatagtcaatttacctgtctgtaaatggatccaatttagtattgttcctgtatttttctaagaccaacacttgtgtcattcacagttaaatatatgagttgtggccaggcccggtggctcatgcctgtaatttcagcattttaggaggctgaggtgaacagattgctcaagtccaggagttcaagaccagcctgggcaacatagtgagatgcggtctctacaaaaaatttttaaaagttagccaagcatggtggtgcttgcctgtggtcccagctacttgggaggctgaggtgggaggattgcttgagccatatgctctaatatattttaaaatacatattttaaatatattttgagtggtaaaatgtagcagataatgttacataaaagaagccatggtaatgacatgacattactggttttgagttgtttgtgtagtagttagctattaatactcaggtataatgatttgctatttaaactacacaaatgctcaaagtccagcgataccctgcacccaaattcagtggctagattaccttcttaggaaagcacaacacttcaatggagtgacactggcatgagtccactagagggtgtgtatacatggcctgagttcaaattgttcctgctgtgagtactgcttttcagcttcaagttattcttatcggccacagtactgtttattccacttagtaacagttctgtttacagagcactttaacataaattctgatttttaacatgaaagctgtctgatgttggtattt

SEQ ID NO: 15570 - DNA, 1035 bp, Homo sapiens
ctggcttgacaaggttggaattagtattacatggtaaatacatgtaaaatgtttagaatggtgccaagtatctaggaagtacttgggtatgaggtggtggtggtaacatatgtaatactcttacgtgcatatcattccaagtgagttttaaatgtatacatttattgcattgatatacagacattaagcatctagactctcttgtcttgattctgagaccctactaaaggtcatatccacctctctccaaccttattttttactacttcccttcaagcatcatatgctgcagtcacattgaactatcatggttctcttgtacaagccatatgttttctcatttacttatgttcatactgttctcaccaatttgattgttatcccatctccttgtattcaaatgctaccttttaagtgaagttttctgatagttcaataggtagaactatataggtaatcatcatgtgaatttcatgtttcctcttacatgattctttaccactttttgtattgcactttagccttttatttacatatgtctctcttactgtgttgtgcaatctttacaggcagaaaactgtacctttttcttccttgtaggtttagaacctatcataggccttgggacttagtaggcattcatttgtgtaatgaaaatttataaaaggtatcacaagctaaaaggttatgtttaatggacaaatgcatgccagtaaaaatgtgttttgtcagtgtttgtacattcaagaatgtcctggccagtcacttaaaatgaaatcacttttttaaaaaaagattgtatctctaaataaccaccagagaatggtttttctgcttgttgttacctcatttttcacagatcttcctaataattatcagtggtacaaatgtgggaaaagttcatccagggctaagggttcgtcacctgccagtagtgggatagataagccacgtggctcaataaattattgaacccatagtgtcaccctccaagtatttttcttttttaatcacaataccataatgcctttaggt

SEQ ID NO: 15571 - DNA, 1032 bp, Homo sapiens
attatcaattacataccaatcacaatattaaatatacatactttttcttgttgattccactttttagtctgcttttatgaaacctaacttttttggagttttccttttgggatggtatgtgagcttatgaaatttgagctatttttttatatttatcaagacagtctttgatttgatttaaatatgtacttaaaagtttttccattgtagtgctagctttgagttaaaaagatacctgtgttcagattcaggaaaaaatcagtatatttaaaaacctaacatttgtgcatcagtttacaacattctgagtttttaatgaatgtgtggttatgtgtatgtttttattgcttcactttttatctcttttgacaccttatttttttctaataaaagtatttacttagaagcattcacagtgttaacaaaacagctgcaactttttttttttttgcaattgcagagtggtattcagttaagagaacaattatttcgtataagccacatcagagacgactgaagatgaaaaaactaccatccccgtatataactaatttgtgctgtgcaccaacaagaacctgctttaaatttccatggcaatttacaacccccatactgtaccaggcaaggttagtggctactgaaaataccaccaggacaggactatctaaagacacatttggtagtgtgttaactatacaaaaaaagacactgtacagtttaaaacattttacacagccttacatttcaattttttactttaaaaagagtgagttgtgtacaggggagttaaatgttttatagacaaaaccactaaaaccagtgcattcattatcagcatattcattatcgtcatcctcttcatcttcctcctcatcctcttcctcatcctcttcatctttctcattcttccttttcttgcttttttcagccttgacatctccctttttcgctgcatcaggctttcctttagctcgatatacagcagtatcctttctgtatttttccttcagctttgcagccttcttttcataa

SEQ ID NO: 15572 - DNA, 1050 bp, Homo sapiens
cgggaggcggaggttacagtgagcttagatcgtgccactgcactctagcctgggcagcaagagtgagactcgtctcaaaaaaaaaaaaaacatagaatttgttcaactgtgcagttgtttctgtacacgagtatatattgagaagtggaaatgattgctgtgttgaatgtagcagctttcctaaagatttagttattttatggaaagttacataatttacttatttgtaaccaaagcagactttgaaatttctatgttgtcttttgccctattcaatttttatttatttatttattttttgagacggagtctcgctctgtcctccaggcaggagtgcagtggcatgatcttggctcaccgcaacctctgcctcccaggttcaagcgattctcctgcctcagcctcctgggtagcttgggactacaggtgcatgccaccacgcccggctaatttttgtgcttttagtagagatgggtttcaccatattggcccggctgctctcgaactcctgacctcgtgattcacccgcctcgtctcccaaagtgctgggattacagggatgagccactgcgcccggcaccgtgtcagatttatctgctgattttatggccacatggagtcatagataatggttcgtataattcaaactggaatgacagcgtattttaggattcagattcaagcaaatatgagttacataatggctttcctacaaggatctgtgctccagaagcttaaggtcaataaaagggagaatgtaattacacatgtggaaagttaatctaagtagttatttcaaaatatttaagcaatctatataaccttatttatagacttacatggctcctgataatagatttgtcaaagttctgtatacaatcagatctagtggttcttttaaaagagacaaattgctttagaaagcagagcagaaagaaatttataatggttattaaaggcttttcaaggatagtgagatataatgtgtaaaattagaaggagagaagacattctaattggatgaaaggttgtgagcaagaatacaaggaa

SEQ ID NO: 15573 - DNA, 1052 bp, Homo sapiens
tgactcttcccaaatttgaaactctgttcccagaaagcagcaactgttttatttaatcactgttaggttcccccacctgataggtgctctgttgcagatacttcttctaaatctgtatgcacgtttgtatacaaaatgtgaaataagccaacttaacatctttcgttttcttaggttttttgttgttgttgttcgggtttgttttgtttttgagacaggatcttactctgtcacccaggctggaatgcaatggcatgatcatagctcattgcagcctcaaactcatgcctcctgaacagttgggactacaggtgtgtgccatcaggccccgctaaaacttttttttttttttggtagagatggggttttgttagttgctcaggcttgttttttcaacataacaataattctttcttgaaaattaatgtttcacagatgctgtcttaaccttaaaattttaaaatattccagatacttagcttaataccaaattgatttgtaattgctaataaaatgtagatttagaggaccattaagaatgtgtcatgctcgctttggcagctcacctactaaaattggaaccatacggagattagcatggcccctgtgcaaggatgacataagaagcattccatttaaaaattaaaaaagtaaagaatgtatcggagtgttagtttcttcagacctctttttattctccaatccctttttaagtattttataatatcttaatggtaactatagatgaatattagtaattaccaggcaatgttttgggtataaatgaatgaaattatgaggtaattgtatttttgtaacctgttagttaaatgagcccaaactaataggaatcataattaccaactttttaatgtttctgtgacataaggctatattgaagaatgttttatttctttgataagagtttgaacgataatacataattatcttcccaatgtggtattttagttggaaatctcaaagttagcacattcttacggatttgtgtgcccattcgtgtggtttccagttttaaggacttgatattttta

SEQ ID NO: 15574 - DNA, 1151 bp, Homo sapiens
ctgattatttttggaataaactcccagaagtggaaatataaggctgaaggcctggtgtggtggctgaagcctgtaatcccagcactttgggagaccgaggtgagcagatggcttgagcccaggagtttgggacaacatggtgaaacctcatctctacaaacagtgcaagaaatcagccagcgtggtggcgtgcacctgtgttccccgctaatcaagaggctgaggtgggatgatcacctgagtccaggagatcaaggctccagtgaaccatgattgtgccactgaactccagcctgggtgacagacttcatctcaaatatataggtgtgtgtgtgtgtgtgtatatgtgtatgtatatatatatgaatagattatgtatttaaggctagggatgcttgtatagtccattagaaagcttttttttcttaactgcacttagatttgttgtcctttttattactgccccgccccccccaaaaaatttctggtctgtctttagcttcatttctgaacattttatcctggacctctctttcttcaagtagaaataatcggctgggcgtggtggctcatgcctgtaatctcagcaccttgggaggccgaggcgggtggatcacctgaggtcgagagttcaagaccagcctgaccaacatggagaaaccccgtctctactaaaaatacagaattagccgggcgtggtggcgcatgcctgtaattccagctaattgggaggctgaggcaggagaatcgcttaaacctggaagatggaggttgcggtaagctgagatcgtggaattgcacttcaccctaggcaacaggagcaaaactgtctcaaaaaaaaaaaaaataatcgcagtctttaagttacacataccataaaatatatgagaatttttcttggaccctaggagtgattttttttttccactttttttttttttttcactttaggtgagcatttgtacagtgaaacattttgctacacaaaagtgatgtttaggaatactaacaaattattttcaaggttagttgtgtttaactacttcgtgtttccctgtagtcttctctaaagtttccccttcttgtgtgtattcattctctcagtgcttttgtagcctgataagaccccctgtacgtgtgcctctttgcat

SEQ ID NO: 15575 - DNA, 1073 bp, Homo sapiens
ggtagctatgctggtaacacattttcttagttttcctacatttgagaatgtcttgatttctcctttatttctcaaggttgttttcactagatacaggtttctgcattgacagttgttttcctttagcacttgaaacattttgtgccacttccttgtggcctccatagtttctaaagaaaaatctgctttcatcctaatggttttacccctacaggcaagatatagtttttcacttgctgctttcaatggctttttgtctttattttttattttatttattgttatttatttatttatttgctacagagtctcactctgtcacccaggctggaatgcactgacatgatcttggctcactgcaacctctgcctcctgggttcaagcaattctcgtgcctcagccacctgagtagctgggattacaggtgtgtgccaccacggccagctgctttttgtattttttttttttttttcagtagggacggggtttcaccatgttgaccaggctggtcatgaactcctgacctcaatcgacccacccgctttggcctcccaaagtgctaggattatagacgtgaggcactgcgctcagccttgtctttagttttcagatgtttgactattatgtgtcgatgtaggtttcatcgggtttatgctgtttggggtttgttcagctttttgaatctgtaggtttatgtcttttgccaaacttggggagttttcagccattatttcttccactacttttactaccctacccttttcttcctctccttcttggactctaatgagacaaaatattcacttttttatacttctacaagtcctttgtactctgttaatgtttttcattctgtttttctctgtaattcaggttgaagaattctattttctggcttccaattcactgattcctctgtcccctccattctcctattgattttattcattgagtttattttggttattgtatttttcacttcttaaactttccatttgggtcttgatatcttctatttctttgctgagaccttctgttttttcatttgtttcaagtgtgttcataattgctca

SEQ ID NO: 15576 - DNA, 1084 bp, Homo sapiens
cttttaagcaatggcaaaagggacagaaacaaaatagaaatcaaagaggaaagtgtacagtgcatgtgaacacagctcaaatgttgaaaaaggagccagtttctagatcacgggatcaaagcacaacatcaactctcactgctgtaaccaatggtgggtcaaagtggtaaaagaatggttgtctcagtcaaacacacacactcctagaggttggtttctccttcctctgtgccccagagcctgtctgcttacccttttatggagcttatgacaacatttgattactatttgattctatctgcttctcctaccaggaccatccactccaagaaatttggcttatttttttaatcctcagaatctaaccaagagtctagattctctgtctagttttctctgccccagagaagatactcaatacacatcaaacaaatcacacactaacttgccttgcccttcaccaactgcattgctttggtgagtgaaacaccagatactccaagcttgttatttcttactgtttcaatctgggcttatacacaaatcctcatctctcaatgccagggactatgtagataagacagataatttcagagcctgcagagtctagaaagctggttgtcctgcagctactgtgcttcccttatatagcctttagagaggtagggaggaaaggcagacaaatttctttctaatcattgctacttctgccactttctgtaagctcttatcacataagagcagaaatgccagtttgaacccatcactggagttgaaaactcaattgcagaagactaaaccaggtacttctgaagaagtctagtaatactgtcactgaagtctagtttttttacttttactggttccctctcccaaatcttaacacctagcaaagtgggtccctggaaatccaatgctcactttactgtatatttaatcaaccacagtaaaagaaagaagacatctaacttctcttccctctcacatcttcaggcccagtgcccagccactgcttcccttcccagtttaccccttttctcacaaagatattgggaagaactagaagaccgatgtctcatctcgt

SEQ ID NO: 15577 - DNA, 1055 bp, Homo sapiens
tggcaggcaaccgcctctatttttgtattttattaaagtagcataaaaggcattgcagaaaagctttccctttcttaaggaaaaatattcatttaaatattggcttttcccccccatttcagatgtatcaaaggccattttgaaaaacaaaacaaaatgaaacaagaaacccttagtttttgtttctccccctagcctgagtccatctactcttttggtgctcagtatttcttttctgatacactctttcttggggactaagccaaggaaaccaactaggaagtctgctgcttgtttaaggatgctccacccatgattcatctgggagttaagggcctctcagtaaagcccaaggaaagccccgtaagaggcccagcattcgtgtgttcctgtttaggatgaactctgctctctccatcattccacctcttcagtcatacttaagaatctttcttctcacactactggactcaagttttctcttctcaaggctttgattatttgggatcctactccaccttttcttttttcttctgaaactctccagacctggccaccttgctgtgttctcttctggtctaactttaagaggctgtatcacgatgccctcttgaagaacaagaggtaccacacagatgtgactggggctcacatagtgatgccttgtcaatgtggagtgccagcaggcaccaaatcacatgtttttgctactattacaaaagctttgctcacttttcagtagcgtctctggtcctatttgcaccattaccatctccccacttgctcggtctttacaaccccacttctgttcatgacatatagtaaaaactcctaagttccatctactggccaaattatagtcatttaaaaacctccatacttctaaaaattccatccatttcacaaagaattctgcttcaaatggtaaccatttgatatgtatttttaaaaaattcagatgaaccaaaatagctttagatacaaacattgtggggtgacaatttaagttacttaactcttctactttctcctggtgaaccattttgactaaatac

SEQ ID NO: 15578 - DNA, 1027 bp, Homo sapiens
aagatagtatgttttcaatagtcttagcattattataactacccaaataatattcaatgtcaaattgtttgttaaaattatacttccttctgtaaggatctaatgttattactcctaagctactaaggatagtgttcctagcttcaaagtcaaatacatttttccctacgcccaatcaactacttaacattttccagattttaagttttcttcatatttagaccatgctgtgtttatgcagtgcccccaaacagcttataattggtttttttattgctttacttgcctttgttatattgttagattcttctgatatctcagtaataccatctaccttaaatattttcaacatttatttttaaataaaacaagtattggcttatatttatatatattttacagttactatttcatatctttaaacttgtaacaaaagtgtcctttttaccatttctgtcttcactgaggagttgttttcaatgtttacttatttggaaatattctattagaaaagagttctttgggcaaaaacataacattcttcagacgccatatatagtgttctagcttgctccatggttttatatgctaacttataaaagttctggtatgaacaaaatagcaatagccagtctacaactggatttctaaaacattcaagttcacatacttcaagccatcctgagtgatctttttatcaaggaattctagtgatcatgacgtcatgtatatcaaaatcttagaaatctaaagaaaaccaggcccagattaaagttccaccccctacacacacacaccccagtcagtgtgcaaggggaaaatttaccaggtctttatgttctgctagaagatcttcaacatcagagaagcgcgatgctggctactgtgatgaacaagctgacaacagccagttcacacacaaaaatgtttgagccccttgatgaagtaggtgctatattgctcaggtgggatatcagaacagggggagtctcttcctttatgaagcacaaactctaaagtggtgagg

SEQ ID NO: 15579 - DNA, 1019 bp, Homo sapiens
gctaggcgcagtggctcacgtctgtaatcccagcactttgggaggctgaggtgggtggatcacgaggtcaggagttcgaggccagcctggccaacatggcgaaaccctgtctctaataaaaatacaaaaatcagccaggcatggtggtgggtgcctgtaatcccagctacttgggaggctgaggcaggagaatcacttgaacctgggaggtgaagtttgcagtgagctgagatcatgccattgcaccccagcctgggttacaagagcaagactacatctcaaaaataaataaataagttatttaaaggaaagttcagatgtgatttggaagtaggtttgaaaaagttgtcaataggtgagttcagatggcaattatttcccagtctgtctcttgactgggtacaaatttttggacaattaaagggattccttaggtgtcattttctcattcttggcattttagttaattttcaaaataaattagtataaaaaacaaaattaaaggatctaagggctgggctggatgatcataattgagctaccggagactgagggtgcttggactagattagtgacatttcaagtttttctttaataacaaaacccttggttcacacagatcgcttttgcttaagcagaaatggggacccagtgtcttgcttatctggctcatcagccctatgaagaccccagattagtcatttgcatcagttaggaccttcacttgcaaacaacagaatctgactttggccagttttcaaaattgctaggaaagctgaagaattaagcttcagaaaggaaaccagaatcagggaagctcctgggtttggagacacaggaactaaaagggcagtctcttcaggagttgtcatcaggaccagacttggtgttcctcagtgctgattgccttgcttgggtcacatgtctatcccttggtctgggggtgtgggacattttgattgctcatctgatcaggcaggggatggttagcagaaaagagggatgttaggagaataaaa

SEQ ID NO: 15580 - DNA, 1044 bp, Homo sapiens
atgaaggtgggtgaggagtagattagcttgtgagcggggaagttgtcagttgagaatagggatgaagggaggtggttgggtctgagggaggtggagcctttgaagaggatggaagagaaggctgccaagggcatcccatgggacagctctagggcaaggggaggggagaagtccgagaacgtgaactttaagtggctccaatccatgtaaccatgtgtgttttttctttgtttgtttgtttgtttgattaggacatagcagccctttgtgggatgttgaaaagtcagacaatgggattaatctagggaaggagtctgctccaaagagacctaggtctcagcaggaaagggatgaacatgggggaccctcggcctaggttgtctaaaatatgaagtgatggggggtgacagaaaagaaaaaccccacacaactctatgtgtgctcatgagagtttgtgtagaggtcaactctcttctttaactaaagccataaaaggaaaagttttcaaatgtgctctggctagagggaagaaaattccctacagagactggacactagttgtaatcttctcaataaaaccatcatagttcatccttaggtccaacctaatttacaaattactcttgtcaaatggcttataaatcagtatattttaatttcttatttattctaggtaaggaacctcattggagaggcagtatgataaaagagctcagaaaactttagcgctcctcaaatctgaagaatcagggatattgctgtaatgatgtaggtcttacttgaatgctattttactacttcaaattttgttagggctgagatcaagtctgataagcaccttaacttaggcaaataattatggtaataaaagattatgccacagtgcgcaggcttccaaacttttccaactattttcttgtaaatacatttgtacaggggtagttttcccctaggacagaccataatttaaaaaacttgtattcactgcagtcctataaattactgtttccccttaatgttggaaagtagtgatttattttagca

SEQ ID NO: 15581 - DNA, 1042 bp, Homo sapiens
atgaagaaataggataattcctagcgtagtaacccaaataaagttaattatcttaattatcttaataatcagaagatacaatagcagatttatctactgccatttgctgtgaagccctttgtaccaccaacgctgctctgttgtatctttaaagagcctagtgactgcagatccccttctgccacagttatcatgtgacactaagtcattggcaggcaggggagttcttttgaattctggttgtttttagtttagtgcaaattcgtaagtccagatgaattttatcccagggtgatgaacaaatatggagatgctttcagaactgctatatataatcttcaaaactgttggggggtagttgatgttaggaaaatggagacacctcctcatccagattttcaaaaggtcaaatcctataagatgatatcatgtcctagaaaaattcaagagctcattttaaacagatggtggaagaacattagaaaagaagttatcgctaggagtcaaaaaagtagttcagtaattgtaagacaggccaaattatcctcattattgatttgttgcatctggggaatgccatacctataatgtaccatgactagcatggttggaagtcctccagcgcagccttctgaagaggctggagagatgctggctctttattgaactgtgaggtggagtcacagctggctgaaccaacacaataacctaagtatctatgtggcaggatatctcttttagagtatcacagcgtttaatccttacatttttttctataaaacattttttatgattacttggaaaaagatacaaaagaacataatttggtgtaattatttcaatgaagctaatgagatttcctgccacacagatgaatacagagcattaccttcataactgttataacctgttgtggcagatgacatctggagtatttgtcctggtctgagcaatacattataaaattggtttagaaaaatttgcagcagagattagtatggctagatctgcctggaaaatgacctgtgaaggaaagttaaga

SEQ ID NO: 15582 - DNA, 1036 bp, Homo sapiens
gtggtaaagggtgatattgtggggttgttagaagaaacatttgtcatttagaattattggtgatggcctggatatggttttgtatgaattgaaaaactaaacggaataagagaaggagaaaaacaagtattaaaggtctaagaattgggaggacctaggacatctaattagagagtgcctaaggaggttcagcatagccttgccagcaaagattatttatttactttaagagttaagagtggcagtttggggatagcaccaggagatatcagctgtgatgacttggagaaacactgtaaaccggcagtgtaaacaagagcagggcatgtatgagtagttgagaacagtgaataggagtatgactagacagaagatagtagggatgacaagtttttttggggcacagtccaagttggtctggtgtctggaatgagactggggcctaataaaaaggagcgtccatacaggagctcaagtgggctgtaccttgtagcattctgaggacaggcctgaattctgagaagagaaagaggtaaaagtattgtccagtcttttttaagttggtggctgagcttggtgaggtgtgtttttaaaagactattagtccgttctacttttcttgaagactgaggactgtaagggatataaaggtttcactgaatactgagtgcctgaaaaactgcttgggtgatttgactagtaaaggctggtctgttatcagactgtatagaggtgggaaggctaaactgaggaattatgtctgacagaagggaagaaatgactgcggtggccttctcagaccctgtaggaaaggcctctacctatccagtgaaagtgtctacttagactaagaggtattttagttatctgactcagggcatgttgaataaagctaatttgccagtcctgggtgggggcaaatcctcgagcttgatgtgtagggaagggagggggcctgaataatccttgagaagtagtagaatagcagatggaacactgagaagttatttctttgaggatagatttccacgatgga

SEQ ID NO: 15583 - DNA, 1020 bp, Homo sapiens
tggcattgactgctcccaagaggatatttggcaatatctgaagacagttttagttgtcacagctgggagaggtgctactggcatctcgtaggtaggaactagggatgctgctgaacatcatacaatgtatagatggcccctgcaataaagaattatctggcccaaaagtccatgacgcttaggctgacaaacccagttttggtttgccaccttaaacgttcttctatttatactgtaaatttcctgtaggatattttttctgaatgaaataagcactccaatactaataccattgattctaagatctacaaatatactagtcattctttagagcagtgtttctcaaatttgtgcatcagaatcactgggagggcttgttaaaacataggtgcctgggccccaccacaggagtttcagtagatcaggggtatcctatgcactgtaggcctgataatttgtatttctcaaggtttccaggggatgttgatgctgctggtccaatgtccatactctgtgaaccactgctttagcgaagagcccagggttagttaacctgagggtttatcacacttttccccattagaggccatgcccagaaacttgagatgcaacttccctgggtagccctgcctttcttttccccgtatctcccagccaggtacctggagctgcatctgtggtgattgccaggctggcagcaccttagactcaaaacataccccattcctgagaacagatgaaggctgctagcagggcaaggcaccaatccctctccccccatttatcagccagtaggggcctgaggtccaggcccttggaaatgaagtaacatctaaaggaactatcctagctcctcagagcacctgtatcagaatcacctacggggtttagagtcatgggcccatccttagtaattctgtcagcctgggaatctgcattttatgaaactcttgacatcagtgcttctgtaagtgtggtcctgggaccagcatcatcatcaccacccgcgaacccgttaga

SEQ ID NO: 15584 - DNA, 1043 bp, Homo sapiens
caccttccattttgctattcaactactgcaatctggcttctacctcattactcattagaaactttacctaattgccaggtcttatggtttatgcaatccatggtggcccccgctgcttgctccctgcaggtaggtgtggtccattttagaacaggcaactctagtcccttggtgctgagctcacccacagaaccactcagttaggcttatgaggttagtacccagtccccattagtgcccgccaaagtgctgcaattgtatgggcccaggcccatctcctcttcatcatgaactcacaatgcactttgctccaagtcctccagactcagtaagagttaggtcacccttctcttcaatcctgaaagacacagatagcatactacctctctttaggacactgttcttcatacttcaatgtgcatgtgaatcacctgggaatcttagattctcattcatcagacacggggtggggcatttctaacaagctctcaggcgatgctaatgttgctggttggagtactgtgagtagcaaacttttggatgagcctattttaattacctgtttgggtaatcctggctggcaacttctcctctaagctctgaaacacatgaaaagcctgttagctctccacctggaggtaaaggatagcgctcacaagtacgttcctcataaaaggctgggaaaattgccttaccttcttttctgaaaaccaaaaacataaaacagctgatttctcaatagaccattgtgcctcattaactgtatcattcacctgcctagctttgctttctttatctgcttcttaacttttattactccctagcattccatccatggtccttttctttcttccctgactactctgtccttaaattgtcacattcattcccatggttttccctcttgtagagagactaaccacatccacatccctaatttctgaggtctaaggccatactgtagattcagtacttagaggacaaccaagatcattttccccctagactgtggccctcttcccatatttcctaacttgattaat

SEQ ID NO: 15585 - DNA, 1047 bp, Homo sapiens
gttcttcctttcttcctttctcaaatgtgctcttcctttctctccccattgtgtttaatggcatcactagcatcatttccaagctagaaactatggttataattaacttattgctagtcctcaattcccacatgcattgatcaagaggcctatcagttctacctccaaactatctctatgttagtatatattccccttctccatcttcactgaaaactcccatagtgactctggaatcaatcattcagtgaattgaggttatctcttaacatgtttctgggtctcttgtctctctcttctccagtttgatccccactttacagctacagttatctaaaacacaagtctgaccatgtcattctccttaaaaaccttccctggcccataggattaacccttggcctttccttcacatgataaaagtcaagagtacagttttcaagccagatataatacgagtgcaatattttgatagtatactcccttcatcttttttcaggaagcgaaatgtggtgattttaaagctgttatagtggaagtatcaggacaagcccattacacgggtacagcaagctttataatagaagatgacgacccattgagggatggatttcttctcaagtgacttcttccatgattttaagggctttctttttaaagtaatcattatccttaaggactgttttctctaaattatatgaaaacaaataaattatacatataaactaactctcattctttgtaaaatactaccctgtggctaaatataaagtcattatacctcgtatttgcaactgtatttgtataaatatcacttatgtctagcatacaaaatgccagaaattcagagtctttttctagtgattaacgtatcaggtaaaattaaaacagtagttacttttaaaatattgctctatagtaattactattaatatcatattttgtattaaaggctcttcgaataatatgtggaatttaactgaactttacaagctcattatttttgtcttccatttttttgagtagaataatgccctctctataagc

SEQ ID NO: 15586 - DNA, 1062 bp, Homo sapiens
atgcaggacagcttccttagaagggactcaaagtatgataagaattataaattgcagtaaaactatgtttcttcatctagacaaagacataatttctagcaattagtatacgttgcccaaaaaggtattttaaaaatgataaggattaaaaagttatgtctaagaatgacccatctgcattatttataaatttgaatcaaaatatttattttgcatgtgatctttttttgttacttgcagtttaaaattaatcatcctgatagtgaagaccttgcctttttatatggaactatattaacagatggaaaagatgcttataccaaggaaccaaccaccaacatttgtgtttttgcagatgaacaggtattaaaactgtaatgtttagggacaaaagccaggtaatatggaacacactatgaacattctgtcttcatttattctgaaacaggttgacagaagtcccactggctcaggagtgacagcccgaattgccttacagtatcacaaagggcttctggaactgaaccagatgagagccttcaaaagcagtgcaactggctcagtattcacagggaaagctgtgagggtaagtggcacccttagcttcttatttataaatgtgtcactcatgagactggagaggcctgagttgggtgtttgataaatttcttcactcagctctcagaagagaattttaaagcaggcctgtaaaaacttcttttcaactaggacattggttatccagtgtggtcttggggccccagcgggcccctaaggtcctttccatgggttcagagggtcaaaactgtgttcataataatgacattatttgcttttcactctcattctctcaagagtgtacagtggggttcttcagaggctacgatgtgatatgtgataacccaaccaattgaatgcagaagctagatatgagaacctagttgtcttctgttaagccagacatgaaacaggtttgcaaaaatatcaaacaatgccacttttctcataattttttttgttttggcaaacagttattttcacaaaaatgtgttattcatatgt

SEQ ID NO: 15587 - DNA, 1032 bp, Homo sapiens
caattgacactgaggactactagaggggagagagagggataggggcaaaggccgaaaaactacctattgggtacttatgctcactacctgagtgatgggatcatttgtaccccaaacctcagtatcatgcattatacccatgtaacaaacctgcacatgtaccccctgaatctaaaataaaaataggaattattttaaaaagaccccaaaccccccaaatcaaggcaagaccatccaccagcaaaaagattatgacttgctgaagactccggtgatcattagcattttttcaacaataaagtgtttttaattaaggttaaaaaaaaggttgacctgatatgtatttccagcagtactgtatgagattgcctgtttgtcctaaaaaaaatggatattattattaaaataatttttatcaatttgatggtcaaaaacatattatttaattatttgattacatgtgaagccagttttttttaatgtttattgctatttgcatttacttatgaattcttagttcagatcacttacttggatttctattggagtgtttctcttgataaaagttctttacattttaaggatattaacttttttgttatatacatttatgtatatttatcagtttgttatttgatgtttttaatggtgttgacatattagaaatattatcgtatgtgggtgtgtgttcaaatgtattattgatttcctttctgtttcttccttttgttttacatttaaaaacctcagtttgaggttaaacaaattcacattttttctatttctcttaaatattttatttttttacattttatcatttaatcaattttgagtttgttttggttaatgaatgtagaaacccatgtttttttcaaattaaccaatcatcaacaccatttactaattatttattatcctgtaatttgaattactacctttacaatctactaaatatttgctttcgtttaagtctgtttctaagcttcctactctgttacattgatctgtttagtactatactcattgtatact

SEQ ID NO: 15588 - DNA, 1021 bp, Homo sapiens
taggtgatggggtgacctgtgcagcaaactaccatggcatatgtttacataagtaacagacctgcacatcctgcacatgtactcctgaacttaaaataaaagttgaaatttttttttaaaaaagaaagaaagaagacccaactatatgctgccttcaagaaactcatttcacctataaagatacacatggactgaaaggggtggaaaaagatattccatgcaactagagcaccctgccccttcaaataaaagagcagcagtaactatacttatattagataaaagagtctacaaatcaaagaccttcaaaaaaaaaaaaaaaaagacaaggaaaggcattatataatgacaaaggtttcaattcagcaagacaatataaccattataaatatctatgcactgaacactagtgctccaaaatatataaaacaaacattaatagacctaaagaaagagacagactgcaacacaataatagtagtggactttaatatcccattcgcagtcatgaacagatcatccagacagaacgttaataaagaaacagtaaagttaaactatacactagatctaacaggcctaactgacatttataaacatttcacccaactgcttcagaatacacattcttttcaacagcacatggaacattttccataatagaccatatcttaggctacaaaacatgtttgtacaaattctgaaaaacaaataatatcaagtatcttcttggatcacaatggaataaaactagaaatcaataacaagaggaaccttggaaaatacacaagcatatggaaattaaacaacatgatcctgaatgaccagtgggtcaatgaagaagggaattaaaaaatttattgaaacaaatgaaaatggaaataaaccataccaaaatctatgggattatggcagaagcagtaccaacaggaaagtttattgcaataaatgcctatgtcaaaaaagttgaaagtcttcaaaataaacaccctaatgatgtgccttaagcaacaagaaatgt

SEQ ID NO: 15589 - DNA, 1121 bp, Homo sapiens
tttgccttagaagtgcttttatgtgaattattcacaaaactcctgccattatgaaaattgtttatggaatttcatttgctaaatgcattgtcttaatagtttgatttttattacaaaagtgataattgtcattaagcacattagggtgatgcaattctaattaaaagcaaagaatcttcatcttttagttagcctgcactatattatctagtaagcatatggtttctgttaggctttttgaaatattacaaatagtttataaactcccattagtacctatggagactcctaaggggcatgaagctccactaaaggaaccactcaactagacggcatttgagtcctttctagcttaaagttatgtgaaatcgcttggataaattcacttaatttttaacttttcttagactataggcaataatggagaccagtcccacaagatgacaaccagtcgttgtgtgcggctgatgttaatcagcatggccaatgatttgaaagaagtttggatctcagaacaacctttcttgttagtaacatatttgtggcaatacatgccaacctgggcctggtggataaccaacaagatggggaagaaaaggattgagaactttaagagtggtgtggtaagaccaatttctaagtttcttaatagtatgtaccaatcttgcaggaaggtacagaattttccagtgtttaaaaaactttctggctgggtgcagtggctcatgtctgtaatcccagcactttgggaggccaaggcagatcacttgaggccaggagttcaagaccaacctggccaacatagtgaaaccccatctctactaaaaatacaaaaagtagctgggcatggtggtgcatgcctgtaatcccagctactcgggaggctgaggcatgagaattgcttgaaccgaggaggcggaggttgcagtgagccaggatggtgccactgcactccagcccgggtgatagagcgagactctatttcaaaatcaaaaaacctttctaaccctccaccaatctcatgatataaagaaaaataaataaaaaatattttatccccatgcatatattttggtttactataaattattactagtcttggagagagaagtttcttacaa

SEQ ID NO: 15590 - DNA, 1101 bp, Homo sapiens
tcccaaagtgctgggattacagatgtgagccaccgtacctggccttagttgagatatttacatggaacctttttcttaaggacaagtggtattttcttgaatgtctaagaaacagttgggttttaaaatattgatcatatgtaaatgtgtatatcatgaaatagtggacagtgtgggctttggagctagatatacctgggcttatatcccggctctgccagggttcttgggtgtttattcagtagttatttatggagccttttcaatattccagtctttgctaagcactgaggccacagcaatgaacaaggtagacagggtcctacccttaatggaatctatggtctagtgggacaaattaatctctgtaaacctcagttaccttttctgtaaaactgagataataatacctttccatacagttctggtgaggcttttagtagacaatgtgctaagtacataggaagtaatgtaaaaacgttaagccattagaattggtaactctgttttcctggctggagaagttaggagacatacgttattaagtgactgttctatgttttgctgtagtaaagtccatctgttaaaaaacttgagcaataattataattgacgtttattaaacactgagtatgtactagatactgccctgagtgctttccatgttttaactcatttctcaacaatcctgtgaaggatgtgttcttattcatcacatttccagttgtggaaaattaaggcaccaagttctcacctgggagcatttcagtgctgtgtgtgatggagctggcatttgaaccctggcagtctccagggatggtactgttaacatcacagttaggatttagagctgtttaaaacagtacaatcatttcctgattttaacttttctgatctaaaatcggaaatgtgatgttaagtgatacgatatttgatatttttgataaataacatatattttagtaaataagtcacccaggaactttgcataacagtgactttacgggttcagagagacagtgaatatcatctcctgaagtgctaataagtttttcattggagaaaagaataaaccatttgtcattgctttagtactgtaac

SEQ ID NO: 15591 - DNA, 1066 bp, Homo sapiens
tgtagcctgttatttagccattcccctattaatggaaatttaggttatttccagtcatgtacagatatacttccacatatagagatctattgctatagaatgggctcctagaagtgaaattgctaaagagtatgcacatttaaacattgggtcgataataccaaactgctctccaaaaagtttataccaatttgtgctcccaccaacaatgtatgggaacaaaattttatgcagtaacacattgattgacttattataaagactattacttttataaatagaaaatgaattattaaaaaacagtgtaggagagttcctatttcctcatactcttgccaacactggaattgtcagtgtttaaatattttggtaatctgatcagccaaaacttacatgttgttgaccattttcttttattttgacttgggttttattgtagtagattttaccagtggttttcctcaattagctgcattgggttgtggaaaagtactaatagtttccccgtagaacctaccgtgtcctagatacactgtactttgtaaaagcttaatttctgctaggtctgaggagagtcagtaggatctgttgattttaatatgtctaaattcatgaatacctctagtttatggtttcagcatactggttatgagatttaaatgtgaaataagaatctatgaaagtactagaaaaatgtaagtgctatataatctttgagagaggaaggtctttctaaatatgtcaccaaaatcagaaaccacataggaaatgatggataaatatgactgcacacaaattaaaaagaaaaataccctataatgatataaaagacaaaaggataagctaggaaaagtgtcaaataaggattgtttaaaaacataaagtacttgtagaaattaataagaaaaagcaaaagtcctattagaaaaatgagcaaagaaggtaaacgggtaaataccaaaatgaaaaaaatacacaagtctaatacatgtgcagaaatgctcaatcttgctaatagtcagaaatatctaaattaaagcaataattaaatgctattatttttgcc

SEQ ID NO: 15592 - DNA, 1081 bp, Homo sapiens
agttcagttcacctggtaagaaatgtggccccaaacaaggaaatgctgtgcatcacgtttcagattcctgcctctgtcctctacaagaaccagaccagaaatccaggtgagcagtttctgggaaattaaatgtaaaccttgccattcaattgtaactaattcctcccagttttacaaattttaatgcagtattagttcagtctaatagaaagctactgtgttagttcagtctaatagaaggctatttcattaaaatagtaaatctgcaagaatgttatttcatgtttaagttgactagattaaaaatgcctatattgtttgtttttttaagagtattttcaactgttaatatcttacctaaaataggttttctggatttattacagagaatcatgaagatccacctcttaaaaggcagaggacggctgaagccttttcagacgaaaaaacacaaattgtttcaaacacttaattggaaatgttttctccatctccctaccagacttacatgtagtgaaatagaatttgtattatttaataaaattttagggtttggtttttactattgaacccttgtactttgccttattttacaaattgaggattaccaattaaactttaactgaactaaggctaccaaatacattccctgttatctaaattataacatacaattattttataacaaaatatatctaatttttattggataaatatgaataaatattttctctcagggaaaataatttttgaaagtagggtgattgagtactaactaggaaggtattaacaccactttgtagttgtcctttacgtaactactcctttactgccaattaactatcaccataaaagtaataaaaaatgaaattatttagaacggggcaggcaaactacatcctgcaggccaaatctgtcccaccacctgttttcatatggcctgtggcctaataatgttcttacgttttccattggttgaaaaataatcaaaagaacattttgtgacgtgaaaattttatgacatctattatgtatcagttttaaaaattagaattgtatgaaattaagagtttcagagttc

SEQ ID NO: 15593 - DNA, 1032 bp, Homo sapiens
attgctatttatggatcaggatcttgagttcttgacctgttccaccatccacaattctgataacacttccttctttatgcttcacttttttcatcctaaaataagggatttgagcatatgatctccaattctcttctagctctaacattttatgacaaagctcctttaaaataatttattttacacagtccttagaaaattaagactgagaggccaggcatggtagctcaagcctgtaatcccagcactttgggaggccgaggcgggtggatcacgagatcaggagatcaagaccatcctgactaacacggtgaaaccccatctctactaaaaatacaaaaaaattagccaggcgtggtggcgggcacctgtagtcccagctactcaggacgctgaggcaggagagtcgcgtgaacccagaaggcggagcttgcagtgagccaagatcatgccactgcactccagcctgggcgacagagtgagactctgtctcaaaaaaaaaaaagaaaattaagactgagaaacgtagagtgagtattataactaaataggtggacaattagagtcaaagaccaaatttttgttaagtattacaaagataagaattcttcacatttgaattgaacatttaatattttcaaagtgcatttgcatccatctccttatttgattttcaaagccaccatgcaaaactatttaatacattgcactaagaaataggtttatggcaggagtttacaaagaaaattagtgataagactaggattcaaatctccagaatcctgttttagtttttttccttttaaatatatattaagttgcctagtaaaatattttacaaatatttattttgaaaatataatagggcatttctgggttggccaaaactaagattccaatacagctatggggacagaaataggcaccttcctttccatgtacatctattccatttgatttgatttataaggttgctgataagccttttgggaaaataactgggatagcatcaataattggatctcaagcata

SEQ ID NO: 15594 - DNA, 1045 bp, Homo sapiens
aaatcttcagaattgttgtgctgacacacattatgaaattggcacaaaagaactctttggcatcaatatgtgaggcatgatctaaggatagtcctaaagatacacagataaatgattaagatctttctaagagaggggccatattttctttggtggtaagaatataaggtgataccacctacaggatacggctgaagagggatgatgagcaatagtttatcttcacgtttggcttaaatgtaaattattcctttaattaacgtattaaatgttcactatctgaaatgaactgataatgcaaagattaaaatagccaacccttgaccttaagaaatttataacccattgtgaaagtagatatgtaaacaattaaaatacactgtgataactgctaaaatagagaaggcttgcttcactgagaagctaacaagctgatacttgggatcaagtggcatttgctaggcagactggggtgtgaggaagagaaagacattccaagtggaagattcttacataatggtaaagtcacaaaagaactctgtggcactaatattaaaacattaaaggatggtgtcagaagtagcaaaaataaaaactgcccaaagtcttcctaagaggagtgaccctagattttaaagggaaggctaaatctctaatgcgtgagtatgatggtaaacaaggatgctgtacacctaggcaagtgtttatcttggaaatgataaaaagatcgctaaaattctaaggaaaataagatgatgacatatccacactagaaagcttagcctggtagtaatgggcaagatggactagaatgtggtaataatgtggacaggtagactagatggggcaggagtctagtaaaatagatcaaatgaaaaattaaattttgatgtacataatattcacaagccaaagagctaagtgaagagttcatgaatatacaagagccatgtattacatcatatagcttattaatctcatagaatttcttttcttttttaaattatactttaagttctagggtgcatgtgcacaacgtgcaggt

SEQ ID NO: 15595 - DNA, 1028 bp, Homo sapiens
tttatttccaggatgcatttgcttgttttggtcatggcagcagtgagttggtaatcctaaaccatcacttccagcagtattcatggtatagagctgatctgtgttcatatgttgaattgtgatagtagcaaacatgaacatatgaactattgttgctcttaatagaaatacaatataaatatgggcttgtatattttcttccttacatttaaatataaagtagaatacgcagttttattattttcaagaaaaagaaagagaagctgctgacctttctcccccataaagtttttcaggatgatcaggtcacagtgtgtacgtaagagtcagctaattatggatattgtcatctcggtaactttgtaaaaaaacaaacaaaactggcattgttaattccaaaaagaaaaaaaaaagcagtaaaaaaaaaaagtcatatgcaacaccagacgcaacatggtttaatggaattaatagtttttttttttttttttttaaagaacattgatggggattcactgtaaagttggcagaggctgccaaagacgaaacaactgactttaaaaatgctggaacaatgtgataaaaaataaatttgtaacaaatcttctcctttttagcccttgtcattttagccctttagtttcaactctgcattatatttagtttatatagtgtaaacttttgtttgccattaattcatctttttaggtagaagacattaaaatcacaggtttatgaagaatctctgctcattggaatgaaatgcagtcatttgaaatgagaaaggccaggatccttttttgtaccttaccctgtcttcaagagtaaaggtgaacacttacagctctcctccttgatgtcaattttgtatgttgatcattccaaactgagaagaataaagccacattttagacatatttatagaatcaattaaagctatatgtctaaaattcgtagggcaacttctgagaagaaacaccgtctttttcttttttaatggaaagtgacaatgtgacattagtcatgtt

SEQ ID NO: 15596 - DNA, 1099 bp, Homo sapiens
caggcacggtggcatgcgcttgtggtcccagctactagggagactgagttgggagggtcagttgaacccgggaggtggaggttgcagtgagctaagatcatgccactgtactccagcttggacattggagtgagactctgtctcaaaaaaaaaaaaaaaaaaaaaaaaaagagagagaatattgaagaacaacttatttccactcaaattatttggtttgtatttagtgaacttcaataataaaactattttctggttattatctaaactaaatagactaaacccttgaaaaagatgagaattaactaaggggaccaggaatagataaaactattattttatctattcctggttgaggttgattatgatattctggcatattacagttatttataatgagtgtactttcttaatgagaaaatgggggccaggcgtagtggctcacgcctgtaatcgcagcactttgggaggccaaggcaggcggatcacctgaggttgggaatttgcgaccagcctgaccaacatggagaaactccatctctactaaaaaatacaaaattagccgggcgtggaggcacatgcctgtaatcccagctactcaggaggctgaggcaggagaatcacttgaacccgggaaggggaggttgccatgagcagagattgcatcattgtactccagcctgggcaacaagaggaatcccagctctttgggaggccgaggcgggcggatcacgaggttaggagatcgagaccatcctggctaacatggtgaaaccccgtctctactaaaactacaaaaaattagcagggcgtggtggcgggtgcctgtagtcccagctactcgggagggtgaggcaggagaatggcgtgaacccaggaggcagagcttgcagtgagccgagattacaccactgcactccagcctgggcgacagagcgagactccgtctcgaaaaaaaaaaaaaagaaaatgggtttttaaaagcaagaataataatttgtcaaatgagcaatagaagggtgtactgacagatggaaacattggtttctccataggtgtgggaataggacaagggaatgaagaaatttagttggtactg

SEQ ID NO: 15597 - DNA, 1484 bp, Homo sapiens
accaagcccagcaatttttttttttttttaaattttgtagagacgcgatctcgctgtgttgcctaggctagtctcaaacacctggcttttaaacgatcctcccaccttggcctcccaaagtgctgggattttgggtgggagccaacgtgcccagcaccaaccctccttttgaaaggaagtattgtcttttattctatgatcgttctttatcttcttttgttattataaaggtgctttatttttatgaaattatagtgaaaataaatggtggctatgtttttaatgcctttacctgaagaaaaattgacaaactgctttttttttttctgtaattttactggcacgtaacatcctcaaaagagggaaccactgaaatgcaaactgtagaatactgtatataattcttgcagctcttttttagtatagcctgtcaagctctaggaattcctcatattcaaaaggcctcggttctttccctcctggcattactgccctggaaataagcccttaggaaatgaattactaataaagacattgactttgtcagaacctttggtggcatctgtcctgtggtgagtttggtggcaggaaaataattaaacctctaatgaggagttgatcagttttaaaatattttttcatgtgttgacaagtttcagtaaccaacttggcattagaagataaagcatgagggataacatgcagtgttggaaacactgtgtcatttatcactgtgtgcatttatcactgtgtgtcatttatcagtgtgcatgtgtgtatgtgtgcgtgtgagtatattttctatttcttctgattagatcatagtgtcaaaataacacgaaagccctgaatcatgtaattttgctgcttgaagccatactagtttgtactagtggtggtgacctttggtttttatttgtaaattggagagcatattgttagcttttgggaaagggaaactggagagcttcatgacacaataataataaatacatgttcgttgtctcatttgggaagaataattaatatgttattattatctaaaacttaaacctacctgcctaaacttgttcactagcttaaggctgattttatactgttgtaagttttaaaacgtgaatatttgtatttaatagaaaagtcaaccaatttttcttttagactgcaacttctcttaaacaaataactaaccatagcaatggaagtatatgtacaactctaatgggggttagttgctgttatttagcatgatcatcaccattatcatcattgttattggtatgccccttccctcctccgcagcaagactgttggggcagtaagactactggggttcagatactagctgcagcccttccagtgtgtcatgttggacaaatgacttagcctttctgggtgtcagtttcctcatttgaaaaactgggatattaatagtggctacacctaagatattctgaggattaaaagggataatgtgtgtcagg

SEQ ID NO: 15598 - DNA, 1073 bp, Homo sapiens
caacatggtgaaaccccgtctctactaaaagatacaaaaaattagctgggcgtggtggtgcgtgcctgtaatcccagctactcgggaggctgaggcaggagaatcacttgaacccagtaggcggaggttgcagtgagcagagattgtgccattgcctccagcctgggtgacagggcgagactctgcctaaaaacaaaaacaaaaacaaaaacaaaaaaaccatcttagtttttttttttttttttgagatggagttttgctcttgttgcccaggctggagtgcaatggcgccatctcagctcaccacaacctccgcctcccaggttccagcgattctcctgcctcagcctcccgggtagctgggattacaggcatgcgccaccacacctggctaattttgtatttttagtagagatagagtttctctatgttggtcaggctggtctcgaactcccgacctcaggtgatctgcccacctcggcctcccaaagtgctgggattacaggcatgagccactgtgcccagccataaaaccatcttacttttaaaatttgcatttcatgacttgatattattaatatactaggaaataatttattttattaaatacattatatcaagccttttcctctattctttagtctaattttatttctggaggaataaagttataatttaaaaatgaaaacatggggaaataagatgcaaatatgtagaatttacttactcaactaacattacgtacctactatattctaaaacttctgatacgaacagtttattaaaacgtgcaaggcaggtgtagtgctggttaaaaaaaaagttgcagtataatgtagcaagtgcttgaatggaggtatgtgcagtttcatgggaattttgtgttaagaattttaaggactgacatggctgctcttcctttacaattgcagaacgtatgatttatcttctcagcttttatgatgatctacagttgaaggctgggtgcactggctcacacctgtaatcctagcactttgggaggccgaggtgggcggatcatgaagtcaggagattgagaccatcctggctaa

SEQ ID NO: 15599 - DNA, 1050 bp, Homo sapiens
agttgtcatgatatttccatctttgaggtcagggaaatggtcaatattccatgtccatttacgattgtattcttgctgtctaggatagtgccccctctcatcttcgctgcttagagtacctgctgagggaaaccctcctttcaggcaggaaaggaattctttgtgtatttaaaacagtgctgattcttactatagtatcgcttcttactcattactttttcttttctggtttgcatcttaaatattcttctagagagtctctctctctcttttttttttaatgaagagagtttttgtgtaatgtagtataataaacatagttttaaaggtagagatttatgattatggcttgctctggttagcaggaaaggtgttgctttggacagagcatagtctgtgaaagacccatgagtatcaaaggtggccaaatgctttgaaagactctgggcataaggttccttttctggttttattatcaatcttttcagttgtgactgagagctggcagtgtctggcatgtaggaggtgtggaataagtgtttattgaatgaataaatatgatattcagatataaagatttagtggggtctaaatttattgggtagtatttatttgattagatttggagagcggaaatagtatacaaacattaagtgacttttggtgcagtcttgacaataaaacaaactcagtttcctgtcatatctggggcttagactggacagacatttgctggttcacaagaattgctgctggcattaacctgacactttgcagctctccttgaaatatgccgtagaaaacattgggctggagcccaggacctaaagagcatagtacctttgtgtctgggggatgtgcaagtggaagagtgagctgcgggagagagtgtgatattctagtcctttctcttaccctggcccctcttgccttatagggattcatatcagctcagaggccccagttctggctcatcacaattaatgaaagatgagcgctatataagtttctcctctggtcttctgtgtagtttcccttccactcagatgg

SEQ ID NO: 15600 - DNA, 1029 bp, Homo sapiens
ctcccagagtgctgggattacaggcgtgagccactgtgcccggcctaggtaaacttaatttggaagttgttaggctgggcgcagtagctcacacctgtaatcctacctagcactttgggaggctgaggtgggaggatcgcttgagcccaggagttcaagaccagcctgggaagcatggcaaaactctgtctctacaaaaaatagaaaaattagccaggtgtggaggcatgctcctgtcgtcccagctactctgcaggccaaggtgagagaatcacctgattccgggaggtcaaggctgcagcagtgagccaagatcatgctgctgcactccagcttgggtgacagagtgagaccctgtctcaaaaagaaaaagagaaagagagaaagattgagagagagagagagaaagagaaagagagacagagagacagaaagagagaaagttgtttcccaggacaggatcttcaaatgtttttgtaattgcttacttctatcagagaatataacttcagcactcttgtatttgtcctgttacacaacattaaaacatatacaaacatagagatgtttaaaaaggatgatattgaaaaataagatatagagttctaatactttcgtgcctccatttcgcttgcccattccccagcacacacactggtctggaacacagctttgttttgatatttagattcaaagagagaactttctctttgggttttgagccatgttagttttgcagcattttattttgaaccagcgaaggacatgaagagggccaggcatggtggctcactcctgtaatcccagcactttgggaggctgaggcaggcagatcacttgaagtcaggagttcgagaccagcctggccaacatggtgtaaccccatctctactaaaaatacaaaaaaaattagccaggtgtggtggtaggtgcctgtaatctcagctacttgggaggctgaggcaggagaatctcttgaacccatgcggcggaggttgcagtgagctgagattgcaccactgcactcca

SEQ ID NO: 15601 - DNA, 1029 bp, Homo sapiens
aaaatatcagaacatagcttttatagtgtggaaactatcagaatttacctttgaggtggatgtttatgtgctgaatactgaagaatgggagaaaggggatatgaacaacacaatgagctttagtgtggcttggaggaaaccaggcaacctggtttgctagttcattattgcagacttatttctgtaacagtttgtgaaatcagaaggtattataagaaaaactggaatgtaaccggaaaagatcctcaaaatttagcttaggatatttcaagcttctattttttccatatgaatactttttttaaaaaagagagagagattcataaataagattccaatgtttatacaaaatttttggaaactgaatactgattactgtaaagatgatatatctaccagtcagtaaagatgagctcctgtgagctttgggggagaaaattttgactagagattttgctggtaaaaatgaaaatagtcattatgaggctttggaaagaaaatgtaggaaacactgtagattgaactatgcttgaaatacaaagttgggagacactggtttttagtaatctatttaatctgaagtagatatgtaatgggtgttaacttctgtatctgtaaaggacttcattctgaggaagccagttaaatttttttttttagaattagaaggaatttaaaaacttacactaatttcttggatcttatggtaaacaattaaattaggacttcactgaccactcatagtcagggtattggttttgtgggtagtgaaagaagcatgcatgagaagaatttggacacatgctttaatgtattttttctttaatgctttcatgtcttttttctcattttaaaaaattatggtaaaatatacataacatgaaatttaccatcttaaccatgtttaaatgtgcattaagtgccttgacattgtcatgcaactgtccctaccatccatctccagaaccttttcatcttccccaactgaagctctgtacctgttaaacactgactccctgtttcccccac

SEQ ID NO: 15602 - DNA, 1050 bp, Homo sapiens
ctgctgaaggatacactccacagaaattaaggaagtaaatcaaggaagagcagagatagcaaaaatcagggaaccaacctagcattgtggcaagataacagctttgcagcactatattcagtccagactggagcaggacagaggatatcaggagggagatgtccagggagaaaattgaacgtataggttacccaatgcatttgaccatgtggagaacattgtaaatagtataagtggatttaacccaccaattaaaagagacccttaaaaaggttggtgcaaaagtaattgcaccaacccatagaatactaacgcatagaatgagagaaaatgttggcaaatcatagataaggaacttgtgtccagaacatacggagaaatcttacaactcgatattgaaaagacaacccaatttttaaattgatcaaaggatctggatagacatttctccaaagaagatatacaaatggccagtatgcacatgcaaagatactcaatatcattagcagagaaatgcaaaccagaacactttacacccattaggatggctataatattaataaaaattgtatcttctgaagatctggagaaatcagaacctttatacactgctggtgggaatgtaaaatggtggagctgctttggaaaacagtccagaagttcctcagggagttgtacagttgccatttgacctggcaattccactcctaggtgtatgcccagaagaattgagaacatatgtccacacaggaacttgtacatgagtgttcatagtaacattcatactagccaaaaggtggaaagaatccaagcgttcatcagtagataaacaatgtgggcggtgcgcacggctttcgggcaggaaggtgcgctctggcgaggtaggagcaatgtgggctggaaacgcctggcgcgccgcgctttccggggtgccgtgcggccgcagcgcgcagtcagtactggcccagctgcgcggcattctggagggggagctggaagggatccgcggagctggcacctggaagagtgagcgggtcatcacgtcccgtc

SEQ ID NO: 15603 - DNA, 1035 bp, Homo sapiens
tcatttggctacttttctggttttcttcccattcttttttcatttttctctattatagggtgcttggcctgctgcttgccatcattctgtataattcatctgctatcattctgtataattcatctgtataattcatccagtttcctagtttgggtttttgtttgtttgagacggagtcttgctctatcatccatgctggagtgcagtggtgtgatcacggctcactgcaacctccacctcccgggttcaattgattctcgtgccttagcctccctagtagctgagactacaggtttgcgccaccatgcctggctaatttttgtatttttttaagtagagacgggtttcaccatgttggccaggctggtcttgaactcctggcctcagatgatccatccacctcagcctcccaaggtgctgggataaggggcaggagccatcacgcccggcctactttcctagtttttaagtgctgctacttcctatagtctgataacagaatcccgtactttccctctgagttgtagactgatgtatacaaatgtttgtccttggccatccccagaagtccctcaggcttatatgagtaaaactaagggcatttctttgttttttttccccccattttcttgatttttggatttacttttttttgtttttagttttttttttgtttgtttgtttttttgaggcagagtctccctctgttgctcaggctggagtgcagtggtgcactgtcggctcactgcagccttcacctcccaggttcaagcaattctcctgtcttagcctcccaagtagctgggattacaggcgtgtcccatcacgcccggctaatttttctgtttttagtagagacgggttttcgccaggttggccaggctggtctcaaactcctggcctcaggtgatctgcctgcctaggcctcccaaagtgctgggattacaggcgtgaaccaccgcacctggcctggatttactttctgactcaactccgcttggtcatccaatgcaagaatcagcctggattccttct

SEQ ID NO: 15604 - DNA, 1050 bp, Homo sapiens
atctcatctgctcaaggactgagcagaggtgaagaatgtttttctgggtctaaaatcaatagcaagaggatgaagactttccaattgttaattattaccagtgcaaactataacagtctgaaatgtattaattattaattaccagtgcaaactataacagtctgaaatgtattacatattaccagcttggaaacttttgttgccagacttccacagttcttcttgcttgaaagagggcatgactaatgctttataggtatttccaatattacctcccaagccatcattaggaatattgatggatcttaacctacataacctgcctttttcaaagctctcaatatataaatgtttcacaaataaatgctcaatacaaattctgttgatagaggttggcactttttaaaaaagattgtcccatttctctgtatggtatttctagaataggaatctgatatttttataaagagtgttctcagtagaatgaaacctacatttatttttggaaaaaatagtaatatgtgtaagcacacaagagaggaatagtagttttccccaggggaaaaaaaaactaatttacacattaaagtgtattgatatatagttaaatatcaattaaaattaaccaaatgctttgagattaagtatttgatttattttttaattagttgagtattaaaaaggaagccccttttgatggaagtctttttaaatttacacataaatactttacaactttgtaattagactttaattttctttagacaatggagagtctaatctctccttacaattgatacctgaaacaacaagtttttatgtggtatttattctgttcagagaccctgctctcagagtttagaggcagtttttttgtaaagggggactgcagcaaagatttctgaatgggtacatgacattttcatgtagctgttttatgtggccattttgatgtattaatactttaaaactttatcataaattaataaaacttactcatagttaaataaaattaaaacagaactgagaggtaaaaaagaaaactagaat

SEQ ID NO: 15605 - DNA, 1024 bp, Homo sapiens
gagctgagctatttcgttactgagaaaatgataagtatccatttagaatgttcatgtaatgtttggagagttttgtattatggattcaacttatatataatatatataaggtacataatatgcaattatatatctgatatatattatatataaaataatatacctaagtgtttttttaaactatgggagtgtattataaaatcaataataatatgcaaacagttgtgcctgtgtatttgaactacatacaggtatgttgttattaacagatatatttaacatttatttactatgggagccatttcctaattgaattgcgtaattactagaccagaatgcatatgctactatacattgatttactgcctgtttttacactgccattacctttcatgttatccatgatgttgaacatgggaggcatttttaatggaccaaatttttagaaaaattagtttttggatttttttttaagttctgtatactgttttgaatgaactttatttgcagctattctggatgtcagtttaataattcaggtactgaattttattgcttgctaattgtgcctttccgttgctaaattaagaaatgctatgtgtactgtgatgtaaaaataagacattaactttatcttaagttacatataatcaagcaaatattttaaaaaatgtatgtcagggtgacaggcataaaagtaaattacccttaactctttagcctttatttagaaagaaatgtggaatgggctaaactttctcaccaatttattagaaagctaaatggataaatacttccctttttgtagatatttttctgtgcattgtaagttataggagcaggacatattttttgtacattgtcttgattgtttatactgcaggtaggtatttccagtgaatggaaacgttgaaatttatagatgggacaatgcacatacttcatatgtaaacaaagcatttttctaaataatttggaaaggattggatttagcaccgttaacttttaatacccatttattggc

SEQ ID NO: 15606 - DNA, 1065 bp, Homo sapiens
cagaattgctaaatttactaatgtgggaaagacagaatttgagtttgccattgtaatgcgttttgcattttgaaaattattgtacttaatgagcctaccacactcactttttcctgagtgccgaggcagctatacaactattgtcaccacagactagatttgttctcaaccctggaggtttgaatagggatttaaaaaaaaaatctgcacagaatccacacaagacactggagaagttttctggagcctcgaagcagatgagggtggattatccaagacataaaaaaatacttaataagggcttggtgcagtggctcatgcctgtaatcccagcactttgggaggccgagataggtggatcacatgaggttggcagttcaagaccagcctgaccagcaggagaattgcttgaacccgggaggcggaggttgcggtgagccgagatcgcgccattgcactccagcctgggcaacaagagagaaactccatctcaaaaaaaaaaaaaaaaatcagtagataatgaagaagtactaatgacttggaaactgcctggacgtctatatttattggtttctggagaggcaatcaggaatttcttcctcatgatctggaatgctggggcctgcctgtagctctgacgtgttacaagctataacatgtagccctactctttcttcacagattctttccttaataggaactggaacacagatcctgtttttttaacgtaagattatatcgactagtatggtagcaaatagcacttcccttactgtggtttttgatataaaatatatttttaattataatgtgtatatggtgagttcagttgctaaactgattctttgtaacttaagagttcaaaagagaaacagtaataacactgacattagatgcaaataggtcaaaaccgtagattgagaatgttttaaattatatttttctcatttaatgtgtacattaaatgattatatatgggtcagtttttttttttttttttttttgggacagagtctcactctgtctcccaggctggagtgcagtggcatgatctcactcattgca

SEQ ID NO: 15607 - DNA, 1032 bp, Homo sapiens
gaggatgcctagtgtctaccccaactcttgcattataatcctgttaccactttagatcatcagaagaccctgtgttacacagatgaagagtgatgccccaaggtatcagtccccattctgccttttgtcatggttgacaatgttattaaaagagcactgttctgcataatggtgttttgatagagaacagatcctctgagaagagctggaggactgatgtgacttgaacaggagcaagcccaggtggtaaaccatggagggaggctctggaagaccagagaagttcagggcacaagacccttcagtaacaaacaaaatagttaacctattggcttgtatgtgcttggcagcaccttatgcatttaacttatgtcaacacatttaatcttcacaatcttcctgccccctttgagggagtaggatccattattatctctatcattcagatattggaaatgggagattgagaaacctgcttacaggtaggataataggtggtggagctggacttggggggttgccaaatggcaaactaactctctactttattctacctgttgttatgggtgacaatgttgacaaagagcacattctgcagaacagagatgttttggtagagaacagccctgttttacttgtaacacactgcagaaacccactctccccactgtcatctcagggtaccatgtcgcaaggcaggctgaaaagccaagcacctagccaagccattgctctcattcattcattgtattctgcttggtgttttaactggggccaaatatacatatgtataaatatacacatataattttccttgaagttagtcctaggaacacattccatcccttgacaaataatttgcagactttaggattattttatcttttgtcttgatttctaaattgatgccaaatttagtgtttatttttggtgactatttcattcctggtttttagtacaattaactctccactctcccatttctctgtatgcgttctttaattcctgtaattgtgtgtatacattactata

SEQ ID NO: 15608 - DNA, 1029 bp, Homo sapiens
gctggaattgtaccttttaagttctagagatgataaatctctcatttgttactgagtaagaaatgccacaaatgtataaaagaattcttcattaagcttgttttttctgccgtgactctggagagtaagtcactgtagaagattgtttattttattatcatcagaggccatttcattaaccagctgttctattgacaactgaatagcattcttgactagagaagaggctgtttcaattaagagtgtttcatattgttctgaagttctatcctcaaaaccattatcattagcaaaaacccctacttgctcattttcagctgaaattaagaattgcttagggacatttttagattttgtaacatcaaattcactgatttcagtgtctgtaataataatagcaattggctccattcttttgctttcttctgatttggatttctcttcagtgatcccattttctttaaaatctgattcttggctcaattcagtatcttttggcttagtttcttcagctacaatctctgtactttcatagtcttttccatttggtgcactttctagggtactgttactggcttcttccacaatttgttgatctggaattgcaggtaaaggaggaacatcagaaagtactggctgctgatggtctgtttctgaagtttcaagtgggcttgcttgctggggttgaacatcttgtttttccttgatcgtttcaatttcttcaaggattagagttcccgtttgaatagcagaatgcccattatctaatccaagttctactgaaatcactttctctccagaagttgtgctattgctcacatttgattcacagacctcatcaccatctttccgtgagatgccttcacttagatcctgggttgacttagcctttgttgcctgatcattcaatggggtctgtgtttgtatatccaaaatttcagcttcttcctggactttgatgctgcagtctgagtcttctataattttggaatgattactcctttttggccctcttgggaattttatgca

SEQ ID NO: 15609 - DNA, 1712 bp, Homo sapiens
tatctttttttttttttttaaaccaagaagagatttaataaaacttttttttgagacagagtctcgctttgtcgcccaggctggagtgcaatggcatgatgtcggctcactgcaagctctgcctcccgggttcacgccattctcctgcctcagcctccccagtagctgggactacaggcacccgccaccacgcctggctaattttttgtatttttagtagagacggggtttcaccatgttagccaggatggtttccatctcctgaccttgtgatccgcccgcctcggcctcccaacgtgctgggattacaggtgtgagccaccgcgcccggccataaaacttttaaaaatcctgcaaaatgtgaaatattagctaccctattacagtgtttgtacattaagaagacattttgctttgaagccagattcgttttaggacttttaaggtattatcaagttttaaattggttccaagatttggaaagtacagtccttcctagagcctgattgttatcatcgggctgtggttacgaaaagatagagtgttaacattaccaaaatgaaatcagtgtcttagtaaacacagaactttttaaacacccacctttagtatgtaccgtctgaataattctagcattttcacattgattagtcttttgaaaaatcataaagatgaacaattcataggttaatgcagaaaataatgagtatatcaagagatgaaaacagtgtgcttttgtcaaattcacaaatgtcatcaaattcagaactgcccttttggctgaattagttcagcattgtaggtgtttatatttgtcttgctgaaggactgttttaggagtgttgttgtaaaatctctgtccaattcccaattagcagagtagaacttttggtagtgcgaactcagtagttccatcaatgtgatctttacagttataggaaatgaacatagtttgcccacagttcttttaaaagatctgaataaacatgagtcaatataacatttattctgtattaataatcagtacataaattaattcaacttgaaaccttttttctacagagtactatttaatattatcatctgatccatagtaatttagtactaattttaatgagaaaaaatgaaacttttactttcataatagctcatccacttaacatttttacaaagaactactataaatatgtaacactatgcaggcttttttctacacctagtcacaaatcaaaataagcatactgtttatttaaaaacggaacactttcaaactgctgctgtattcagatcaccaccttccccacaccaaattaattgctctctctgtgtactcccctctgtgccactcatgttgcagcattatccatggctctttgccttaacccaacccggtttctgttgtcactgctccctaggttgagttcttggatggcagggagcctgtctcccttatcaaatagtgttaggtatgagttatgcctaatacgtgtgttgaatcaaattgaatttaattaggacacctgaattttatgtagcttccttctaatttttgtaactaaggagcattacaaattttcttttcaaaatgtaccataaaatataccatggattgaaattttgaattatgtataagagagttcatgttacccaataaaacatcataggaatttgaacctaaagaactctaaatcttaaatgaggattttttttta

SEQ ID NO: 15610 - DNA, 1026 bp, Homo sapiens
agatataccaaatcatgagtagttttattttttaactactagctccacaacatcttacctacatggcttctctttactttttaacattgagtatacctctttttttttttgagacagagtctctctgtgtcgcccaggctggggcgcagtggcgcgatctcggctgactgcaagctccgcctcccgggttcacgccattctcctgcctcagcctcctgagcagctgggactacaggcgcccgccaccacgcccagctaatttttttgtatttttttagtagagacggggtttcaccgtgttagccaggatggtctcgatctcctgacctcgtcatctgcccgccttggcctcccaaagtgctgggattacagatgtggtatatctcatttttaataaaaaaaacagttaaagggagaagagtcagagagacattaaaaaatatttaagaaacagtaagatatacacacatagataaataagcatgcagagacagagactgagctagaactgcattgactaaaaaccccagggttgttaacttggtctagagtgttttcttagacaccttaaaaagtaatttgagattttatgaccagaggtttacatgagttgaaagagaatgatgataaaatataaatcatgtttctaccctcagcgtcaggatttttggggcttcctgggttgattttaattttctaaaaatcactgaaaaagtaatttttcagtggcacagttttcacttttttcctgatccataaaaccagcaaagtggatacattcagtgttctataactacatttaagatccatgatgttagcttttcctctataaatcaacttaactctcttttataatggtgacacttacaaagctaaaaccccaggaaaattaaagttgatgaaagaaataacagattccccggctctatatacctgggaaatagctggttaagcttcaccacaaaggatagatctaaattgtttctgaaatgtttaaatttcaaaccccgcatagtcaaggataat

SEQ ID NO: 15611 - DNA, 1028 bp, Homo sapiens
tacttggcttgattcaggttatggagaagtcaggcatggccactgtgtgggtttgatggtatttctaggtgaggtaggccgcctatggtgtatttttggaactaaaagcctacaccccccagccacccctgaaagtttcattgctgttctctattatttgcagcattggttgcttccttatgttaaggcatcaaagtcttctttaacaatctggatatattttagttaagggtaaatcgtgaatccgttatcggacatcaactccttaatagggaacagaacactgatgggatatgacatggaacagattaattctgagagctggcagtcagtgaaatatcaaggtgtggtcaggaagaaaacagaaaggaacccacgtaacctgctaacaccttttttgtccagtcctaccttgaatgtcttatttgcatgtagtagagatggattctgctcaagttggccgctgtttactgagtacttgcagtgggccaagtatcatactagctgctttcgtagatgaactttgtgtctttaccaaaaaggagatggtactgtcttcatgttacaagcctgaggaaacaggctcattacctgggctgtggtaatacagtcattcgcagtagaatttaagcctagatcgcttatctctcaagtccaatcagtgctgttttgcattatatcttgctcctgtttcagccgggaagggaatgagagaatcgcctgtggctgatttattggcgcctgtggttgcccagagaggccaagcaggactttcagctgccctctatgccttacaaagtggagctgtgagcttccaccctatctcctgaggggaatgtgaaggagccaggctgtctagctggggaggaggtgccttggccgtaaaatatcctggccagggctgtgctgggaagtgttgcataatgtcctccccaccactgaaccaaagtgatttatttgctatggtccgtaggtggtgcctgaccaacttgtccattttagcaataacagggccagaaaagagttgg

SEQ ID NO: 15612 - DNA, 1028 bp, Homo sapiens
ggctgactgaggcagggaagcaggctgctggggcacagggcctcaggatgtggtgttgctgcggggctggcggctactccttgagggcaagaaatttgttttacctctgtgtgtcctcaggcctagcacagcgctgccacataataggaacagaatcaatgtttgtacagacagccacaatacagctatggagtactgatggtgcaccaggctccaggccctggagacagacaagtgaccaagacagatttccctgggctcagggagcatctaggagagagaaggaaatgtaaatgcagggagcagggcacatgaagggagacccaacccaagcgccatttatactggctcttaaaggatgaattagtgttaagtgaaggggggatgagggagggagcctcccagggacggcaggaaagcacagatccagatgcacatcctcttcaaatctctcttgttctgctaccctcagattcaggacattgtggtccaaactcaggaaggtcgtgaaacacgctcagccaaggatgcgttgctgttgtggtgtcagatgaagacggcagggtatgccctgggaaccagctgttagcacatccaccaccagccccttgctccgcacaagcactgccatctccagagggacattagacatcatcacccagaactacagctgcctccctgtaattgatgcaaagtctgtcctgacctgattctttgaggcctggaatacaggattcttttccaaagttgcctgcaggcagactggggggtctgtgtggtgttcacatctgatgggggagcctctgtgtgtggttagctgctgccccctcttggtgacctggctcaagaaaggacagttccatttctctcctggtatattggccctcaatttgtacacttgtttgggactacaaaaaatctaattcttagctcttactgtttctcttggatgcagctaccctcatgttaatgtcaccaactttacctccagctggaaggatggcttggcctttaatgccctgatacac

SEQ ID NO: 15613 - DNA, 1065 bp, Homo sapiens
ctctagaaaaatacctaaatatctagaaatgggccacatccttcctgatacattgtgggaccaggccttcccctggatgccaagagcagcaggacgtgtgctgggatgggggaagacagagggtgggtaacaaaggtgagaggacttattttatttccctttttctaacacataagccatctcagatttgagcttaatcatttaatccactctataatagttgtcatgattacagtctctgtttacaacactgaggggttttaaaatcctgtatcctattctatttagatcagtttttttttgttttttttaaaaaaaagaagagttatctacccagcaatctgtttccctgtctgggggagggggttgcatgcaggctgggggacaagacgggcagctggaggtgccaagatcaatggcctcaaggggtgctcccaactgggtgctttttcccatacaacctagcgctatgcaggtgctgaaggtgacacctctgctcttgagatctggctctgagtaggcctgaggtgcacgcccctctgctctctcctcccctctcccttccctccccagagagaaaacactcacttgccaggtttatccagaagcccccccgcagggcactggcagcacatcaggatgtactcctgcagggcctgctgatggaacatccagtggctcatgctaagggcagggtcacctgttgaagggcaaagggtcagtaagggcccggcagatccagccaagtatcaatgacctaattccactttctcacctgggggaatagtcaaggtttcctgctccccttcctcttccattcattcttggtacaactgctatcttccccatgtcctacgcacagcatgtcccttctcctgaactttgacatgtgtcaaagagcagcaattcaaagtggcactttcactttcttgaaatgcaccctgttaacgtggatggtgatcctcaaccacatctctggcaggcagtgaaccagcctagctgtttagcttaccttcccagactgacctcggtagctgctcccaacttggtccataactctaccct

SEQ ID NO: 15614 - DNA, 1027 bp, Homo sapiens
aagatgtcagtcagtggatctaccattctggggtctgcaggatggtggcactcttctcacagctccactagagagggccccagtagagactgtgtgggggctctgaccccacatttcctgtctgcactgccgtagcagaggtcctccatgagggccctgtcccttcagcaaacttctccctggacatacaggtgtttccatactccatcctctgaaatctaggcagaggttcccaaaccccaattcttgacttctgttcactcccaggctcaataccatgaggaagctgccaaggcttggggctggcaccctctgaagccgcaacctgagctctgcattgggccctttcagccacgactggagtggccgggatgcagggcaccaagtccctaggctgcatacaacctgtggaccctgggcccagcccacaagaccagtttttcctcctaggcctctgggtctgtgatgggaacagctgctgtgaagatctctgacatgccctggagacattttccccattgtcttggggattaacattcggcttctcattacttatgcaaatctctgcagctggcttgaatttcttctcagaaaatgggattttcttttctatcacattgtcaggctacaaattttctgaacttttatgctctgcttctcttataaaactgaatgccttttacagcacccaagtcacctcttgaatgctttgctgcttagaaatttcttcctccagataccctaaatcatctctgtgaagttcaaagttccacttatctctagcgtaggggcaaaatgctgccaatctctttgctgaaacgtaacaggagtcacctttgctctagttctcaacaagttcctcatctccatctgagaccacctcagcctggactttattgtccatatcattatcagcattttgggcaaagccattcaacaagtccttaggaagtttgaaactttcccacatttttctgtcttcttctgagcccttcaaattgttccaacctctgcctgttacctagtt

SEQ ID NO: 15615 - DNA, 1665 bp, Homo sapiens
gtcttttgtgttccttgcagtttctcaactgtatgtggagttccactgttgttccactgggaacaataggatggaattagaatcatcagccagccaaccagagtaatggagtaagggcaagatcaactgtggccccctccccgctttttttttttttttttttttttttttttttttttttttttttttttacagagatgctacttttatagaaagtattatttaagtgtccttgcttgggtactagggagtgttacacaatggttcactggcactaagctcaccatacttatgttggggagcaagacctgatagccagcctttacatgggagtataattctgtcctccatctcataagccccagtacctgagccagaatgattataaccaaccacactgtctctttatcatggatggctttagcagtaggttattttcatcattgccatttgtagctctacagtggtttatagtaatttctcatcttttaagtctctccctcagtgcctgttgttatcaaactcattgctctctcaggcagttgagctctgcatttctcccttatggggagagctgtgttggagagagagaatataacttcaaatgaaaataaagaaaaacagaatttcttgattttgaggtgagaatttgagggcactgcctctgtcagttcctatcacagattctggcacatagtaggttctcagttagtaaattgtggtggagagagagagccagaggaaacagcaggcttgctcagccattaaagaaaacagcaacagtcaatattatgtgctcaactatataagtaagaccttgtgagtgctgtagaggttaaaagacataatagatggtgtctacccttgagggtcttgctctgttgttgggaaagaggattacatctaacaattaacaataatgagataacatgctgagcatcagataagagctttacattgagttaatctcagtttcatttccattaaaatctggttttcttaacaggtagatgttgaaaccaaatataatagttcccttatggcagggaacatgattcttaaggataaaggctctcatagcatttatacttttatgtacacacatttatatattatacttaatatatgaggttttatatatatttgtgtgattattaaatgactgtctgctggcactacactacaataagtaccgtgaaggcagggagaatgtctccttttggttatatttcttccctcagtgcctgcacatagtagggagcatagtgaatatttattaactgaggggaggaatcccccatcaacctggccacattattttgggagatggctcattcctgttgatgcgtttaaggctgacagttcattcggtaacctatgtctatagcatatctgagctgctagagggattgtcgtttaaatgaaatgtaaactatagccctatccacttctcctcattactcattaaggttatattagctagtcagactccaacttgggcaattatctttttaaagtttctacatcttaaattgttgcccatagttgcccaagtctcccttaggctccaggctcagcaattgtaaatgcatttaatttcttataaattatttgcatgctgctgaaaacctccaagggcttttcattgcccatttaggtaaggac

SEQ ID NO: 15616 - DNA, 1044 bp, Homo sapiens
tttgtttgtttgtttgtttgtttttttggtgaaattttggctcgcagttcttgaaagctttctgcttttcaaaattttcatccatatgatcgttgatataaatttgttattaaattattataatgtttctgctttcctggaatgctaatctcattgttttgtctagatgtttttagtttgctgttaaggtgcctaggatttttccttttgattttgggggtaggcaaaggaagttggtttgacactttgtttttaatttaacacatctatttgttgatatttctaaatattactctgcacaatgtaattacaacagcatggagagaaaaagcagatatgttataaacaaattttatagtatatcaaacaactattgtgactgtgtagggtaaaaaggattccattttttcccctctgtgaatgcatctgcttacttctcaatatttaatatggataataaatatattttttaaaatttaagagggagctattcttaagttttgccttagaaaaaaggtttaaaaaaagatgtggactgtgaacaaccaaatacttaggtattcaggactacagaagatgttgaaaaagttatttgaaaagggttctgtggatcctaatataaaaacattcatgtatgttttataatgtcactacaatatataggccttactacatgagaaatgtaagatactgagaagagagttaggaagttaggctaactctaacagaaagtgaaactgatttggcaaatatttttttctattgcttcagtacaaacggaaaacagcttctccaatggccagtaagctttgttaaaggaagtaaccccaaagagtattcttactactaaattcagtacatcgcaaaatcccactgatgttatttttattatattttggagggaagaggttgcattttaaagataaatttgtgggacaggtatattatattgcaagggcttccttttgctttatttctgtttgggaaatttctttaggaaagagtgtaagtatacaggaaatgtatgggttagtgtgttggtca

SEQ ID NO: 15617 - DNA, 1016 bp, Homo sapiens
agaagagagggaaacatttccctgatttttttttttttttttttttgagatggagttttgttcttgttgcccaggctggagtgcaatggtacaatctcggctcactgcaacctccacctcccaggttcaggcgattatcctgcctcagcctcctgagtagctaggattacagcccagctaattttttgtatttttagtagagatggggttttgccatgttggccaagctggtcttgaactcgtgacctcaggtgatccacctgcctcggcctcccaaagtgctgggattacaggtgtgagccactgcacccagcctccctgattattttttaattaaaaaattaatgcaaatatcatgaacaataaagaaagactaagaaactctcttagaaggaaactaaggatcacttcttggtcttttggctaagatcaagtatagtatctgtttttatcagtttcatatctgatatgtcctctatccaaggacaatatattaaatggatttttggaaacaggagatggaataggagcttgctacatccactccacacattgacctgatattgcagtacttccaggaacagtgcacccaaaccttgaaaaaaaatttttttttttttgagacagagtctcactctgtcgcccaggctggagtgcagtggtgccatctctgctcactgcaagctccacctcccaggttcacgtcattctcctgcctcagcctcttgagtagctgggactacaggcacctgccaccacacctggctaatttttttgtatttttagtagagacggggtttcactgtgttagccaggatggtcttgatctcctgacctcgtgatccatctgcctcagcctcccaaagtgctgggattacaggcgtgagccactgcacctggccgaaaaaatacaaattttaatgaaaaaacaaaaaaagaagaaggagactaaggagacaggacaactaaatgcaatgtggaatcttgggcctgaaaagaacattagtgagacaatg

SEQ ID NO: 15618 - DNA, 1048 bp, Homo sapiens
attttataaaggaaaagactatattagaagttgtttatatatttcataggctgtaaccactagtgtgctgtatgacaagacttacaatttctaggaactatttgtatattagattccctgataaaatagttcatgtctttttgtaagaaaaacttctaataaatgtatttgtcagtgggtagtgtagtttatggacatctggcagcaaaatcaccaaatttcaaactaataacccttgtagcatcagatccttacacattttacatgttgttttgagattcatagattcaaatacattcacttccctcagctcatgagagtaaggctcatatttttcatggcatattcagaggtctcaatcgtaaattcttacacaaattccaaaggcaatattttctttagacccagggcatgtattagtatttccggctggagttaggtgagataactctctaaaagtgatggcagaatattaaagaggcaagtagagaaatctcatacttggaagctacttaagtgagcttgtttccaacatcggtgattctaataccaatgatgtcgaatgtttcccactgaggtggccacaggagtctccatgaggagggttgtttttgagttgacatttgaagaaagactggaattctggtggagaaaaaaccacctaagtgagggaaatggcataaagcaaaggccaacgtcttggaagtaaaaatatagttgaaggagagtaatttaaagtacagtgtttatgaaggaagtattcatgaagaaaagtagttggagataagactggaaaaaagcgattaagatcagagttttgagaacacagattagggctttgggtgtttaagggggcagaatcatgtaattactttagcagggtgggaatagctttctttaaaactatttttgaagtctcagccaaattatgaagtctaagcttccatagtctgatgaagaacaagtgaaaagcagaatccaaaggagtagttaagttctggttggcaggagttgggaagacggtggaggaaaggagctccagcctgtg

SEQ ID NO: 15619 - DNA, 1034 bp, Homo sapiens
gtctttttctttactgttccattaaaggccaacactaaattactagaagttgaaattgttcctttgcctgttttaaaactgtgtgacaaggacatacacaattatcaacttttactgaaaataattaaacaaacattaaaaatatgacattataattaggtcagttgacttagacaattaagatatggatatggcctttgaatattaaaataaataaaaaattaggcttcatatgaccaacatagggataattccaagtatgcagtctttcatatcaatattatttcatatcagaaaattcatgttagaagcacctggggctgattacaatagtgaataaacaaaaagatacaaaatgagtaatgaaattgctatagaattggccagaaaaattttctaggaaatatgacttaactggttaacaactggggctgggaatatgatggttacataatttattctcagttcttacttaaaaggtatgtactcatatattgtttcttgatttgagatgttgagcaaagaacctaacctctctgtgtctcatttgcaaactgacattctctggtttgaaccccaaaagcaaattatttctgagggccagatgacaggtatggttctaaagagcagccaaaagtgcagtgctacttaaatgctaaagccaatgataatgatacagagtgggaggaaaggtatgttgcctcctttgcctaacaatgctgcctatagtttgacctccaggaaagttactttgtttgtgggtatgtgaacatgtgtgcatacacttgaactcacatagaatatagatttaataattttttcaagtcagatttttacatttatcacatgttttcaagcatttatagatgagaagctgggaaaatattgaaatttgtaaaatgaaagcatttttctgcacaaacttcctcctgtatctgagtttggctatatagatagatggaaacacagggttttccttgtcattaaccaacattaaaggcaacttcagtttaataggctgtagctgagtgctc

SEQ ID NO: 15620 - DNA, 1050 bp, Homo sapiens
caccctccccatgacgctgaatactctctcatattccctgcaccagctgcctcagatttactttctttgtagaatgtcatcactgtctgaaagtatcttctttgtttacttgcttattgtctgtttccttctgtaaatgccagagcattgggaccttggctgtgttgtcctaggctgtatccccagcctttagaacagggccagcgtggcaatagtatgcactaaaaaatatttgtgaatgaatgaatgaatttgctttaggatattccaaaggcccacattatttttgttcaaagttttatttttaattgacaaataatatatatatttatggggtacaatgtgatattttgatatacgtatacattgtggaatgattatatcaaactaatgaacatatcaatcaccttacattcttaacatttttttgcagtgagaacatttaaaatctactcttttagcaatttaaaaacatacgttattattattactaaccatggtcatgatgctaagcaatagattttgaaaaccttccccactgtctaactgaaactttgtaccctttgatcaatatctccccattccccactccataccacctggtaaccaccattctactctctacatctatggatttgactgttttggattccacgtagacgtgagagcaagtagtatttctgtgcctatttcacttaacatgcctccagattcatccatgttgtggcaaattacagaacttccttctttttttaaaagacgaatactattccattgtgtatatgtatcacattttctttatctattcatctgttgatagacaattagattgatttcgtattttgccaaaggcccacattctgagcatgccaaagatcgacaaactatgaatagagtgaagctggaactttttccttatcctaccagttggatgtggcattttgaagccaagggtcccaactgtactctagactagagctcctctgggtgtggcttccttgattactgccatatttggttctctttcccctcaagacttgttgccatgac

SEQ ID NO: 15621 - DNA, 1063 bp, Homo sapiens
tttgatggctgctgattgatcaaggtggtggtgactgtggcaattgaacaaagaaagacagaaatgaagtttgacatactgattgactcttcctttcacaaaagagttctccatagcatttgatggtgtttgatagcattttacccacagtagaactttcaaaattgtagttaatcttctctaaccctgctacagctttatcaactaagtttatgtaacattctaaatcctttcttgtcatatcaacaatattcatagcatcttcaccaagagtagattccacctcaagaaactactttctttgctaatccctaagaagcaactcctaacttgtgaaagttttataaagagattgcagcaattcagtcatgtcttcaggctccacttcttattctgctttctttgctgtgcagatacatccttcactgaagtcttgaacccctcaaagtcaaccatgaggggtggagtcaacttctttcaaaatactgttaatgatgacattttgacgtcctcccttgaatcacgaatgttatgaacagcatcaagaatagtgaattctttccagaaggttttcaatttactttgcccagatccgtcagaggaatcactatctatggcagctatagccttacaaagtgtatttcttaaataataagaatggaaagtcaaaattacttattgatccatagtctgcagaacggctgttgtgttaacaggcatgaaaacgttattaatctacttatacatctccatcagaactcttagatgaccaagtgtgttgtcaatgagcagttgcattaggaaaggaggcttttttttttctgagcagtaggtctcaacagtgggcttaaaatatgtagtatatcatgctgtaaacagatttgctgtcattcaggctttgttattcaatttatagagcacaggcagagtagatttaccatgattccttaggatcctaatatttttggaatgggaaataagcattggcttcaacttaaagtcaccagctgcattagcccctaactcttgagtcagattgctttttttaaacatttttttattt

SEQ ID NO: 15622 - DNA, 1087 bp, Homo sapiens
cttactagttttctaaaatttacctatggatcaagccagaccagagagtcttatgtacctgaatcaaatcatcttgaggtgatttgtcacttaaaataaatttcagattaatatctttttatcagattatgccaaagaacagaggagaaacaacctaggaaatttagattctgaatttattttgaaatattgttgaagacattggcgactatcatcacacaaacaatgtcctgcccccattatatggacctggaggagaaatttctctcagatttcaacaccaggaaaaactatgtttctcctgagcaattggtttgttgttacttcatgagtttcataaatccatgtttctttttactggaaaattcagaaccaaatttgtagcctacctctgccagctgtacagtactctcattatgcattcttgtgtatttgcccggcttcaacttattttcccttttctttgatttactcatatatttatttaaccctatgtgttgactgtgatttttgtaagctgtttaagcgctttacagaataagactaagaaattagaaacatacatactgatactgatagaacattgtcatcccttggccatgatttcccatctcgtgtcctttttgaaaaatggagttcatattcatagatacttgaaaatttaagaactttttccctgtcctcagagccatctctatattctattttttaaatgaactatattattttctctaatattgccgtaaattctgtggggaaatcgctgaaactctcagagggacaactggattgacaaaattcacaacctttgtcagatgtctgtctccttggccttctgctttgaagtagcagagtctattccagcaagattaataagattaaacaattctaattcctagaaaaggggatgaggtggaaaggaaacatattttattgagtgctagctatatatcagctacatatgctaagtatgtaatatattactttatctttacaaaggaaaacagttctcccagagagaatctttgccttagtaaagaagcttctgagtcataaaaatgatgataggccgggcgtggtggctcac

SEQ ID NO: 15623 - DNA, 1033 bp, Homo sapiens
gggaggctcaggagggcagatcacctgaggtcaggagttcaagaccagtctggccaacatggtaaaatcccgtctctactgaaaatacaaaaaaattagctgggtgtggtggcacatgtctaaagtgccagctacttgggaggctgaggcaggagaatcgcttgaacctcggaggcggaagttgcagtgagcggagatcgcaccactgcactccagcctgggcgacagagtgagactctgtctcgaaggaaaaaaaaagggagaccccagcctggctgttagtgtgttgtgaaagactgagggcctcagatttcaccactgactgaaatcaacaagcagccatagacagcccagaaggtaattgtatccctactgggtctcttcaacctcaggggaatttaaactttttaaggccaaggagtttctgtataatctctcctatgtaccaaagccactcaaaaggacactaaaatactgacattattttgaaaattacctgtacttctacctttcggctgttaactactggtattattttgctacgccatgtagcctttcaaacttttaaaatgctggtctaaccgtatagatgacactgtaaatgttgttttgcaacctattttccaattccttagaataaatttctaggataaaattattaatcagataacaaaagcatttaacactttgacacatactgccaaagctgccttctggatttgtaccaattcatacccctaccagcgttgcacatgaatgtctgttctcacaaacacaaatcaatttaagaattatcaatcttttaatttttgggatctggtatgatagaacatatttttacaagttatagccatttgaatttcttctttcatccattttatcttttgcccattttactactagagtgctttttaataagtagaatttaactgatatccctgtagtcttaactagaacatacttaatataatttcatccttttttcttatatcagaacaatggcttttaatccaatatatttatggaaaaaaaa

SEQ ID NO: 15624 - DNA, 1053 bp, Homo sapiens
acagacacatgaaaaaatgctcatcatcactggccatcagagaaatgcaaatcaaaaccacaatgagataccatctcacaccagttagaatggcgatcattaaaaagtcggaaacaacaggtgctggagaggatgtggagaaataggaacacttttacactgttggtgggaccgtaaactagttcaaccattgtggaagacagtgtggtgattcctcaaggatctagaactagaaataccatttgacccagccatcccattactgggtatatacccaaaggattataaatcatgctgctataaagacacatgcacacgtacattgactgcagcactatttacgatagcaaagacttggaaccaacccaaatcaatgatagactggattaagaaaatgtggcacatatacaccatggaatactatgcagccaaaaaaaggatgagttcatgtcttttgtagggacatggatgaagctggaaaccatcattctgagaaaactatcacaaggacagaaaaccaaacactgcatgttctcactcataagtgggaactgaacaatgagaacaccaggacacagggtggggaacatcacacactggggcctgttgtggggtggggggagaggggagggatagcattaggagatatacctaatgtaaatgacgagttaacgggtgcagcacaccaacatggcacatgtatacatacgtaacaaacctgcatgttgtgcacatgtaccctagaacttaaagtataataaaaaaataaaaaaataaaataaaaatacatttaaaaccttccccccacaccccggaaaaaaaaaaagtgatccgtcctccttggcctctgaaaatgctgggattacaggtgtgagccactgtaccccgccttttatatcaatttagtaaactaaaaacagtttagcagttttttatacaattaaaacatacatttacctcacttgatccggcaattctactcctaggtgtttatccaagagaaatgaaaacataggtctacaaaaagactttatgaatgtttagagcagcttc

SEQ ID NO: 15625 - DNA, 1059 bp, Homo sapiens
cagcctggccaacagggcaaaaccccgtctctattaaaaatacaaaaaatagccaggcgtgatggtgcacatctgtaatcccagctacttgggaggctgaggcatgagaatcacttaaacccaggaagcagaggttgcagtgaaccaagattgtgccactgcactccagcctgggcgacagagtgagactctgtctcaaaaaaaagaaagaaatatcacaggagaaaaaaacttaagtagaataaatacaatcagatacaccatcctctacaccaaaaactgtggaatacacatcctaacaggtgtgcacagaacattcaccaagaaagaacagatgttgggccataaaataaggctcaacaaatttgaaaagactgacatctttcagggtctgaccacctggaattataaatcagttaaaatctttttcacatctccaaataggtggaaactatataacatacttctaaataactcatgtgttaaagagaaaaacaaggaagcggggtgccgggggctcaggcccataatcccagcactttggaaggctgaggcaggtggatcacctgaggtcgggagtttgggaccagcctgaccaacatggagaaaccccatctctactaaaaatacaaaattagctgggcgtggtggtgcatgcctataatcccagctactcgggaggctgaggcaagagaattgcttgaacccgggaggcagaggttgcagtgagcagagatagtgccactgcactccagcctgggcaacaagagcgaaaccccatctcaaaaaaaaaaaaaaaaaaaatgaagggaaattagaaaatacttctaacaaaatggtaacaaaaatacaatgccaaaacttacgggatgcaactaaagaactgtttcgagggaaatttataatttcaaatgcctacatttgaaaagaagagtttaaaaattaagcattcatcttgagaaactaaagcaagtgcaaattatagtcaaagaaagcataaaaagaaatgaattaaatagaaaagagacaataaagacaaatgccctccaacttatttct

SEQ ID NO: 15626 - DNA, 1076 bp, Homo sapiens
taaattcagtaatgactggaaaaccaacaactcagttcacaagtactttaaaaataggtaactgtttaacatttcgtcttcccaacagcctgctgaactgtaaattctaccatctccactttgcagatgaggaaattgagactttgacaagtcaaagagcacagctggaatgcaagtcaagtatgatttgatttaatttgatctttatattttaagaattacgtactgcctttctaggaggcaaaaattagtttgaagtagggatccagattagtggttttccacatgtaggtaaattcaatgtaaagcaacaagccaaaggaccctagatttctcctgtggcttcttaaatacctggaatgtattggccttgttaaaatacttacaaaagtgcagatgactttatagtttagcatttgttaaaaagaaatcaagaaaacaatggacacataatttgttgtgtggagtcagttatctgaaacataggagaagaatatagatcaggaataggaatggaaagctgaactgtggtgacaggtgtatatatgtaagaaactttttgtttgttggtgtatgatttatgacctttgggagatgtacagcagaaaaaaaggagaaatgaagactggagaaacaaaatatgttatatatttgccaataattcacatgctgcctcagtgtcctcagatcccaggctgcacataaggtccatttgcctgagtattattacatacctccttctccagaaaactttcaagttcacagccttgcgttgtccatctttaatacacttagttgttggttttaataattaaggaaacaggacctacctatacctgtgccaacagggggcactatccctctgtaaagaacaaatcaaaaagtattttgtgttgtagctggaggatccaatggtcttgcttttggcaaaaacttgaagaggagggtggtctttacatgtgtggaaaccttgagtggccgagcaaatagcaagagaaattgcttagtggcttttaaaatttgaaatataattttactttttatttttacaatacagtgtacagtatgacatctca

SEQ ID NO: 15627 - DNA, 1034 bp, Homo sapiens
cgcgcaactgaggctgcgcaggcttagggcggggcgtggtgacgcggctgccggaagcgggtctggagcgggcgagacggccagggccggcgagcgcagtgcagcgccgcgcggtgcgggcggccgagtgggggcgtcatggaggatgagcggagcttttcggatatctgcggcggccgcctggcgctgcagcgccgctactactccccgtcctgccgggaattctgcctcagctgccctcggctctcgctgcgttcgctcaccgctgtcacctgcacggtgtggctggcggcctacggactcttcaccctctgcgaggtaatggcaagtcggcccctccccgcgctcgaaggagggggttcggctttgggagggtctttggggtctttggtcgagcccggacctctggtcggcccctcctacagtgataggacaggagggcgggaactcacgggttctggggacgatattccgctgctggacagctctttaaatgacgtttagtgaaatgtgtgctcctggatagtacattccccttccgtggctgtgctctgctccgtgggttcactcagcatacatctagttcttgcgcgacggcctaaaactttaactgccatgtgttctatgtagtataggcgcgcagtaatttaattccaagagttcaaggaactactaagtgggtcttcctcgtccatcccttctgctcctcaaagtagtactgctaacaatactttacgtagacttccacaaactgtctttgcctccacaagtgtgtgtgtttatctgtgtgtatagatagagtgttatagttcttcctaatctctgtttttcaagggagttttttaaccctccctcctcccaaacccttccccaatttcaagtactttctaaaggtttatgaaattttggacgtgtgtgatagctgtgctcaatttccagattcattcctgttttctctgagcctcaattttctacatctctaaaatagaattcatgcctgccataccagcttcatgatattgtgagggttaaat

SEQ ID NO: 15628 - DNA, 1165 bp, Homo sapiens
cggtgaggcgggggtgggccacgccgtggggagcgcagccctgcgcgctttggaaggaagattctcccaccttcctcccagacccgggcccgcgtctcctccctccgcgtcctcagacacgccccctagggctggcttgtcccagccccaggtctccctgctgccactgagagtaaattggacctcgggattcagttccctgggatccttctatggccttccacattttctcatcttttttcactgtggcaaatagagcagaggggcttttgcatctgcggtcctgtaatgtagagtgggtttctttcatagctgtttttgtttgttttatgcatttaaaagcactagtctcaagacaggtctagttttcaccagactgacagaggatccgtagcacagaaaaagggttaaaaacccaaaggagtcataatttgggggtgttggtaaataccagttattggagggtagagagctggcctttaaaacctgattgtggcatttagatgtggtcttgttttgaacgtttttacagctgagactgtttactaccccttaatttcatgattcaggttgctacaagttctgtctggaggagctagagttttccggccctaaatccataggaaaagctgctatagttcttggcctccggatatatagaatttgatggcaaggacaaaactttgttttattgcttttatttaagagtcagagcttgggtgtttgctcaacgaattactcaaggtcataggaattgaatgactggtgagaatgaaattcatgtatttaatatatatttattgtgaggctgctgtgtgctaggtgctggtgaattgtgaggcaccgttctaggtgctggtgaatattgcaaattacagtgaaaaagatacgaacatccccattctagtgggtaggtgataaacaatatataactattaagaggcagtgttaaagaatacaggaaagtaaatcagagtaaaagaataggggatgggacttcagttttattttattatttatcatttttttttttgagacagggtctcactctgtcacccaggctggagtgcagtggcacgatctcggctcactgcaacctccacttcccagattgaagcaattctcctgcctcagcctctggagtaatagggattacagttgcgcc

SEQ ID NO: 15629 - DNA, 1047 bp, Homo sapiens
gggggtgctggggagaccagggccagaaaggaagggacttttgtctccaccaagctggggattcatgagatagcgatcctgggacatagacacatacgcatatcctgcaacagctgcctttggtccaagcaggcagagtcaaatcaggtctaagtggggttagacgttaattcgactttttccaatcgtgtgtgtgtgtcttcctccccagatttcctgtgattataaaaaaaactttagattcagctggccgaaaacagaaaaatagaggaggatctatgtgtccattctgggagggttctgatggtttattcattcctgtaatacatattcattgaacacctactacatgccaggccccgtgctaggtgccaggaatactacaggagtagaaaaaacagacactactcttgccctcatgaagcttaaagtctgatcaaggagacaggcataaccaaataatcactcaagtaactacaaaatcacaactctgggcgagagcaatgctgatcctgaaccccagaagatgctggagagcctgggagagtgaggaggagagtgtcagagggagtggacagagaccaaactgcctgctggcctgccttcttttttaaattcttagcttatttgtaataactttttacactataaaataacacagtgttatagcatatgtccagaatattgaaagagttgttataataccataaaatacatgaatcctgttatgaacgtggcaggtgagacatggtgtctgtctgcccgagctttctgctgcagctctgtatacttgatttgtcggtgatggatgcctttccgctgtctcttataactgactgccaggttcgggcctacctgatatgttgcaaactgcgttctgcctacttgattgctgtgaagcaagaacactcacgggccacagcccttgtccagcaggtgcagcaggccgccaagagcagcggggatgcagtagtgcaagacatctgtgcccagtggcttctgacaagccacccccggggtgcccatggcccaggctccaggaagtga

SEQ ID NO: 15630 - DNA, 1068 bp, Homo sapiens
aacagtgtcagtcctggctcagcatcaagcaggttaaaaattttttttttccatcacatatagttagataagtaaccatatatggttagataagtaatagatgtaattttttttaaaaaaaggagacaatttttaaaaagataaaaatgacatatgacatataatcccatacacagactgattagtgttaaaattctggtgaattttctatgttatgttgtttaatgaaactggggttgtcccatatcataatatgtagaattgtgtatcctgcctgttctgcctttgacactgaaaaattatgaacatttttccacattgttaaatattctttctttatttgtttttttatttttttatcatactttaagttctagggtacatgtgcacaacgtgcaggtttgttacatatgtatacatgtgccatgttggtgtgcacattgttaaatattctttgcaagcaatattttcagtgcctgctgagaactttttgagtttcatttttctctctcgctccctgtgctgtcagcaagatgacgattactttgccaccctgagggaactggaagctacccttcggacgcagagcctttctctggcagtgattcctgaagggaaaatcatgaacaacacctactaccaggaatgcctcttctacctgcacaactatagcaccaacctggccatcatcagcttctacgtgaggcacagctgcctgcgggaagctcttctgcaccttctcaacaaggtgggacatggacacagctcaaaaaggcagtgcctgccttactcctctggcttggaccactcagccttaagcgggacaataaccccctgacacttaaccctgtgttgagctatggggccatctctagcagagtcaagtcaaaacaggggactctgcacaactgttattcagtgagtgtgaaaagtcttagcctagatcccaaatcactgccctcaccagcaaaggcatgtttcattccttctgccaaaacatgcagcagaatcggatagtggttaagagcatgtctctggaatgagatgctcagtgtgagtcttgtgtgg

SEQ ID NO: 15631 - DNA, 1078 bp, Homo sapiens
gcatagccggtgccccgcggggacaggccctgggccgggaagggggccccgcccgctcccagtccccttcccctttgcttttttccagcccctcctccggtccccccagctgagcttcgcgaaccctcgggagttaaagaccagccggcctcttttttggggggggtggggggtgggggagcgggaatgggtggaggccgggggaataaaaaaccgaaatagcttcacatcagaactcagactaaccttgtggtttcaacgcgcactctgctctgtcctgaaatctggaactcattacctcatcaccaagaaactgcacgaaatctctcccccaccgccccaacacccacttgggaaaggaacgagcaaacatccctctaagaaagaaacctacacttgaatgatttaaattaaggtggatggaagttatttccctttctggcgcttgccagatttcaagaaaagctgaaaaatgggagcgggggagggaagcaacagacggctggagggcagcagcagaacaagcgaggggcagcagccgagttaaagtgggggccatccatttcgggcagaggagacaaatgaaagccgaccccgctgggatcacgtaggttcgtggctgcagcaaaagttgggtttcacaaagttgaaaaacagccggtttctcaaacaattgtgatttggaaggtttcgctgggtttgcccagatgtttacgaataaataagaaatgcagttttaaaaaaaagtgtgtgttgggggtggtgagaatgcgctctcttcggcccgccccgtcctttccaaagaaacgtgctcataatggggtgacctaattacatcgcaatggaactcaatcttagccactccgcagcaccgggtttcataacagactcggcggcctcgagtgctgggaagaaacgtgcgagggccgaggggggcggcggagcccgcgtggaaatcggaaagaagcgcagccctgcgacttccgcctgggtcatcacgccagcagtcgggccaaggcgcagggggcgggtgggggactcgttaactttttatttgggtgggcggcatccaaaccta

SEQ ID NO: 15632 - DNA, 1041 bp, Homo sapiens
ctccctgccattggccattgaggtgaaggctggtgtcacctccagccatgactgggaaaggggtcttctttggtctcctctctgccagtctcctgaaagaggggaggggtggaaggagtgcctggaaggtctcttgaagggagcgcccctggctcttcccagcaccaccagccaccccactgacagcctcagagagagggagatgggccatgaaattaacctgggtcccctgacttccttgtctcttccctccccagtgagctggactattatgactcacccagtgtcaacgcccgttgccaaaagatctgtgaccagtgggacaatctgggggccctaactcagaagcgaagggaagctctggaggtgagaggtcccagagggagatctaggcccatatccggcagccctgtggtgccccttcctgcttcttgactctctttgctttgggctaaaagactctatggcttccccagacctcccccaaccctggcctaaatgtggaagattcactttggcacaggatttggactttgccctcatggcgatgcctcctctcttgccctcacatgtctcatcctcccagtttagtgtgctttacagcccaaccccagccatttgagaaccctcctattctacacaccagactctgggacccaggccaggtgactgtgatgtgagatggttcatacagctggcaggaagagcttgttctttctgcctgattgagtcagtgcttctagacctggggctcaccaggaggatcttgataggagtgggggatgattctggacatcactgtactaacccttaccctatttggcactcccagcggaccgagaaactgctggagaccattgaccagctgtacttggagtatgccaagcgggctgcacccttcaacaactggatggagggggccatggaggacctgcaggacaccttcattgtgcacaccattgaggagatccaggtgagccccacctccactccccggaggctggctcccctggggcccctggcccatgctctgtgggtcac

SEQ ID NO: 15633 - DNA, 1060 bp, Homo sapiens
gaacatggagacatccacactagggcaagctgagggcccagcaactcacagtagggcagtgaagggttaggggagtggacgtgcagcctttctgcagacgtctacatgagaagactatggagccagggcagaaattccaataatgtgccgccaatttttttttttttttgaaacggagtctcgctctgtcaccaggctggagtgcagtggcatgatcttggctcactgcaacctctgactccctggttcaagcgattctcctgcctcagcctcccaagtagctgggattacaggcatgcgccaccacgcccagctaatttttgtatttttagtagacatggggtttcaccatgttggccaggatggtctcgatctcctgatgacctcgtgatctgcccgcctcggcctcccaaagtgctgggattacaggcgtgagccaccgtgcccggcccatgtgctgctaaatattttaaaagcaggaaacataatttatatatgcccaaagaatatccacataaggaaagactgaataggagtggataagtaggcttacctgtaatttttttcctaagctttatatattaccattctgttttaaagaagaaagagtagggggaaggaaagaaatgccacctggggacacaaccttggctcccagcccagccttatttattgagatgggccgagcataccagcagcagagggttgggtatgtgagtgagggaggctgggccagcccccatcctgtgcctgtcaacttcacaaggcagctggtgagcgtcgtctaacaatggccctgggaggtcatttcttgttcctgctttcctcctgtggaaacaaatttaagaaacgcaagacctgcttgtgccctgtagatagagggcagtgtgtctgagggtcagagaaggcgctagccactgtcgggttctgtgcagagtgcactggacacactgaccgagggaaggggcccctgcagggctgccggcagccagtgacggtaactggggacattctaaaggcagggtactcctgaggtgcttgggttgtttttttcctggtt

SEQ ID NO: 15634 - DNA, 1025 bp, Homo sapiens
gccccattttcctgacaatctgaagcttgaagggggaaagagaatgctttaaacctccaaccagtgagccccagtggtgagaccagccttccacatctggagctgtcccctgaggatcgagctggggctgggagaaagtcgctctgctccccagtttgggtggccacccaattgggagtagccagtgacttgtggtggctctcactttatcatcccttcctccttttctccctctaggatgatccactcacaaatctgaatacggcttttgacgtggcagagaagtacctggacatccccaagatgctggatgccgaaggtgaaaggcgctttccttctgtgtctcttgcccatcgcccacctgccactcagcggctaagaaggggtggaccccagcagtccggggctggacgggaggaggcctggtcttctgggaccgcatttgaggagcatggggatcacagcctcttggggattcttccatcgttctttgagctttggagagagaggtgttagttgattctgcaaaggtcttaggggctgttcttgcatcgactgcctgaggatggttcttgtctttgccttggagtcaggatagcgggtgctggggtgtggggaaatgtgcccttgttgtccggcacagtttgggatgggaagtttcccttgctgagaggtgcactgtcctcaccctctgagccctgggtggtctctggacagctgagcttagcatctcctctatgccccagctctgactggggctggctgggcatggtgtttttctcatctgtaaccctggcttccttctagcatcttctgaggagggtgctagagaactatggcttggactttctcagtggtggaagtgtccagttctgatctgtctgggaagatcccagccagaggcagtggctccatgttgggtagggaaggaaggagggggcccaagttgagtgttgacttttctgttcctcaccaaggccttgctgtcccagatgctgctagccaggatgcctggatggggacag

SEQ ID NO: 15635 - DNA, 2274 bp, Homo sapiens
gctttggagccagcagcactggtgtggaggcaagctctgctgtctgacttgctgtgtccttgagctggtccttattctgagcctcagtttcttcctctgtaaaaagacaatctgtcttgcagagttgttgccgagactaaatgagatgatggatgtaaaccacccaagctggcatcccatacctggtaggctccctaagtgtgttgttattttgtgtgtggatgggccaaggggtgcttttagcgaaccattcttctccacacagaggtgtggtgagacagacttcctatatacatttctgtagcccagagttgcccaaacttgcctgattataggattcacatggagtacttgttacttgttaaaataccaatctgtgagtcccatcccagaactcctgaaccagaatggtggttgttggggtgaggggtctctacttttaaccttttttataatcgggccagtctgggaaatgccgtttccctcagattgctctgccagttgctgtgtcattccatcttcacgggggcccattggaatgagacaagtatggccccttggaaagtgggagactttgcaggtgagactgaagcttgaaggggctggcctgaggccctgagctccttgtggtggaagcagatttagaactgagatctcccagtgatgtgtgtccattgtgcctgcaaacattccactaaagcatggaaaaggtgaaggtggggatggagagagatggagtgacaggaaggaggtgagggctgagggcctccatgatggccttgggaacctgcagagactaagtgggggatggatggtgggacagagccctgagccccactaggatgcttccccaggtgtgccttctgaaaaccagggccccagtgagcatgtggggccttgggcttcttagaaccactgggaatccacaggtgtcagagcgtaggcgcggtcttaggcagcatggacccagcgggaggggctgggactcctcctcagggctgctggtggagtcctggaagtcctgtgggtaggacttctgccacttctcccctcttcctctgccttttttattgggctgggaagttttctagaagcacaggcagggctggctcccttgttcagatagggaagttgaggaataggtatttccagggtcagctgatgatgccaggaactggggtcccactgccttgtctgcttcctccttctcaaagttggcctggtccattagagaaaaccccttttaggtccttactatgtcatcctttccagtttacccttaagaggcccttaaggaggatttcaacctctgctgggccccacccccagagggtgacttgattggtggtggtgaggtgggctggtgggctggtgggctgtgagcggaggggccctgttacggacagttgtgagagtgtggccggggcacggtgacctgctgccaggccctggggagagtcacgctgactgagcctgtggttgaaagtgtgtgactgccaccgcgggtggaattctggctcctgcatctactgttcgctgtgaccttgagtggctgtgagctcttggcctcggttttctcatctgtaaaatgagatgccttctggggtggttaagattgattgggttgacactggtagaacacttggggcagtgggttgggagtgacatcctgatctctgaagctcttccactcagacctttcaattagatctgcagcctcaggactttggacctttggggactgctgtgaacagcgagctgccccaggtgtctgggcaggcagggagtatgggtgcaaagctgtggcctctctgcctgttcctccttctgttggctcaggtctgaaaatctgggtgtggcctctgcccctcctccccgtctctcctgagtatctcttgtatccacctgcttctccctctcctacactgccaccctggactggctccctttgtctctggctgggaccttttcgtgatcttgtgcttggtctcttttcagccactcttttccatctctgatctgcccttcccatggcatttagaggtctctttctaagatgcaggtggaattatgtaaccagcatctgattggcactcccagcccaactcagcccgccacagccccatttgtttctttcagctaaaataaaatgtcttcggtgacttccactgctctcaggagaaacaacagctgcaggaacccgaacacccatgtggctagttgatctccagtctctggcaccctcttcttccctcctgcactgtgacttttttt

SEQ ID NO: 15636 - DNA, 1035 bp, Homo sapiens
ttaaacttaaaaggggggtagtttatagagccgactgaagttttttttttcagccaaaggcatcctgtattagctcactcaggaatcctaggccctgaaacggagcccttttactcacttcatcagacaggcagaggtaatctaaaacacacacaatgggcttcctcaaagcaggatgacctgggccgcggtgcccaaggcctatgcagggctgggccctatacagcgacatcggtcatctacatcggacatgggaaggtcccctgacttcgaactgacttctttgtaatgtgccagttgcttaaactccccctcttcctgtcatcttcctagtaagagctgaagactgggggctgcagacagtcccccactcacttggcttatttcctgggaccatgggtgctgtgggtggaactgaaaagtgagtgagtaatttggagatccctatggggcaccaggcagaaggctctttaataatttcagggtgaagccttcttgagaatggattttaaattagaagtgagattagggtggtggattggggtcttccctgggggttagaatcgaaggagaaatccctgcttagggagcacctgctttgtgcctgggaggggcaggagtaacagagctgcctaggaactaggcccctgaaaggactgtgagaccaagttcctaggggacagacactgagcaccggcctgaacatcgtatttaatatttctgaatgaatgaatatattaaacgcagtggggagaagaatatagattcccagggctctgacctgggtggcagtgggtgtgccccaggcctttgggcagccaggtaggaagaggtggtctgggaaactgggttatcctggaggcaaactcaacagtgccaagaactggcatttgctgatatgtgccaggcacgaacaaggactaggaaaccagggccagagaggggaagtaaccagctccaagtccagactgtgtttggtggggctgggatgcagccatgtttgggactggcagcttcccctcacttgtccctcct

SEQ ID NO: 15637 - DNA, 1051 bp, Homo sapiens
ttctttttaccccaccagagcaataaagaagtccaattgagtggtttttgtgtgtgtgtgtgtacttaaaaaaacaaaacaaaacaaaataaaccccacaggagaccacatttgtgaggaatgttttcctgatgttctgaggtgttcttgcttttcgccctaggtcttttggatcaccttggatcacctcctaccctgttcttgtgttttatagcaaatccttggatgaagataggttggggtagatgtatttcattaatttttcttataaagatatttttatttgaattcactgttaacatgttttactagttctttcaatatattgctcatctcatttgaatgtattggtggccacttctctgaaggagtagagacagtggcattttcattatcaagataagtgtctagaaagcaagtcaggattgaggcattcttgtttgtatagaggcacccccatttcttcaagaggaaatgagaaatttcttcttcagggaatgtgttgaggacaggagtataactctgatctgaagaggaattggagatccttctgcgaacagacatgagaccataaaaagtgccatgttgtatggttagcttttcattgactttgataatttcttttttctctgccttgttttctctccacccccaaccccacaaattccaaaatggaatcatgtttctcacagtgtggtttgaaagctacctgtatcacaattaactggtgttgctggttaaattcagatacctgggcccacttcccagattgaattagaatattgtgggggacagggggtgggaatcctgagaatctacattttttaaagtcctagatgatttttcatgcatcttacacttgaagccagaatctttgacatcatctttgtatcttgactatgagggcagactgcttccaagctttgccttcccggcaaaccagatcatccttatcattctcagcaggagtggccagctgtagacccctgctgataaattacagttaatgtaacttactttctggatttcaggtgtcatttcatccctctgg

SEQ ID NO: 15638 - DNA, 1050 bp, Homo sapiens
agtcagaagaacaattctcagagctcatacagggtgaggaaacataatctgaccactagagtcctgtgtcaccaactaagggattcactgaagcctccaaaagtgttaaaatttgtaataagaccagtggtcccttaaattaaggctactatggatttaccatagcaaagtttaaaaatggatcttaggccaggtgtggtggctcacacctgtaatcccagcactttgggaggccaaggcaggaggatcaaatgagcccaagagttggaggctgcagtgagctatgatcacgtcactgtactccagcctggatagcagagtgagacagtatctcaaaaataaaaagtatgacaacaatagtgtaaaggacaatagggggaaatggaatacatggttgaaatgttttttaacgtcgacggtagactgaaaagttaaagatgtctatttgagggccaagcatggtggctaatgccaataatctcagcactttgggaggccaaggcaggaggatcacttgatgccaggaattctagactgcagttgagcaacatagcaagaccctgtctctacgaaataaaaatttaaacattagccagatgtggtggcatgtgcctgtagtcctaactactcaggagactgaggcaagaggatcactcaggcccagaagttcacggcttcagtgagctatgattgcactccagcatgggtaacagagtgagaacttgtctcacaataaaataaagatctctatttgtaaaccctagagaaatcactttaaaaaaaaagaatccaaaagaagataggatatcaggataatgtggaaacctgcggttggaggagttgccatggtaatgttaactcccaccttcatctacaggcttttgttgtggaggcttttgttttactgtgtgccaggaccccagaacaaagaataggtgggaaaatagataacaaacagcaatatggtaaatttagacccagtcattaataatttcattaaatgtaaatggtctaaacatttcaatgaaaagactcggattgtcagactgg

SEQ ID NO: 15639 - DNA, 1034 bp, Homo sapiens
aaaaatagaaactatgtaggaggaagaacacatggtttctggtcatactctgtcaagaagtagatatgtaacatattgggcatttaacttaaaaattctaagtcatgttttctttttccactataagattgtactaggtgatataaagttcatgtcacttaaaattcaacgactgtgtaagtagctctttcagcttttcattaagttcatttttggaaatgtgcacatctatgccatcattgggcagttataatttggggatttaaacacctggcagtgattgaccactgtgactttgcttattccctttctctcctcagttaccgagctgatacccagacataccagccttataacaaagactggattaaagagaagatctacgtgctccttcgtcggcaggcccaacaggctgggaaataattgtgttggaagcactgggggggttggggtgggcttggaacacaggtgtgtacagcgtgctgtagtggaagttttgtatcatagtaatcctgtttccactttgttatactctagccaagattgactgtattagatgaaatgtgaggatcttgttcaatcggaaacccccgttacctcctctttttctttctctttctttttttttttttacttaaacatttttatgatgatttagatggaagttgttcttcgtcacttaatgttggttccagtccttcaactgttcatatctactttataacattcacatactaacccttcttcaagatggggtggggggtggaaatgcagtttagccatgtcctcaagataaagtcttggtaaaaataaataaatgtcctttagttatattttctccctgagtgctttttttttttttgtctttgaacattgaattttcttgcaaagcattttttcattttaagtttaaaaaccaatagctgctacacaaagaatttgaagaaagtttaagtagtgcgcaacacattttgctgtgaagctaataacacttttacctcacttttccagcataattaaatgaatcttaatta

SEQ ID NO: 15640 - DNA, 1033 bp, Homo sapiens
agtttgctaatttgtaaaattcagacaaatctagttcataagactccttgtgaggatcaagtgcttgctgagcacagcattattagatatgcagcaactcccttttcaactagattgaagaagtcaggatagagttttatttttaattacaagcatgttcttaaatttgccaggagtagaatgatatgaattttaatgtctacgtgtgagataaattataaatttcaagggagatttaaaaggtgttgaggttttttcaacaatatgaaaattgagcagagtaaaacagttacaagtgacatgttaatgatatacaagtatgtcattaatgacataacataacttttctaactttgtactagactttataaaaaaaaaattttagagacagggtcttgctatattacccaggctggtctcaaactcctgggctcaagtgatcctccttcctcagcctccccaaggagtgatattacaggcatgagcaactgtgcccggctgcattagactttaaaatgtaaactagaaaccatatctagcatactaaactgatttttaatacaatatttgctatattaaagcaacatagggggaaagctttaattattacctagataattcttcccacctacagtatttccagaaatatagaagagaggttaatgataatttatggttttttagtagtttcagagtgttaaaaaccgtaaattatcatagcttgaaaacctgtaactatttgtttgtttctaatgttgaaaattttttggcctctgaaaaactttcagaatcaaatttaggatttaaaactattttccccaggtgactttggttatgtcctttttgttctttgaatattcaggagaaataaggtattgtttccaaagaggtaacccactgccacagcacatcctgtgatttgggccgttactcctcagaccagagactgggtccgtttttggtttgtagatggttgtgtgctcatagtttctattaaatttacatggcagtgacctaggacttttttaaatta

SEQ ID NO: 15641 - DNA, 1032 bp, Homo sapiens
caatggggaagcaccagggtcaggcgcaaggcagaaggagcaagaggaaaacatggacaagaggctctactgtggattcagtggcaaagaatgggaggggcagagtaagcaggtttaggattatcgggtttgaatgacttgattgagctgtagggtgtagagactgcctctactgtctggcaccaggggtaattagggcagctggatagtggtctggagtgtgagagctccctaaaggaggtggttggaggtgtaggttttggattggttgatctgtatatgaaaggtgcacgtgcagggtgagtcctctactatcactagaaattggctggtcccaggagaagtagtctctctagagacagcaatgccccagatgtcaaagcatcagaaaatacagaaaaaaaattaaaagcatgattaattcatactcacaggtctagtttttgtgtagttaagagcaacctaaagaagttgataactcgtgttgcaggtcaggtttcccagaaatcatattctcagatgaagatttgcatgaaggaggtttaatgctcaaactaagccctaaggctccatacctgtggaggaagtgaaagaagcccaactgggcacagaaggtggaacacaatgccagtcacacaaagacctcagtggatcctgggccatgaggagctctaagcacagatgacccttcagaaatgtctccaagtggggaaaggaatcatgctagtcactggatgtgggcttcccactccaccccatgagggcatgaccttaagtgagagagctctttggacacagggcatcctaagaggggcactcagcagccacattgggcaccaagactctcagcagctagaagaagaaggtatagtcccaaaggggaatctgggctgcacaccttagtatccattagaactggaagtaggctgaatcccaggcagggatcccctggagaacacaggtaatttttaaaaaaatcaagctatgtgtctgaggctatgtggtaagacatctcagttttctgctaggaaa

SEQ ID NO: 15642 - DNA, 1022 bp, Homo sapiens
ctgtgctgcacgttctccaaccaaatcagaatgttaaagctcgaaggtatctgacctcccattttttaaattatgaagatgaaattcagaaagggaaggtaacttatccaagattacatggctagctatgatagaaagttagagttggaaaggacgttagaaagtgagggtttgaaaggactttagaagctgcttattcaatgttctctctgccctttcccatcttaggcttctccattttacttttatccatcaataaaatgttaacttcaaaaagaatatggcaattcttgggtaaaagatgctctggaagtgtgagtccgggagtattatgtgactaatgtcttaactaagaataataatatattatggactagttttaatctcttgtttcaccttgaactgttcaggaaggaaaatagcccacggaaattttttaaaaagtctttctctatctgaattgagaaaaggtgacaggcatagttggaacatcttttaggcagtgctggtgaacttcaggctaggccttgttccatgaaataataaaaattttcaaaataatgcagaccattcccttccagggatgctttctctgtaatgttttaaccccaagaaatctttctgtaaaaatctataaaaatctggagtgttccaggatacaatttgcacattctccaatttaactaaaacacaatcgattttttgttttctttttctttggcttagcaaggttttaagatagtctctttctggccacagagggagatgatttgcctctagaataccctttctgtgcttgagagagtcacaagactgcaagctcatggaggatgagagtcaagtagaggtggtgacatctctcccttggccaacatccctctctttctctttccttctgccttcagtggcagtagcaaaagtcctccttctctttaggtagacagtcagccactacaactgtggcttcctgaaatcctcagtggagctgtgtacttggcacagatttgtcttgaagaagggac

SEQ ID NO: 15643 - DNA, 1052 bp, Homo sapiens
tttattgcagcaatgctttggcttatagatacacccagttctgtaaatattctggctgaacaaagggcttcaggtcagtccaggagttctcatgttaaatagtttggttcatttacaacagaagtagcaacgggttataaatgtacctatataatatgacttcgatggggtgtgtagtagacggctcttttttgtttatggtaaatctcggtaaaatttcttctactcttccttttttttctacagttagctttgaataaccagtagcaaagtcctttctgttgctaactactacattgcattcagctgcttaacatttgcttcctgttcccaagatcaccagaggcaactgtagcatttgatgagggtgttggatttcatcaaaagatttttctacatagtttgttccagcttgggagaggtgggttggccttggcccccttgttcaaagctgtcacagttttgaagtcatttcaaaaccttcgataatcttgttccatctgcttttccaccttatcttacatttctgtaccttctccaatacttcctaccttctatgatacaaattgagggtgctctaagaaaatcatttagtaagttaagctactatttttaatacccagcccttcaaggaagttaaaatagcatcttccagaagtagcaccttcttatttatttttttagagaatagggtcttgctatgttgcccagccaggtcacaaactccagaagtagcactttctattatgtatattattttagagaataaattctttctattatctagctgcagagattttatgcacaaggtatgctttttatgtattttattttatttttgagatgggggtctcactctgtcaccctggctggagtgcagtgacacaatcttggctcactgcaacctctgcctcccagggtcaaatgatcctcctacctcagcctcccaatgttggtcatgtgccaccacgcgtgtctaattttttgtatttttggtagagacggggtttcaccacgttgcccaggctggtctcgaactcctgagctcaagt

SEQ ID NO: 15644 - DNA, 1052 bp, Homo sapiens; identical to SEQ ID NO: 15643

SEQ ID NO: 15645 - DNA, 1052 bp, Homo sapiens; identical to SEQ ID NO: 15643

SEQ ID NO: 15646 - DNA, 1052 bp, Homo sapiens; identical to SEQ ID NO: 15643

SEQ ID NO: 15647 - DNA, 1052 bp, Homo sapiens; identical to SEQ ID NO: 15643

SEQ ID NO: 15648 - DNA, 1055 bp, Homo sapiens
ccttgattacttattccattgccctaaacagttgtttagctaggtaaccctaaattgcaaacattactcttaggtgaaaattgatacccctagaggcatagaacttatatctatataccattatttgctgaaacaaaaagaatcagtcaagataagattgccaggaaaagtatctttaaacataggtaaggtttgttatgtcaactttaagccagtgtctttcccattgtaaaaatttctagctgcttgggtataggggcatgtccttacaaatggagatttcctttatagaagtaaatttattttacatagagtttcaaagtagccagctaagtgctagaaagttgtattttggagactataatcttgttagatacttagttcgtttcttgattagattactgacttcaaagtggagccctttcatgaatgggaccaggaaagtatttgcagtttccagggcctaatagatatatattttaaaaatttctttctttttttttttttaaagcaggctttcattatgttacccaggctggtcttgagctcctggacccaagtgatcctcccacttcagcctccctgggactacaggtgcaccacctgttgtcccagtgaggactgcctcagggcctgatattaagtgtctaaaaaccaggcagatttgcagggcagtgcatctggatctttaaaaatcaaggaaaccacttttacgtgaatcttgggtctccacaaagagcaaaatgccatgataccaggccacacaaacctccacagcgcacctcactacaaagacattaagccacacctttcttacctaaatgtttaaaaaataaaataaaatgagtagctgcctatagtaataaccattcaccataaacaactgctgttagtcacctccaatactgtagctcttgtcagtgacttaccagccataacatacacaaaggtctctttcacagtacaaagtaatctctggtactctcaaaagccaacaagtaatgcagtatggaagagagcagagttttagacctgagaggaacctgtccatgact

SEQ ID NO: 15649 - DNA, 1055 bp, Homo sapiens; identical to SEQ ID NO: 15648

SEQ ID NO: 15650 - DNA, 1055 bp, Homo sapiens; identical to SEQ ID NO: 15648

SEQ ID NO: 15651 - DNA, 1055 bp, Homo sapiens; identical to SEQ ID NO: 15648

SEQ ID NO: 15652 - DNA, 1055 bp, Homo sapiens; identical to SEQ ID NO: 15648

SEQ ID NO: 15653 - DNA, 1417 bp, Homo sapiens
ttattcactcagtggcttcctaaattttcataagcatttccatgtattaattatataagtcagtgaacttactgggagagtaaagcctcaagtttaggaatgaacttgggtgaaaacagtcatttgaaatttggttggttcagttaacaaagaaaggtttcaagttcatgttaatcacttaccagaactggtttcctagtatgtgatactcttcttctcagggtctaattcagcttttcttcatggtatcatcatgaagatatatagggaggagactgtctcaaaataccactagaaactaatcaccactagaaacttccacataattttgatggtcccataaggatctttctatctatggaagaaatatgaaaatcctctaagtatgcatttcttttgtaggcagcattgcccactctttgtgtttgtatagctgtgtactcaggaacctgatgtttaatcagatccgagaacatgtgtaccattccccctttgtgttctgtcagggacaagaattgtggatatttccagtgtttgggcccatattataaggcagtcgaacctgttcctgactgatctgcttactgcaagggaagtaatgaaatcttggggaaattatgacaacagagtgaagaggcaaaagaagcttgacatgtattaggttggtgcaaaagtacaattactttcttttgttcttcttttttttgagacgcgtctcactctgtcaccagggtggagtgcagtggcacgatcttgtctcactgcaacctctgcctcccaggttcaagcaattcacctgcctcagcctcctgtgtagctgggattacaggcatttgccaccatgcccgggtaatttttgtatttttagtagagacagggtttcaccacgttgaccaggctggtcttaaactcctgacctcaagtgatccacctgccttggcctcccaaagttttgggattacaggcgtgagccaccccgcccagccataagtaccactactttcaatggcagaaccgcaattacttttgcaccaacctaatagcatggaatctctcctgttgtctgctttctcaactgtaagaagggacttgggctagatgacttcagaggtctcttccatctctaagagttcattctttggctcattttatgattatttatgttattttatgtttcctaccatttggaacttcgttttgtttttatttcctgccattttagactaatagtatgagctgaagaattacaaaggcagtggctacaatctcaaatgtcttcaagggttgaacagtttaccttttatctttagtggaatcttgtttttttctacaggagtccagcttgattatagtatctaaggctctcactttttctttatcaaattgaaagtctcttaatgcgtctcaaaactcagtt

SEQ ID NO: 15654 - DNA, 1417 bp, Homo sapiens; identical to SEQ ID NO: 15653

SEQ ID NO: 15655 - DNA, 1417 bp, Homo sapiens; identical to SEQ ID NO: 15653

SEQ ID NO: 15656 - DNA, 1417 bp, Homo sapiens; identical to SEQ ID NO: 15653

SEQ ID NO: 15657 - DNA, 1417 bp, Homo sapiens; identical to SEQ ID NO: 15653

SEQ ID NO: 15658 - DNA, 1034 bp, Homo sapiens
actacaggcacatgccaccacacctgactaatttttgtatttttctgtagagacagggttttgccatgttgcccaggctggtttcaaacttctgagctcaagcaattcactcacctcggcttcttgaagtgctggcattacaggcatgagcccctgcatcctgcctttttttttcctttgaataatcttcacagatgataaaaatataaattctatataaattttatgatttttttatttctgtgaagaatcttattggtattttgataggcattgcactgagtctggagtttcctttgggtagtatgcacattttaactattttgattctttcaattcataaacatggaatattttctattttttggtgtcctcatcaatttatttcatcagtgctttatagttttcattatagacatctttcatttctttggttaattcctaggtagttaaatttttgttgctactgcaaatggaattactttgtaaatttctttttcagattgttgactgttggcatatagaaatgctacagatttttggatgttgattttgtattctgcaattttactgaatttgtttatcagttccaacagttttattgtggagtctttaggtttttccaaatataaaattatatcatctgtaaacaaggatcatttgacttcttccttttcaatttggatgccctttctttccttctcttgtctggttgctctagctaggacttccagtactatgttgaataacaatggtgaaagtggcatccttgtcatgttctagaccttagaggaaaggctttctgacttttcccattcagtatatactagctgtgagtctgtcatatatggcttttattatgttgaggtatgttccttctatacctagttttttgagtctttattatgaagggatgttaaattttatcaaatgcttttttagcatcaattgaaatgatcatatggttttcatccttcattctgctgatctgatgtatcacattgattgttttgcatgtattggactgtccttgc

SEQ ID NO: 15659 - DNA, 1036 bp, Homo sapiens
ccctggtgaaaatatgacccatttggggaccaggacctttgggccacagagtccggagttgcagtaggcaagaagcacaaaccaccccaatgagtcactgtgagtgacagtaagtgggaccactcctgtttccaggccttggttcccagacccatgtaaagatctgtagttcagtgcacacaattcattctgtgaaatggtagtatattgcctctgaacaagcgcttcagctttagctcagttgcaccatcagtagatatttccaatgctttattaggctggcagcccctagattatgttgtctgatatacagccagtatataccatgttctttggtccccttccaaaacttcttcactgtaaagtggtaccttggtctgatatgatattatacagaaacaccagaccagtgggtcaaatactccaaatgtctttgaatattggtgctcactgaggctcactgccttacctcagtgagataaggcaaattcatatcaagaatatgtgtttattactgtacgaatgaaccactggcccttccaggatgataatgaagaattgtagtcaatttccctctatgtgttcttctagaaattatgccagattaggggatcagcttggtctttattgttagttggctgatggcatgcctctgctgcagaatcccagaggcatacactgtgattctttctctggggcttaccacaaactccacccaacaaccttttctgtcacagacactttcaacatcatagggtctactagggagtatgaccccagtggaagtctgtttgcatcacaacctggacctggtgcagagctctttccttctatggtttccactcaaagatgacatcattatatgttaccaaatataaggaccagagttgtggtcctaggtatcaaatttgctgcctccaggaaccaaagcaatccccaggcattgtgtttccttcttcatgataggagatgcagaaaggaataatttggccttactttggaagggataacccggcatattcctggctcttagaaa

SEQ ID NO: 15660 - DNA, 1050 bp, Homo sapiens
cgccactctagtaaacccaacttctttcttctgttctcctggccctaggagtgttaggtgccttctgtagctactttgttgttggttgagttctccagaagcagatactgaattggagtttcaagtacaagattttgttagggaccaacagctgtgaaaaaaggcaaggaagttggttgtgcagatgagaaatacaagtacaggcgtaccttggacataatataggttcagttccagaccactgcgataacaggaatatcacaataaaatgagtcacacaaaatttttggttcccagtacataaaaaagttatatttacactacactgtaatctgttaagtatgtagcattatgtccaaaaatgcaataccttaattaaaaatcttttattgctgagaaatagtaacaatcctctgagcctttaatgagccatatgtttttgctggtggaggttcttgcctcattgttgacagatgctgactcttcagggtggtggttgctgaagattggggtgactggaaatttcttaaaatacgacaacaattaagtttgctgcatcgattgactcttcctttcacaaatatttatctagcatgtgatgctgtttgataggattttacccacagtagaacttctttcaaaatttgagtcagtcatctcaaattctaccactgctttatcaactaagtttatgtaatatattaagtcctttgttgttatttcaacattgttgacagcatcttcatcaggaatcaattccatttcaaaaaaccattttctttgctcatctataagaagcaactcctcaaccattcaagatttatcatgacattatggcaattcagtcatatcctcaggctccacttttaagtctaattctcttgctatttccacaacatctacagttctttccaccactgaagtcatctgtgaaggttagactcaatgtcttccaaactccttttaatgttaatattttgacctcctcacataaatcaggaatgttcttaatgacatctagaatggtgaatcctttccagaaaggtttca

SEQ ID NO: 15661 - DNA, 1032 bp, Homo sapiens
tttctcttgtctgattgctctagctaggacttccaatacaatgttgaataacagtggtgacagtgggcatccttgtcgtgttccagaccttcaaggaaaggctttcagtttttccccattcatgatgctagctgtgggtctgtcatatatggtggctttttttatgttgaggtatgttccttttataccagttttttttttttatcatgaagggatgttgaatttcatgaaatgccttttcagcatcagttgaaatgatcacatggtttttgcccttcattctgttgatatgatgtaccacgctgattgatttgcatatgttgaaccatccttacatcccagtgataaatcctgcttggtcatgatgaatgatcattttaatatgcttttgaatttggtttgctagtttttttttttttttttttttttaggatttttgcattaatattgattagcgttattggcctgtggttctctttttcttgatgtgtctttggttttggtatctgggtaatactggccttgtagaatgagtttagaagtatccctttctctactttttggaactatttgagcaggattggtattagctcttttttttttttttcaattctgctactagtttttttttttttttttttttttattatactctaagttttagggtacatgtgcacattgtgcaggttagttacatatgtatacatgtgccatgctggtgcgctgcacccactaatgtgtcatctagcattaggtatatctcccaatgctatccctcccccctcccccgaccccaccacagtccccagagtgtgatattccccttcctgtgtccatgtgatctcattgttcaattcccacctatgagtgagaatatgcggtgtttggttttttgttcttgcgatagtttactgagaatgatggtttccaatttcatccatgtccctacaaaggatatgaactcatcattttttatggctgcatagtattccatggtgtgtatgtgccacattttcttaatccagtctatca

SEQ ID NO: 15662 - DNA, 1047 bp, Homo sapiens
aaaggagcagcaagaataaagaccctgagatgggtgtatgctttggtctgttagtggatcagcaaggagaccagctgaaatgaacaaagggaagaataaataggacatgaattaggtaaaaaaggagagagcgatagtgatggcaggaggtatattgggtacaaccttgtaaagcattgtacagacttttactatgaataagatgggaagccactggagcattctgagcaaagtaatgatatgatatgactcatattaaaacagaacttccctgatatatgggaattgagtgtcgagtataagaatggatgcaggagacatgttaggaggctaaggcaataatcaaggtgggaaacaatggtgaatttgaccagggtgataatgatggggatggtgagaagtgattagattttgaaggttaaaacaacaggatttgctgacagatcggttgtgtggtatgatgaaaaaaaaaaggaattaaggatgactgtaagcttttttttttttctaggcaacttgaaggatagagttgggattaactgagatggggaaggctgtgtgttaagcaggtttagggaggaggtggtgggaggagggagctaaagaattcactttggacatatttattttcagatgccaattagacatttcaagtgatgatgccatgtaggcagtttttaggttgaatttaggttttacagaagtcccaggcaggagatatacattttggcatcatagaatatatatggtctttaataccatgagatggatgagatcatcaatagaatgagtacaatagaatgagtacagagagagttaaaaagatgtccaaggactgagcactggaactctaacaacacttagtgttagggaagatagggaagatataaaataatagcaaatgaatatgagaagtagcagctactgaagtgatcccatggaaaccaaatgaagaaagcaattcaaagaggaagaagtcatcaactctgtcaaatgcttagttttttgtttgttgtttgtttatttggcaaatgtttttccctttgc

SEQ ID NO: 15663 - DNA, 1070 bp, Homo sapiens
agacattttccccattgtcttggctattaacagtcagctcctctttacttatgcaaatttctgcagcaggcttgaatttctccccaggaaatgtttttcttttctactgtatggtcagactacaaattttctaaacttttatggtctgcttctcttttaaatacaagttccaatttcacaccatctctttcttcatgaatatgtgcatacacttttagaaacagccaggtcaaatcttgaatgcattgctgcttagaaatttattccaccagataccccaaatcatctctctcaagtccaaagttacatagatttctagggcaggggcaaaatgccaccagtgtctttgctaaagcatagcaagagtgacctttactccagttcccaataaattcctcatctccatctgagaccacctcagcctggacttcatagttcatatcactataggcattttggtaaaagccattcaataagtttctaggaagttccaaactttcccatatcttcctgtcttcttctgagccctccaaactgttccaacctctgaatgttacctagttccaaagtcacttccacattcttaggtatctttatagcagagccccactcctggtaccagttttctgtattagtccattctcacactgctataaagaacttcctgaggctgggtaatttataaagaaaggaggtttaattgactcacagttctgaaggcttaacaagaagcatgactgggaggcctcaggaaacttacaatcatggtggaaggtgaaggggaagcaagcactttctttacatggtggcaagagagagagagtgaagggggaagtgctacacacactcttaaaccatcagatctcatgagaatcattatcatgagaacagcaagagggaaatccaccccatgatccaatcatctcccaccaggcctttcctccaattcaacatgagatttgggtggggacacaaatctaaaccatatgttttctgatttttgaaaaaattttataatttttttctatgagtctgtcacatttcttttcaggtttgctcataggtgtttt

SEQ ID NO: 15664 - DNA, 1880 bp, Homo sapiens
gctgtcagtggggtagtgaagtcccccactattattgtttcactgtgtatctctgaagtctactagtatttgttttataaatatgggtactttgacattgggtgcaggtatagttaggatagttaagtcttcttgattgaattgaatgttttatcattaaataatgccatctttttcattttctttttttagctttgttcatttaaagtctgttttatgtgctacaagaatagcaactcatcctcttttttgtttgtttgtttttcatttgcatgatagatgtttttccatttctttacttttagtgtgggaatgccgttccctgtgaggtagatctattgaaggcagcagaatactgttttttaaatccaatttgccactctgtgtcttttgagtagggtatttagaccatttacatgtaagactaatatcgatatgtgaggtttcatttctgtcatagctttcttagctagttgttttgtagtctcaattgtgtaattgttttgtagcatctgagaactttgtacttatgtgttgttttatggtagcagtatcattctttcgtttccatctttagaacttctgtgaatatttcttgtagggcttatctggtggagacaaattcccttaacagttgcttctctaataaaggctttatttctcccttatttatgaagctgtttggcaggatatgaactttttggctgccatttttttttctttaagaaggcaaaaataggcttcagtctcttctggcttgtaaggtttctgctgagaagtctgctgttagtctgatgggacttcctttataggtaatttgggccttttctctagctacctttaaggtttttttttgtattaaccttgggaacggttgtgttgtatagtatctctcaggtgtactctcagtttcttatatctggttcttgacctctctagcaagattagggaaattttcctgaattatttcctcaaatatgttttccaatttgcttgctttttctttgtatttccaaaggctttgttcttttttttgctttatctgggttaatttgaaggaccagccttcaagttctgaaattctttcttctgctttgtgtaatctgttattaaaacttccagctgtattttgaaattcctttagcaaaattttcaatttcagaagttctatttgtttttttcttaatacagctatcttgtctttcataccctgaattatttttctagtgtctttgtattggatttcaactttctcttggatcttactgagtttccttgatatccttattttgaatattttatcatttcaaatttttcagtttggttagtatccattactagagagttggtgcaatcctttggaggtgtcaggacatcctggctttttatactgccagagttcttgctgattccttctcgtctgaggagctgctacttctcatttttgagtttgctatcatttgcatgggatcttttaatttttcaatcctttttccctttagggtatgactgtggtgtatgttgtgtatgatctttttgtttcatttattggtactttcagtgggccaaggctgtatatgggtacgttggttgtggatagcctctgtgtagtgactttcttagatgctgattgttgtagcgatgtattgaacatatgagcggacacactatttcctgtgggattgagagtgcaggtgcataggtcttaggaaacttatctcagactagcactaagcccttctggtagcaggttttttgtttggtggtgcagttcaggctgtagtccagtagatggagatgacacttaagagtaggagacagctcatgcccaggctgatgtcaagtggtagcacctgtgttgacaggaggcatgagagggg

SEQ ID NO: 15665 - DNA, 1112 bp, Homo sapiens
atcttgttttgtttattcatctttcagtggacatttgagttgtttccatcttttggctattgtgaataatgcttctatgaacactgatgtacaaatatctgtttgagtccctgcatccaattcttttgtgtgtgtattcagaagtggtaattctatttttaactttttgaggaaccaccatgctgttttcaatggcagctgtaccattttacatttcaaccagcaatccctgagggctccaatttctccacatcctcaccaatccttgtgattttctgttaatagctatcctaataggtgcaagctgggatcactctggttttgatttgcaatccctaatgactagtgatattaagattttcatgtgcttattggctattagtttagctccttttgaaacatctattcaagtgctctgaacatttttttaaatttaattttttagactggatgtgtgtgtgtgttttattattgtttatttttgttgactttgtcaaatatcgattgtaggtgtgtggctttatttcaggggcctctattatgttccattggtctatgtgtctgtttttgtaccagtactatgctgttttggttactgtagtcttgtaatatagtttcaggttggataatgtgatgcttctgactttattcttttgtttaggattgccttggccaatccatgagtgtggaatgcatttccatttatttgtgtcatctatgatttctttcagcgatgttttgtggttctcattatagagatcttttgcctccttagttggatgatgtattcttaggtattttgttttgtgtctattataaatggaattgcattcttggtttggtttgcagcttgaacattattggtgtatagaaatcctacagatttttatatgctgattttgtatcctgagactttgcttaaattatttattatgtctaggagtctttggcagaatccttagagttttctaggtatagaatcatattgtcactgaagagagatattttgacttccttttttccctatgtgtatgccttttaattctttgtcttgcctaattgctctggctaggactttttgagcagacacttccaaaaagacatacaagcag

SEQ ID NO: 15666 - DNA, 2608 bp, Homo sapiens
ttcatcatgacttttttcttcatcataactgatatttttcagatgcactttgaagacataaaggatgttaaagtagtaactaagcatatttctttttgttcagttacataatcctcagtattaaaataaacagttgctgacattttggaagatgaagaaaaggaaaaacctcactcaccaataccattaccctataaatactgtaacagtgttgtgaattttaatcttattctgtgtgtagatacttcttttttcaataaagaaaaggaattttattttttttaaagttatggaggctgagaagtccagcattgattggctccatctggtgagggccttcttgctggtaggaagtctgcaaagtccctaggcagcacagggtatctcatggcaagggggctgagtgtgcttgctgcatgtagatgcttttaaaactgtactttaatcattcctttcgtacaattttactttattatatctgttgtaagcttttccccatgtttatgtagtttttatagactgttttagtgtccgaatttctgtaaatgattgtatctcagttttctttctgtcttatatttgggatttttcccagtttacattattttatataagactgctgtgattatatctttgtataatgccttttcagtgtttggtatttatttccttaggatagagttccagaagtggaatcactagagtctctgcatttttattgctcttagtccatattgctaagttgttcctcaaaatgttggactagtgatcactcaaacagcgaagtttgaaagtatgtatcaggttttccagaattgctaccactgaattttgtcatttatgtttttagtgttaagtagcaaaagtggtattttagtatttaaagtagttgaagaatttctcatctttttctgcttttatgaaatgtctaattttatgtattgtgtgagatttttgtctttcaacttcttattttgacataatttccggcaaacagaaaagttgtaagaatagtacaaagaattcctatatataccttttaccctacttctctatctgttaccatttttctgtattttagtctttattttctttctctctttcttctgtctctgactcttgctctcctgtcgctgtttctctctttctctctctctctttcgatgttatttgtgtttcaccagtggtgccaataatgtcatttacaacagaagaaaatcctgagttatgggccacatttagttgtcctgtcttttcagtctcctgtaacctggaatagttctttaatcttgcttgtttttcataaccttgatatttgtagttgaagccatgcattttgtggaatgtctctcaatttgggtctgtttgatatattctcatgatgaaattcacctcatgcatttttgtgaggaatgccatagaaaagatgcttacggaggcacatgctgtcagtttgctccgtttctggtgatgttaacattaatcacttggttaagttagtgtctataaggttactccactgtaaagttatttttccttttataagtatcttggaatattttaaggctctgagtatcctgttatttctcaaacttttacccactggctagcctccattgataagtcttgcctgaatcatttattactctgatggttgccaaatggtgattttctgatttcattgttttatgttattagttagcttcctgctataaacagctttcatttctccttcctttctaaaaatatctttgtggactcctggattcttattttcttcagtgtgtatatttctttactatcattcatattgatgcccaaattgtcctaaatcaggccaatgggagctccttcaagctgatcctgtgtccttttgatatgacttaatcatccattgagtgatttctttgctgttgagcacaatcagatattccaggctcatttcaacgctggagccaggcacttctatttcttttagtggagaatagcatttggaaatcaagatctgcgtgctgggtatgttcattgctactggggtgtcattgcttctaggccttttcaactgacagggtcagtaatggagtaaaactcattgtaatcgtgtaacttatgtgggttaagaaattgaactttgctagtaccccagaagctcctttatgtcccctcctgattttaacgcttaatcaccttcatcctcagttttatggtaatcacttgtctttgcagttttagtctgtaaccatgcatccctaaataaatgtttagattgcctattttaaaaatttaatataattggttcaatgtgtgcatttcatgtatgacttcttttatgtctgtgatgttcatcagagttgtttcatttgtagttattttaatttctgtgtagtattatgtttcatgaatatattacaactttaggattcattctaatggtgatagacatttgtgttgttcatagtttttggctattaaaattgcttttataaatattctatttttatgaacctgtaagatgcaatttcaggaatattctaatcgtgtgaatattatattgctttttggtgtatattatgggctgaattgtgtcatcttcttcaaacaaggtata

SEQ ID NO: 15667 - DNA, 1050 bp, Homo sapiens
cattgtagttttttactcttaatctttgagagctgctgaactgtcagcaggtggtgccattgtggtagtgattgtggtagtgaaaagatgaattgggagggaaaaagtaggtattgaggaggtgtgaggaagccactgtgattcgaggtttcttcatcaaatctgtatttttacacaatgatgttttctgttacattattgaaaacaggtattgaaccatcatggtactgggttagaataattatatatcttgtttttacatactgtcttacttaaatgctatgtagttttgtctagtatcattaatttccttgagttttcaggttgttaggtttgtaactgggttcttgtatacatctgcctggggaaacagctagatctagaacttgagataagcagttaaaaatgaatttgaaaatgtgagccattcatattaaccatttatctcattccccccacccatatctccctcccaaaaaatctacttttgatatctagtggatcaaacaaagaaagaggcagaacctataccagaaactgtaaaacctgaggagaaggagaccacaaagaatgtacaacagacagtgagtgctaaaggcccccctgaaaaacggatgagacttcagtgagtactggacaaaagagaagcctggaagactcctcatgctagttatcatacctcagtactgtggctcttgagctttgaagtactttattgtaaccttcttatttgtatggaatgcgcttattttttgaaaggatattaggccggatgtggtggctcacgcctgtaatcccagcactttgggaggccatggcgggtggatcacttgaggtcagaagttcaagaccagcctgaccaatatggtgaaaccccgtctctactaaaaatacaaaaattagccgggcgtggtggcgggcgcccatagtcccagctactcgggaggctgagacaggagacttgcttgaacccgggaggtggaggttgccctgagctgattatcatgctgttgcactccagcttgggcgacagagcgagactttgtctca

SEQ ID NO: 15668 - DNA, 1050 bp, Homo sapiens
ttaataattgaatatggtagcttgagtttgtgaaacctgcatttccatttgttgctagtaggttttgtgagaaaagaccatttaatacacttaaaataacaaaggtaatttcaagccaataatttggattgtgtgatttaggtaattatgaaaaactttagctttaaaactcttacggttgtgcgtgcttatataccaaaactgaagtatctttaaaagacatatgtatcagcttaaatgttagaatttaacttcagttaagagggagagttaacaacacttctgtatatgtgctgtgtttaccttattttgggaattatctttggtatagcagccattaaaaataatgaagtttgggtatattcatggtggataaagatttgtaaaatatgagacaccaaactaagtaggcaatgttttgatttggacttcgtattttaatagataaagtcagacctaaagccaaaaggaaagaagaaccaagctctatttttcagagacaacgtgtggatgctttacttttagacctcagacaaaaatttccacccaaatttgtgcaggtaatgagaatatgtgtggttaatcttgatttgacacttctttatggcatatatattaatttttaattgagaactgtttcagatgtgacctaaaagtacaattttcctcattagttaaaaaatgatctctgtatcaaaggaaaggtttcgaaagacttaatggaagaaatgggtaaatggaatggaattaacactgttttgtgtttcttactgaaacttcacaaactatgaggactgcatgtagataatattctcattcaaaaggttgctgaaagtgtcacaggtggtaacaaaactagaatatgaaactcatgctctttttactctacatgccaccttccagcctgatgtagtagatatctgaacaacctaaatgatagaatagttaacacttgtgtaacaaaaagaacagaacatctgaggtagagtgtttggcataataaacagaggagacaggagtgatgaatagagataccctgtgttggggttt

SEQ ID NO: 15669 - DNA, 1049 bp, Homo sapiens
aaatttagagtttattttccttttacaagcttactgcagtgcatggtattcagtcagcttttgatgaagctatgtcatactgtcgatatcatccttccaaagggtattggtggcacttcaaagatcatgaagagcaaggtaagtagaacatccataccctcctaaaacactttttgatcctctgagaatgaagctgttttctttaggaaaatggctgttgatcttttctaagtgtgtttcactttttcatgggatgatggctttgttgcagctgagattcatgtaactagatgtggtaataatagctttcacataggaacagatgcaagttcactctgttagttaactggtagtctttgttaaggtgattcaaggttttaaaatatttggggccaggtgtggtggctcactcctgtaatcccagcactttggaatgccaaggcaggtggatcacctgagcctaggagttcaagatcagcttgggcaacatagtgaaacctggtctctacaaaaaaaaaaaaaaaaaaaaaaaaaaaaaaggaacataggagagacagtggtgtggaatgagcagagatgatattccttacttacctgactgttgagttatcttggtatctggaactctttattcctccagtcttcaaagcagaggagatgagagagattgctttttagagccctatccccagatggccagtctgttttctgatctttgcatctcatcacctcttgtggctccaggtcctccaagtttccatgtaatctgctactgtcttcatcatattttactgttcgactacctccagaaatgtgcctgtaacagcatacttgtattctccatttccttttctgagaaatagcaagtcagaataaattactgagggaaacagcatttgtatagaattcagacctgtatcttcttaatagtaggtataagcaggaacatttgatgaaggaaagtttgcctttgttgactaaaattggcccaatggctcttttcccctacgataaccaagtgttcggagtaacacttatctggaatcctt

SEQ ID NO: 15670 - DNA, 1196 bp, Homo sapiens
gctccctgtggggtcagggggaaagaccttgatcaaaataaagtggcacaaaatgtaaagtcaagactgtggtgagtaccatgagcatggctgataacgggacatgcctcgagaggagtgctggagaattctctgaggaagttttgtttccgacgtgatctgagagaggcaagagtggagacaaagtggaaagggaaggtggggcaaggaggttccaggcagtgaggccagcaggcccagtgccccgtacagtgtggcctcctgggaggcaaattgcgtgcttggattctcttgcctccatcctttcctgtggttggtggagaaggattcgtaaggggaatggatctctttgtgggccacgtgccttcatttcccagcggttgctctagagttctgcctgcctcttcttcctatttcatcaccgtggaggttctctgcagcttactcagtggggcagcaagtagctcaggacaccaggcaacttttaagctctcataatgctgtgctggagttggagcagaagcttgtgctgtatgaagggccttggttggggtttctggaccatgagcttttagttgcagaaaacagccttggtgaggggttgagttcagggcaagaaaggctttgaaaggcgtgtggggtctgatttccagatgagtatttagtctcttcctctttgatctgtttcctctgatttgagccactattgccttgaaagtaagtaatacattttattgtatcttcccttccccacatccctcccaaccaaacctggtaagagctaggtattgaccacagtttgcgggtggtctgtggcaccgtcattgttcaggttcaagatttgtccttcaggatctctgaggagatgagagaagagcctgcctatttctcctttcctcctcatctcttggaaaaatttccattccttaacctggttcttcaccttgtttcgatgatgtagctcagggtcacttatggatggcacacaaagcagtgatgtcagtggtctggttgagtcaggagaaaaatgtagcttctatcccaggtccagggagcccaggtctttactgtggagtccccttcaatacccctgacagcctcttgtagaaccacactttgttcctcttataatgtaaagattaacatagggccagggaaccacgcaaaatggttccatgcaaaatgtggatacattc

SEQ ID NO: 15671 - DNA, 1075 bp, Homo sapiens
gccctccctgacatgctgaataatcaccagtgcactctcaatgtaatcttcctagcagccttgtcagaagtgattgtcccacttagcagatgagtagaccagcactcggaagggttaagtgactcaggccaaagctgtgcagaagtgatagggctagactagactccgggtcttccttctgatgttcgcattagtgcatgtgccattgcatgttactcccaataatgttcagtgacaattgtcttgcttatgcctggctgaaagtggcagagcattggactaaagaggttatttgacagcatggaattgaaacccacaacagaagaatatccatcctcctcctgaggaaaggaaaaacaattggatgtgagccttcacattgacctctcttcccaccctacccacctctgcatcatctatacagcacctgggccttgtacagcgtggtctcacccaacccttgcaaactccctcttgttcatctgccttcagattgtaatatttatgtagatctggtacagcccgcattctggggcccactgttcattgtgcattcagtgcaatggggcaatgttctgttttatgcacccacctatgttacctacatagtggtttgaaatttcatggtgtgctctgtgataaacaccccaggtctgcctctgagggccatattagggctattgcaggcagtcctctgagttgattttgcccagcagaggttgagaaggttggctctaaaggaagtctctgtctgctaaatggcccagggagaaagaccttgcctccctgcttctcctgccttaatttcaggaaactctctgcagcttaccccgcctccccccagcaccatccttctggtctctgctgtgctaatcacagctcattctggctgcaagcctcatttggggaacgaatgctccaggactcccaaaatgggaggagggaaattaaggacagttggccaaatgagtcagcccaccaccaccaatgagtcatggggaccacccgcctctccaagcctgggaagctttgtggggaagggccctctgtcttgttcagggctcactgggaaaga

SEQ ID NO: 15672 - DNA, 1033 bp, Homo sapiens
attatttctacaaatattttttcttccctttcttcaattacacatatattaggctgtttgaagttgccccacagctcatttatgccattatttttttttcttttctgttttttcctgtgggtttcattttggaatagtttctattgctgtgttttcaagtttatctgtcttttcttctgcaatatctaatctgacattaactccctctgatatgattttcatcttgcacattatagttttcatttctagaagttaaatttgagtcttaaaaatacatatgtatctcccaaatttttactaaacttgaacacagagcatacaaataatgttttaatgttcttgctactaattctaatatcagtttcagttctgggttggtttcaattgattgatttttctccttattataagtcatattttccagcttctttacatgccttgtaattttgggttgggtgcctcacattgtgaattttaccttgctgaatgctgtagatatattttattcctataaatgttcttgaacattgttttgggacatatttaagttatttgaaaacagtttgatgttttcttgtcttgcttttaagatttgttaggtggagccagagcagtacttagtctagggctaagtattccctattagtgaggcaagatctttctactgtactctacccagtaccccgggaatcatacagttttccatattggctggtggaaacagactatttccgcccccttgtgcacaccgagcgctgttacctctaatctttttgggtagttcttttcccagtcctatctagtttcctcacaggcataaatggatcaacgctaagctgaatacttgaaagggaccctctggatctccacattctctgtgcagctctcttttgtttacccttcagttccttgggttctagtcactgtggtctcctcagactcttggcattttctcttcaactcaaacgtggggaatctgcaggtctccacctgtattcctcctccttgtgttccagtctggagactctcttaa

SEQ ID NO: 15673 - DNA, 1001 bp, Homo sapiens
cgtctcgaactcctgacctcagatgatccacccgcctcagcttcccaaagtgctgggattataggcatgagccaccgtgcccagctgcccagacccttttcatcatcccggagagaaactttgtatgcattaaacaatacttttccatcccctgcttcctaccatccctgggaaccaccattctgcattcttagcaccccatatcaggggaaacatacaatatttgttcttctgtgtctggcttatttcacttagcataatgtcttcaatgtttgttcatccatgttgtagcatagtcagaacttgattcctttctatggccattgtatggatagcccactttttgtttacctgtttaactgccgatgggcatttgggttgtttcaccttttggctgtttttgagtccccattttcatttcttttgggttttcactatgcctaggtctccttcatttttggactgtaaaatctagggactaagctaggctcatgcctgtaatcttagcactttgggaggctgaggcaggaggatcccttgagctcaggcattcaagaccagcctggacatatcatgagaccctgtcgctacaaaaaataaaaaaaaaagccgggtgtggtggtgtacacctgtggtcctagctactcgggaggctaaggcaggaagatggcttgagcccgggaggttgaggctgcagtgagctgtgatcacgctactgtactccatgtactccagcctgggtgacagagcaagaccttatctcaaaaaacaaacaaacaaacaaacaaacaaacaaacaaacaaacccaaaaaattagcggctacatttctagataatataggcattctccaccttataaactaaacaaacaaaaaaacccaaacctaatagtattacagaattcaacctctctgcctctccctctattggtagtccattgcgttctgggataaacacactgggaactaggaacccagagactcaattctcccatccccag

SEQ ID NO: 15674 - DNA, 1050 bp, Homo sapiens
agatacccaacatcattagtccttaggtagatgcaaatcaaaaccacagtgagataccactttatttatttaattttatttacttattccctcctaccccccttttggctgaagtgcagtggcgcgatctccgctcccggcaacctccatctccccggctcaagccgtcctcctgcctcaacctcggagtagccggaattacaggcacgagccacaacaccaggctaatttaaaaaatatttttggccttccgccacggccgccatggagagcagcagccatggctctgcgctaccttatggccgtgggcctcaacaagggccacaaggtgaccaagaacgtgagcaagcccaggcacagccgccgccgcgggcgtctgagcaaacgcaccaagtttgtagcgggacatgatccgggaggtgtgtggcttcgcttcgtacgagctgcgcgccatggagtcactgaaggtcttcaaggagaaatgggccctcaagttcatcaagaaaagggtggggacgcacatccgtgccaagaggaagcgggaggagctgagcaaggtactggctgccatgaggaaagccgctgccaagaaagactgagccccctcccctgccctcttcctgaaataaagaacagcttgacggaaaaataaaataaaaataaaaaatatttttgtagagacggggtctcgctttgttgccgcccaggctggtctcgaatttctggcctccagcgatcctcctgccttggcgcagcgttgggatgacaggcgtgagccaccacgcgcggcagcaaatctgagatttaacacagagagccagtatgtgcccagcgtatgtgtatgtagtgcacagaatatgtggaccaccctctataaaggttcatgcatgaggaggtcggctctctctcacagtctagcagttttccacacaaaagcggcacacatttttgcaccggtctccaaaatggtgtctggtttgggagcccgcagcttccggaattacaggctctttcctgcttccagggcaccattccaggcctggcctcaat

SEQ ID NO: 15675 - DNA, 1085 bp, Homo sapiens
tacctaaagtcaggaagaaatttaacaagaagataattaaaaaaaaaaaattcaaatgccactgaaaggggagaaagtctggcaggtaaaaagcagttttgataggcaacttgcctggtaaatttcaagtggtttaatatagctgcattttagttatttgaccttattacattgcatacttttttttaagttcaagagaagcaatagtcttcacttttagtacattactgttggaaacagtgatcattttaattattttttggaacttgtgtagttttcattagtgtttggatgaaatttgttatacttgaaagctatgtatttaattgttttatacaatagttggaaagtgatattgcccccttgtggctacttacaccactggcattcattagtttagttttttccacactgaatagtagtaattagtagtcattggtggcttgtcaccattgggaccatcttcccaccttgtatttcactataagcgggaactaataccatgttgggatcagtattggtgataacaccatgccatgatctgcacaaatttttatgaaacagaagctgaaatctgaagcccttaacctttgagcaagaagctctgtcagattgccttgctatcccacctctcaactcatgtctatcttgattctgatagtgttcctacctttttttttttttttttttttttgagacagtgccttatactgtcacccaggctggagtacagtggcacagacatagttcactgcagcctcagcctcctaggctgagataattttttttttttttttttttttagagatgggttctcactatgttgcccaagctggtttcgaacccctgggctcaagcagtccttccacctcggcgtcccaaagtgcagaagacagaatttgaggcaacagtagccactagaaggtaaaaagagaggctgggcgtggtggctcacacctgtaatcccagcactttgggaggccaaggcgggtggatcacttgagtccagtagtttgagaccatcctggccaacatgctgaaaccctgtctctcctaaaaatacaaaaaattcgctgggcatggtg

SEQ ID NO: 15676 - DNA, 1035 bp, Homo sapiens
tgagcttgttactatttctgtgccattttccattttatgttccttcaccaatttttttcgtgttaagattacctgtgcatttctcttctggtacaagtttcctgatttagtaatttgtaatagatccactgtatgttgctattttcttcagtgtcagaacctgcttagttgctatattggtttatatctacccataataaaaggttttaaggaagataataattttaaaatactaagctggatatttatagtgtagagtaattacttgagaaagttatactttcatttttcacttttggttagcttgatccttctgctcagatttcaccaatttaaattccaagttactaaagttctgtccatgttagatcggttttctttgaaaaaaaaaggatttttgtctttattgtgaaactttttcatgatacatttgtcagtgtgaattctacctataactgaaattattattaaagtagaaagtgttagagcagcgatgataaaataattctgaatgtctgaacatctgtgttgccacttccacatttttattagttcctgaagcatgttttttttttgttttgttttgttttgtttttgagatggagtctcgctctgtcacccagactggagtgcagtagtgtgatcttgcttggctcactgcaacctctgcctcctgggtccaagcaattctcctgccacagcctccagagcagctgggactacaggcgcatgtcaccacgcccggctgatttttgtgtttttagtagagacggggtttcaccatgttggccaggatggtctcaaactcctgacctcaggtgatccactggccctggcctcccaaagtgctgggattacaggcatgagccaccatgcctggccagcatgttgtctttttaaagaggtgtttgtgccactaagatgtatgtaaattcttttttttctttgtttctttcttttttgagatggagtctcactctgttgcccaggctggagtgcaatggtgcgatctcagctcactgcaacctccacctc

SEQ ID NO: 15677 - DNA, 1079 bp, Homo sapiens
cttttcttttctgatttaaaaagcaatgaagctgggtttcctctgaaaaaagtctcgtttgtttattacaaggcacactgtatcatggttccctggtttatatatcaccattactctgtaatgcctgcctctgtgtagatgtgacggaaagactgaccagtgattctttacacattgggaacctttgaagacctctttggtttgtagctgaaggaactttgcacagtagaattgcaaatcactgttgttctgagagtgacttgctctgccctaattggtctgtttgctgctgttgcttcttaatatttcaaagctatgcaaaatgatgtttccatgtgtctttatagcatttcttcacttcagcttacattagaacatctgcttaacccttttgctcttacctagcgtatgcccgcagagctgtcttgcctccaaatgtcatttttatttttgttaattaatggcatgctcttatctcactggtgatcttggggatcatagaattttagagttggatggcaccttaaaataggtaggatataaatacatttgtcagaaaaaaaaaagaaaatgaattcggggacacagttccaacaggtctaatatttcagtataatgaattatctttccaagaagattcaattaattatagagattgtgattgtatcagatgtcgcaaactatggcccactactgtatttgtttttgtaaataacatgttattggaacacagtcatgcccatttgtgtacatattgttatggctgcttttgtgcaatgatagagttgagtagttgcaatagagatcatatgtcctgaaaagcctaaaatattttgttgtctggtccttcacaaaaaacggttgctaatccctaatttcaacaatttaaaaactcatttcggccaggcgcggtagctcacacctgtaatcccagcattttgggaggctgaggtgggcggatcacctgaggtcagcagttcaagaccagcctggccaacatggtgaaaccccttctctattaaaaatacaaaaattagccatagctgggcgtggtggcaggcacctgtaatcccagccat

SEQ ID NO: 15678 - DNA, 1052 bp, Homo sapiens
atgtaaagttacattatctgaactctttttcactggctgtgtatttcttgagtgtaggaatttcaatacaggttgtgtgtctcttatccaacatgcttgacacccagaagtgtttcagatttcaaattttttcagatttggaatgttcaacctgtattcaattttcacctaatgcttactgtatagtagctacttggtaaacatagcaatagccctaacttttccttctttctacagtaccttggccatgtagaagttgatgaatcaagaggaatgcacatctgtgaagatgctgtaaaaagattgaaagctgtatgtatttgatggttgccagtgttgatctatatgctatcaatattttcttaaaagattttgctcagtacattttagtgacccagtaaaaactgtgtttctgttaaaaagatgtgggcttgctaataaggagcatctcagccaagcgcggtggctcactcctgtaatcctagcactttgggaggctgaggcaggaggattacatgaggccaggagtttgagaccagcctgggcaacatttcaagaccctgtctctattaatttcaaaaattttttcttaaataataaaataataattaaaaaatttaaaagcatctcatgttgcccatccagaggtataaattattagatgagccgtttaaatttaggccagatattatcctaaaggtacttttgatttataacccatatgaaacaaatgttgtgaaatctgatagaagaatagtattctaagactaggattaaactgttacagttaacatcttaccctaactgtgataactgggctataaattaggggttttaaatatactgtaaaaaatagcttcctggggaaaactagaggatagaggtctgtgttgatgcctggtgaggtttcctttttggagacttcttactattaccttgactcctactccccaattttcttctctatacacctctaacataaacagtctatttctactgccttttacataaactttagcacacttgaagtagagagccctttcccaggataa

SEQ ID NO: 15679 - DNA, 1030 bp, Homo sapiens
actcacacctgtaattccagctacttgggaggctgagggaggagaattgcttgaacttggaggttcaactccttgagccgagatcgcaccactgcactccagcctgggcggagacagagtgagactttgtctcaaaaagcaacaacaacaacaacaaaaacaaaaaaaaaactagcttgggagaaactgaggcagaaaatccaaagaggaagtgagacgataactataaaacagcgatccccttcaccacctccctagtgtgctcaaagtttcagtctctttactagaaaaccacagctttatgttggagttagtgttggagcttctgggggcaaggatatggctttggtagtagaagcagtaataataatctttatcgagtgccaggctctgtgcattattttatccagttctcacattaaccgtaggagacaggtagtgatagccccttttggtgagtgtgaaaactgaggcacccaaatatttagtgaagggcctgcgttttcgtaggtgacaggctgcagagccaggactcaggtgcctgtgttccctgcgtgagctctgtgtgtcaccactgtgactcttgcacatacagggcagccactaggattgggggtgctttgctgaaaggggggtgctatttatcaacctgctctttgtcccatagacagtgctgaagtaaccccgcctgtcctctctgtgatgggggaggccaccccagtgagcatcgagccgtaagtgcagccctgcccctggccgaggggtgtgggtggccacactggtgcagtgtgtgcaggtgggccctgggagcaacaggagggttccgtggggcctgcagagggctgagagggcctccttgagcttctgtatgtggccctgggctttgctgtccccgccctgcctctgtgtggaagttgcagggaagggcaaggaccggctcagcttgaacttatctctaggagagttgaaaggggggtccagaggctctttcccatctgtaaacctgcagctgcttctcccctctccagcc

SEQ ID NO: 15680 - DNA, 1033 bp, Homo sapiens
tatacattttgatgcaatgttattaggtgctcatttagaactaggttagatactttatgaagtttctttttatcttaaatattctttttgccttttattctcattttattcttatttattttattttatttttttgagatagagtttcgctcttgtcctccaggctggagtgcaatggcgagatctcagctcactgcaacctcctgggttcaagagattctcctgcctcagcctccttagtagctgggattacaggcatgcatcacgaagcctggctaattttcgtatttttagtagaggcggggtttcaccatgttggccaggttagtcttgaactcctgacctcaagtgacctgcccgccttggcctcccaaagtgttaggattgcagaggtgggccaccgcacccggccaattcttactttacatgagtaaagttatgagatacaagtgtgattttgtaacacgcatagatggtgtagtggtgaagtcagggctatcagggtatccatatctattccccaaataatgcacattgtacctattaagtaatttctcatcatccaccctttttgtcttttaaagtcaggtttgtctgatatcttgcttgcttttggttagaatctgcagggtgcatcttctcccatcatttactgttatcttttctgtatccttctacttaaggtgtatctttcaagtggcatacattgggatttgttattatccagtcttttagagaattgatacagtttatatctttctatttatttaaaaattaacataaagtctgggcacagtggctcacatctgtaatcccagcactttgggaagccaaggcaggtggatcacttgaggccagcagttcaagaccagcctgaccaacatggcgaaaccccatttgtacaaaaatagaataaaataaaattaacataaaaagaatacatatttatggcatacaacatgatgctttgatataatcaagctaattaacatacccattacctcaaatcttatttttttgtggtgagaacatt

SEQ ID NO: 15681 - DNA, 1047 bp, Homo sapiens
caagcgattcttgttctcagcctcctgaagagctgggattacaggtgcccaccaccattcctggctaatttttgtatttgtagtagagatggggtttcaccatgttggccaggctggtttccaactcctgatctcaattgatccacccgcttcccaaagtgctgggattacaggcatgagacaccgcgcctggccttatcttgcactttcaacataatcatccctgcttctcatctgccctgcagtgctcttggacctggaagatctccctgtggtctggcccctttgccttggttgttaacctccagcttctttgcaggagtgtatttccccaaaacttgtggctttcacagtagactccgtttccatcctctctctcacaaaggatgttaagtatgcctggccctcacacagtccatgggaaaccttatttttaacattactccattgagtcaataaatatttaccatctgctgtgtgcaagttactaggcaaatttctgtatccttgtccctaaaattcttgtctttaaattcattgtggaatttctttagacttcacactgacttttattactaaggtcacctttataccaactgccttcctcaaaatgcttataatgaaataacagaatcttgagttggaaacagcccaaagaaataatccaatgttgtactcagtgcagaattccctagaatttctaacaggttgtcattcagcttctgctaagccatgttcaaacagcttattccatttggaactgcactgatattaaaaaaaattccttatattgagctgaaatctacctatcttctaagtggtcttagttctgctctaatctctccttccaaaatctttggatcttttgaaaaaagttcctcccaagttcttttataagtgacatgacttttagaccccttcccatctttgtcaacaaaagtagggtgccagaccagtcacagaacactaaatgtcatccatgtttccttcagtagaaaccagcagttttaaaagaggtaagctgtgttcactaaagactgttccagc

SEQ ID NO: 15682 - DNA, 1046 bp, Homo sapiens
ggggtttcactatgttggccaggctggtctcgaactcctgagaactcctgacctcaggtgatccgcccacctcgaactcccaagtgctgggattacaggcgtgagccactgcacccggcccacatggtttattaaatcagtttagaactcagggtgagaagcaaggggaaagagttggagaggtgaacacagaagacacggtgcaagcaggatgcaagtgccacactctctgaatcttgggttccatttgtcctaggtttatatgtcctgcctgtctctgctgctaatagagtggttacacatactagagctgaagttcggtcatgggagcacaaagacaaaaggtgcctgaggccaccacacaaacttgccctatttggagaggccccaggggcacacacacatggccatttgcattagctcagtcattagcctataagatgggttttctttggcagaggacatgagagaccaagagggtgtcaccagtgagtggcttatttaaggcctcatgaacactgaatgcctcatgcatatgtaatgtgtcatatatatttcatgtgtgcctcgtatatttaatgcctcttgaatcttaggtctttctttgtcctcctgtctctctccatctgtttcagtacctgcaggctctactttatctgtagtaagttatttatccccagttttgggcacagtgtctaggctctattacatcaggtcaacacagaacaatcaactggtttatagacttttttggtggtggtagcatctttatccaacaaaaacttatgtagaatatcagtaatacagccgggcctgatggctcacgcctgtaatcctaacactttgggaggctgaggcgggcggatcacctgaggtcaggagttcgagaccagcctagccaacatggtgaaaccccgtctctactaaaaatacaaaaattagccgggcgtggtggcaggtgcctgtaatcccagctacttgggaggctgaggcaggagaatcacttgaacctgggaggcagaggttccaatgaggagagatcatac

SEQ ID NO: 15683 - DNA, 1029 bp, Homo sapiens
tctcgagagtgaaaggtagaaaatatttgcaaatcagaaatctgataagagtctagtatcccaaatatttaaagaactcttacaactcaacaataaaaagacaatccaatttaaaaatggacatttctccaaagaagatatataaatggccaacaagcatacaaaaagatgatcaacatcattagtcatgagggaaatgcaaataaaaaccacagtgagatatttcatacccactagggtggctataatttaaaaaacagaaaataacaagtgctgatgaggaaatagaaaattggatctgggcatggtggcccacatctgtaatcccagcactttgggaggccaagacgggtgggtcacctgagttcaggagttcaagaccagtctggccaacatggtgaaaccctgtctctactaaaaatacaaaaattagcacagagtggtggcacacacctgtagtcccagctacccgggagactgaggcatgagaatcgcttgaacctgggaggcagaggttgcagtgagccaatatcgcaccactgcactccagcctgggcaacatagcaagactccgtctcaaaaaaaaaaaaattggaacctttgtacattactggcagaaatgtaaaatggtgcagccactatggaaaacattctggtagttcctcaaaaagtaaaataactaccatatgacctggcagttccattcaggcatatctcaaaagaaccaaggatgggtaccccaaccaatacttttataggagtgttcataacagcactattcacaataaccagaaagtggaaacagctcaaaaatgtccatcaacagatgaactggcactggctctatcactggatttggtgctgaagccgcttctagctctgcagctggcactcattctggctttagcttggggatgagtgctgtggtgggtgctggagctagctcctgctttgtagctggtgctggcactggctctactgctagtgctagactaggtgtcagaactgtctagctctggagctggatct

SEQ ID NO: 15684 - DNA, 1024 bp, Homo sapiens
aagaacccaaaggctcagcctggccagggccagaggcccctcaaaacggggagtagcagtagcagagagaaccgagtggcctcctctgccagcggccagggcagcctgatctccatgtggtggtggtctcttgtagtttcattccttggttctgaaactctgtggaggaggaagatgggagctgatgagaatcaaagtggaatgaagctctggcttttggaaggagagccacactgtggcgggtcggcggccctcaggagagaccaggaggactgacagcgaagatcgagctcaggttcgccacatagatcccgtgcaggagccacatgggtcctgtgcaggacccctagcagtggtgggctgagcccaggtctaggtttctgtgggggacactgaatctcccagtgttcagtctcccaggactctgctgcctcagccagagcctccatatgcttgaagtgctgattacctacaaatgatttcagatcatgtttgctaaagagaaatctggaagtgtgagatctgtaagaaatgaaagaaatgactcttggagtcaagagatctggaaatcttttaatcagttaaattgtgcagcaatagatttttaactttaactgaccatttaagttttttaataagttttttacaaagaaaagttaaacattaaaaagaattacagctttctgtcttctctatcatggaatgatcttttttattgaatctccagatttgtatttgacagcttggtgggaagggaagcacactctgctgttctggaatcttatgcccagggtttttcacttctccccacatctccctttccacttgccagtgttgtgtagttagaacctgaaccactaacttccaggggcctttggtctgccctaccttaacccaaatgaaagtaaatccctttccccttagccaaaataaggttgggttttctaaaaaaatagtctatattagggaacaacaacagcaaattagacaaaacccagaaagcacaaagcatgaggtggagtta

SEQ ID NO: 15685 - DNA, 1032 bp, Homo sapiens
gtttcagatgagttcttctgtggcctctgtgcaaaatctgaaatctccctccaccttttctgcctagcgaatttcttcccatccttgaaaccccagatcacctcctctggagagccttcccagactcccttaatggctaagcctatctgctgccatggccctgagggcacacttagtactcctgattccaagtgaagaatgcagtgtgcctgcctgccctctggactgagagctcctcaaagacagagataattttctcatttctttattgcactagctaactagtgcaatgcctggtacacctagtgaccgctctgtgtatgtttatttaacaatagtttttatttattgagggctccttatgtgcttggcactttatatttagaaacttttaattctaactctaacctattacataggtattattggctccattttatagattaaaaaaactgaggcttggaggcttaagtagcctgcctgtgtcacgcagctagtaactggccagagccaggatttgaactaggtctgcccaactctagagtttatgttcttcacacagacaataccattaaggcatgactgaagccgtgaatgggcgctaccagtagacagatcctgagaccaagatcatttgaatggccttggtttctaaaggagggtgtgatatgggacaggcggccccccaacctggctgaacctctccagccctgtggacatcccagcctttccttgtcagagctgggcatgtggagcacatgaggacagaccgcaggctgcagagactccttcagacccagagggagctgatgtccaaggagctctggctgtacagtaggcgagggggcccagggaagtgggaaccatggggttggactggtctgcttcccttcccacacctctctacctcctgtctgcaaggataaatgtgccatgatgaaggaattaaccggggatgaggagggggggctgttgcctttctgtgagtatcctcaggagaatgaggatccagagagtccacgtggccctact

SEQ ID NO: 15686 - DNA, 1035 bp, Homo sapiens
ccatgagctgtttgttcattgtaccaaccaaagtttgccagccctaaccctcactgaagacctaattccctgcttggaaaatggtttctaggaatgtgggaacccccactggccagggcttctccctctgcagggcccagtcttgttcacctttctggcctcggcacccagtctgatcaagataaggtgctcactacatgttttcggaatgtattattagcaagcaaggcagaaccagagctaagtgagtcgtggtgtgccgtaggggcttggctcacagggtttggggtcttggatttctagacagtgaaagatcttattttatatatatatttaatttcaatagcttttggagtacaaatggtttttggttacatggataaattgtttagtggtgaagtctaagattttagtgcacccatcaccggagtagtgtacattttacccaatatgtagttttttttccgcaacccttcccactctttcccttctgagtctctaaagtccattgtatcactctgtatgccttttcatacccatagcttagctagcttagctcccacttgtaagtgatgacatgtatttggttttccattcctgagctacttcacttagaataatggcctccagctccatccaagttgctgcaaaaagacattatttcattcttttctatgactgagtaatattccatggtgtatatatatatcacattttctttttcttttctttttctttttttgaggcagagtctcactgtcgcccatgctggagtgcagtagcacgatctcggctcactcctgggtttaagtgattctcctgcctcagcctcccgagtagctgggattacaggcacctgccaccacacctggttaattttttgtatttttagtagagatggggttcaccacattttctttatccactcattggttgatgggcattaagttggttccatatctttgcaatcatgaattgtgctgcagtagacatacacgtgcgggtgtctttttgatagaatgacttctttgcctt

SEQ ID NO: 15687 - DNA, 1022 bp, Homo sapiens
agagggaggtatctccaacactaatagcaatcaaagggtttgtgctatggttataatcagtgtggcagaggaaagtcaaaggaataccatttccaataaactcagaggcgtgaaaaggcaaatcaattttatgaacacccatgaaattggttggttgtgaccactatgggtggaaacactgagcttcagtggaatttcccttaatattaaaccaggaaactagagtccctggttatctctctgtcgtatacagcagctgacatctattcctcctggggattgggcagatcttaaagttgatgtcctaagcttctgactgggatcacagctctggataggggttgggtcaggccatcgcctttagaaaaccagttatttagcctctctttccaatgggatttctctgaaaccttgttcatgatgatgccaacttgtgtctccttgaaaaatcaaaacaatggaattaaacttgggtgttctcctatagatctagcattttatgtcacagtcagggtagacaaatgtgctgttggctcctggcaggctcatgtgcagctctggagatgttctaaagtgggtgcagtcaacagccacccatctgcatactccgcagtggtctggtttaacaattctgacctatcatccctctaaaccttgaaaactctgtggtcttggcgtccaagccatgtcttccagtagactctcacacccagaatcagcaaaacctcttttgtcagaccatatcttgagtttaggcttcaaaaaaatggcatcgtgggttagctttgtggggcggggtgagtaaaactccagtcctgacttttaggggtatggctggtcttgggggcttggcatggtgggaagaaggggccaagatagtggttggcatgaggatatggagaactttggaagcagagccagagactctgaggattgaggcccaggaaagtttggcacgagtaacagctgggtatttaaccaggaacagtcactctatttttctgagccttggcggtatgtca

SEQ ID NO: 15688 - DNA, 1048 bp, Homo sapiens
taacactttataccttggcttacctatcagtcacttggggatttgggatttatgggaaaaggccctactcatgcagggtagagagattttaagagatacagctattagtaatggctttagaatcttttgcatgtagaaagttccttagactaccaactaatgagcaaagtgacttccaagtttaagtgaattctatataaagaatacaagacacccttgaggatataactgaggaaaaaggccctgaaattttagtatccttgctttggtggaaactcaataggtatcaaatgaaataatgaggtcagatatgttacataataccctgatgtttatctctggtaattaagtctgcagaaaaagacttattggaataaatcttttgtctctaaactctgctcatatgaaatagcaccatttggcaaaggccaaattcctggtggatatctcactgaggaagcaaacattttcaagaatgccagagttaaagggagacaacacacaccctaaacaagactgtgaagatactatgaaactattctgttgaaaccataagcatagtatcttttccagggtgagggggtttctgtaactctcttgagtgaagtcgctctttctgcaaccccccacttcacctgcattatggatttgcacataaaggagtttttctgaatcttcccttcttctacagaccaacaatgtttcctctctcctcagaactcccacttgagggagttgccaagacattcctctgtttgcccattagcagagtcagggatatcagagtatttgcaagccagctagagagcctttgatggcttttatgttatgttgaaaacaaaatgttgtgttattgtgcaagaggaagattatgtgtgtgtcatcattttgtgcttggtctcctacgtccaatcctgctctaagttgtcatttcatttcctaacctcctcccctcccagtcaggtatttctgttccatccctgggtttgtagcctccctttttttttcttgagttctgtgcagctctgcatttcagcagacgtttcct

SEQ ID NO: 15689 - DNA, 1050 bp, Homo sapiens
cagtgtttttggtggtatgagttaatcacttctcccttgcccttccagttttaaccagctgtgcctccctacatatgactcctatgaagaggtgcacaggatgctgcagctggccatcagcgagggttgcgagggctttggcatgctctgaccactctcctgtcatccagttggctcccatgctctctggagcttctgggcgcaagttacagacatcataaccactgatcctaacacacataaccatcagccagaagatgccgcatgctcccctgtgtctggaggattttgtcacctacaagccttgtctttacctcacctgctccctgcccatatctaccacaggccactttggcatggtatgtaagctgagctcttcattctgtcatgagaagaggaccatgctgctatcatttatttggtcctttgaagatctcagtagctgagggagatggcacacggggctcagccctgttgggaaactggtgtggagacccttaaatccacactgtgctccaaaactccctctgctgatactccttggagacaccctctttggccctcactacttgaccagactggtacttgagtccttctcatgggtggggtgattgcctcttctcatcaggagccaggagagagggggacagataggaggtggcccataggagcagtcccgctgcacaatggtaggcataggccatggcactggactgcctctaaggactgctaaaaagaatatttttttgtggtgtcagaactggaaaaagcactttcccttcgggcatttctggaaatgattattaatccacaaagaagaactctgtaagctttttcttgaattgtagccagtgagaaaagcagatagactgaagaatatgaaggatagctgagctgtagcctccagagtggggcatgcctaggcatatggctggcttggagactactgatgcttttccctgagtttgttattggcactgaagtatggccggcttgggccactgacttccccattatgtagtctgctaaaagctggggatcctttagcat

SEQ ID NO: 15690 - DNA, 1045 bp, Homo sapiens
tatctgtctcactaactgcctgacaaagctcccaatacaaagtatatacttaataaatatttgttgactgggtaaattgtgcataaaggcaggttataacaatatgagagtttagattaggaagattattatggaaattagaaaaaaagaagcaaataaaatgaacattgtaaggaaacaatcagagattgctattggacgatccatggagaaagataaccccaacttcacaaacccataaagagtaggcaaaaatactgctcttgcctcttggagaaaaactctgaaagccagatcctaacaagttaaggaatgcctcctacagagattagaaatacaaatactccgtaagaaaaagctgagagacagaaggtcagtcctgaagccttagtttcatccatggtcataagcactaatttatttccctctttttttttttttttttttttttttgagaacggagtctcgctttgttgcccaggctggagtgcagtggcgtgatctcggctcactgcaacccccgcctcctgggttcaagtgattcttctgcctcagcctcccaagtagctgggactataggcgcgtgccaccacacccggctaatttttgtatttttagtagaggcgggatttcaccatattggccaggctggtcttgaactcctgacctcatgatctgcccgcctcagcctcccaaagtgctgggattacaggtgtgagacaccatgcccggcctataagcaccaatttcaagcaggattaaagcttcattaaagaagcctaagaaacatgttactttttccagatatttggcagtgacccaaggtcagcattggtttcccactatatacactataaccttcttgtttctgtctttcatttaggggccattaagtttaatgatggcctgagcttacaggaaagttgccgccttattgaagctctgtcctcatgccagctgccattccagtgtgctcacgggagaccttctatgctgccgttagctgacatagaccacttggaacaggaaaaacaggtacattaat

SEQ ID NO: 15691 - DNA, 1032 bp, Homo sapiens
tgaacactaattcatctggatttgtttacgtgtggtcctggttaaaggcaaagggaaggatcagataacttcatgttttttccatttaacatacccaatagattcttgattaggggaagggaaaatgagcaagatacagtccagtattctaaaaacaatcagccttaggggatcatttcaaaagcatctgttttggacttaagtctttgatacttaaccaaattgactacacagtgaaaaattctagtgcctgggttttatagggtagaagaaagacatgcagtcaagtggccaatacttcatgtgaagataagcaatgagatccttcttgctgtctttcttttgactgttctgggcaatatcaaattagtttcagtggcttgattctaggccaagattctggcaacagattgtagtcttaccttgttttcttcaatctcactggatctctctctctttttaccccccttaggctgagggtaaaaagctgggattggtaggctgggtccagaacactgaccggggcacagtgcaaggacaattgcaaggtcccatctccaaggtgcgtcatatgcaggaatggcttgaaacaagaggaagtcctaaatcacacatcgacaaagcaaacttcaacaatgaaaaagtcatcttgaagttggattactcagacttccaaattgtaaaataatggcctgaatttaagttttctaagataaactcagtggtttggtttttattattaatagagatagaactattgtgtgttaatattagcattagtcaataagttattttaatgtcagatttttgaatgttattatatattacctgtatgatggaaggattaccactgtacacaaatctaatcaataaaaacgttagaaccttctgcttagagtacttttaaaaaatcttcagtgaacttccttttgggcgaaatgagaggtctttattcagtaaacatttgtaggaagaggattttgaggtaatttaaagaggtctgaaagaaaaaaagtctgagtcatttcttta

SEQ ID NO: 15692 - DNA, 1034 bp, Homo sapiens
ccctaaaatgttagtagcaggggattctgggagttagtagcagggaattctggtagtgagggagcgggaccgggcatggatgtaaggaggtcatcggtcctcaggttatttccccagaagaggcttcagcgggcagctgcgatccgaagctccctctcccggcgtctggttcttccttcacacacaccttatcacatccactcacgtttccatttccaggaccttgaagtcggggagaggtcgcaatggttaaggatggacaggggtgggtgtggccctttctgactcaggcttgcgggtcctggaataatagcccttcactcttctgctttcctggtttctgacaggtttgagcatggcagaaggaaacaccctgatatcagtggattatgaaatttttgggaaggtgcaaggggtgtttttccgtaagcatactcaggtatgtggcctgcaggctttggggtggtaacctaggttgtgggcataggaacaagggacgtgttcttgacaaatgtgaactagaagccgctggctatttggtagctgcatggcaaagaggtagtttgtagagcaatgagtatgaaaatgctgtgcaatcggtaaaacatggtgtaaatggaagatcaccctgctgttattattagtcagtggtgcctgagcatctagatacacatattaatgagcttctctcttccaagggaaatagagggcttccccagtgctcgccgttgtggcatcatcaaaccaagtcaggtttcttatagaaaggctaacattgattgaagagctggcatttagatgacctgatgtcatgtatataacatatataaatgcttcctctgcagctgctgcactttcttcagacctctttctccaagcttccctcagttctccacttaatttctttctattcttttttggttttgaaagaacatttaccttttccagctgacgtttttcttattaaaaactctttatccattccagaataggtgatgggaacactgaatgtggagcctggtattcttcctaga

SEQ ID NO: 15693 - DNA, 1035 bp, Homo sapiens
gggttttctgttttcttttttttttttctttccttgggaacttttagccaaaccagtttttatttatattttaaaaattaaattattatgcatttctagggaccatcctcaatgggattcccagctgttccttttctcctggaaaggctgtggcagaaactgagggttgaggtttcaggttttacacacatccattgtgaccccacacatgcatcaccccaccttctccagtcctgtctagttagctgtaaaaagatatgagcatttggaagtcctagatattacctcagtactctgtcacctctcctataaaatgaccagattgggaccccacagggctactgaatttctgtaactgtcaagcagccttccatctcaaaggacaaaatcagcaatgaattgaagcttctttctcaactttttgacaggtcaccctaagtaggacctattactaagacaaactgagagggtgctgtcttgtttagttgacctggaactgtcaccttttctttgatattgtaaaacttgagctcttcgttgacaacagtagccttgaccgagcacaatggctcacgcctgtaatcccagcactttgggaggccgaggcgggcaaatcacttgaggtcaggagttcgagaccagcctggccaacatggtgaaaccctgtctctactaaaaacacaaaaattaactgggcatggtggcacacgcctttaatcccagctactcaagaggctgaggcaggagaatcgctttgaacctgggaggcagaggttgcagtgtgctgagatcataccactgcattccagcctgggcgacagagcaagactccacctcaaaaaaaaaaagaagaaaagaaaatagtagtctcagccaggcgtgatggctcacacctgtaatcccagcactttgggaggccaaggtgggtagatcacctgaggtcaggagttcgagaccagcctggcctacgtggcaaaacctcatctctaataaaaatacaaaaattagctgggcgtggtggcatgcacctgtcat

SEQ ID NO: 15694 - DNA, 1078 bp, Homo sapiens
tatagagttgcaaaaggggtcatgacttctcttatccagaaagggtaggtgaaaatcactagggaagtctaaatttataaaactagaggcaagtttagtattttcattttagaagctgggaccagctatagataattgctccccagttctctgcttctccagtattcttgccctgccataatcaccatcatgattagcagtctgtcatagtatcctcaatagaatctttttgagatctatccccagcccatatttttacctggaactgacatcatgcaaattaagtatgacaacaacgttttaatgctttacttcccctgtcctgcaataaattataatgctaaattgtacacataacctttaaagtctgttaaaaggaaaaaataagaggagtcagtctgtgcccctctaggaagttttccttctaggcttacagatctaggtgtggattcatttgctgccaggcaagaggaaaagcacgatacctctgttactgtgtttaggatgactcactggttgtgtggaaggaagtcgatttgacccggctgtctgagaaggaacgtcgtgatgccttgaatgagattgttattctggcactgctgcagcacgacaacattattgcctactacaatcacttcatggacaataccacgctgctgattgagctggaatattgtaatggtaagatagagttcagtgggacttttccagcaagactttcttagactcataattacgttgaggagaagaatataagaagagacatatacagtgataaaaactttaaatgaatttctagagtttaagagaaacttttcaggccttggagaatttttgaagtggtgtacgaaataaggagagggattttcccctgcatacccaaattttctcttgtgattacagttccattttcaaactatcttttctttggttggattttacctttatttttcaaggtttttctttatgaaatgacattagttaaccagagtgtggcttggcagcacttgatacagtatttaataagatcttataggtgatatttatttatattgtcttcagctaaagctatcctatt

SEQ ID NO: 15695 - DNA, 1042 bp, Homo sapiens
ttctttcctatttctgactggtgcctttcccctttttaggagcaacgaaagctactctcttagttatgttcttgtgatgtgacaaaatgtcaagaagataggagaagagaatattttatttcgttgatgcttttgttcccaagtgtgaccctaaacttaagctttgtaggagttgacattctttcatgtcccttccctttactcatgccgaaactatcaactgggacattttgtgcttttggtttaaaagttaattgatattatactttggttttatctaaaaagtaaatgtatttgcctttgacaaaagactgacacaagagcaaataagctttaaaatcgggtgttatgtgctttcctccatttttgagcatattatccaaaatggtctgtataatataaatgagaatgatgcagtttaagtaagccttgttataccattgtcatggacccctgtcataaagccatttcttggtttgtttgggaaagaggcatatgggatttatacagattcacttgtaaatgttggattggggatttttgtgtaaattttctcaaataaaggctagcagaaaccattttaggtgtactgttactcttgagtacttctatgtctggattggtgataattcttccatatttctcttttaaattatggcaaattatacctgatgaattagagaaaaaatattgttattcttcagttactgcagatcgatagtttatatgagctagtaaaagattatcatattttgtatgtaatatatgtaaattatatatatatatataattaagaatccttaattatgcatcctcagaccaaatatggttctgtaagctaggcattttattctctttatcttctctcttttggaaactgttactattaggttcgcacaaaagtaattgtggtttttgcaattaaaattgcaattgcatagaatcactcctacagagagccatctcccctgcctttcattcctaaaagacccccaccccccacccccggtatatgaatcctcaggactcactttttaggcct

SEQ ID NO: 15696 - DNA, 1046 bp, Homo sapiens
atttaggtcatttgttctttttactattgagttttgagaggttttttatatatcctagataaaattcctctgttagatatgtggttgcttgaatttttaacataacttctaccaaggaaaaataagtaaaatttccaacccttgcatggccagtcacttacttaattcctgtccttcagtgttccatctagagaattaagagatatgatgtataaaatagacatcgagggccattaagagagtaaatacttaaaaatacatgttatgaaagcaaagccaataatcactgtaggagtatgagttgcctaagggccaaaactaatgtaaataagagaaagtgtggatataaatgaccattgtttataaacagttatgaaaaatgctgtgacttgaaatctttcccacatctcccaagaaagtaggtaggagtttatcctttccgtaatctctttttaaccctgctgactattacagggcttgtttaatcacagtggcaagaattacatgtatcttacagtaaagaaacagaatactggaatcgttagagaaccctgatgtgttgacctggataaagtacaaaggtggaagagggaatgagttatgctgttaaaatctcaggctattctgttaatgttcctgctactatgaacccaaactttttttttcccccttttgactccttgtgtcttcctctcctgtggcataaaagtagttctgtcgttaacttgtacaacattgccatctgctgttgagaattggtaggtactgcttctgagaacctggctgcagatccttagcataggcagcaaatgttgagaaagtctatctgtagtattacatatactaagttacagaggatgcatccaagtagagaaaataatatgtgggttaagatacatccttaaacttttttttttttggggggggggggacggagtcttgctgcaacgcccaggctggagtgcaatggcactatctcagctcgctgcaaccttcacctcctgggttcaagcaattctcctgcctcagcctcctgagtagctggg

SEQ ID NO: 15697 - DNA, 1196 bp, Homo sapiens
gtcctatacttcagcatcttttcaatgttctgtctcattggactagctacctggcaggtcttctacctgcgacgcttcttcaaggccaagaaattgattgagtaatgaatgaggcatattctcctcccaccttgtacctcagccagcagaacatcgctgggacgtgcctggcctaaggcatcctaccaacagcaccatcaaggcacgttggagctttcttgccagaactgatctcttttggtgtgggaggacatggggtaccacctacacccaacaagtcaatgagggacttctttttaatttggtaggattttgactggttttgcaacaataggtctattattagagtcacctatgacaaaaaataggggttacctagataatgccaaagtcagcatttgtcctgggttcccttgtgtgatctgtttggactatgttttcttttcttctcccacttgctcagcagcttgggcttccattctagttcttttaccaagatttttgtgtgaccatgttgacttcatttggattgccctctttcaatttccttgtgaaaacacccttaactttctctttacccttagctgaaatgtttacatagcttctggtgatatcttttcatgattttatatctcttaaaatggtgatggatgtgacacctcataaaagtgagctttgaactgtagataactcttaaagaaaatgtcattttagacaattaaaatatttgtgctcaactgcttgaacttttttcgtgtatgtgtatttaattctatgcaatattatcacatgtgtagattcatgtgaccaccatcacaagagacagaacagttctgtcacatggatcccttgcactgcccttttacagccgcagccacatccctttcttataccctcaccccaacctgtggctaccactgttctgtcctccatctctgtaattttgtcatttcaagaatgttgtatgaatggaatcatacagaatgtaatcttacgaggctgatcttttttcattcagcataattcccttgaaatccatccaagttgttgcatgtatgaatagtttcttcctttttttcttttaaaaatgttttatatatttagggggtataagtacagatttcttacatgcatatattgcatcgtggtgaagtgggggcagttccttttgattgctgagtagtattccatggtat

SEQ ID NO: 15698 - DNA, 1067 bp, Homo sapiens
ccgaactgtggaccattctcagttgaatttgtactctgtggaattttacctattgtaatctttttctccaacatgatgcctgtcattaagggtatttatttatttatttattgagatggagtctcgcttggttgcccaggctggagtgcagtggcgggatctctgctcactgcaagctccgcctcccgggttcacgccattctcctgcctcagcctcccgagtagctgggactacaggcacccatcaccacgcccagctaattttttgtatttttagtagagacggggtttcaccatgttagccaggatggtctcgatctcctgacctcgtgatctgcctgtcttggcctcccaaagtgctggcggattacatgcgtgaggcaccgcgcccagcccaagggtatttattaaataacaacacatcaatgccctattagacagtagacatagctagttcccctcaaaaacagatgacattattgtgggtttatataaagaatgctttggacacagctgtcgtatagcattttagaacccctatacctcctggaatttccatcatccttggactttatagacattaggaaaggggctttatctttcctgaccttttgcttaacccaagaggggaatccctagcccaaagaaaaccacggtgcttcctttgcctgcttcctgcttcagacgtctgacatgtcctaagcctgcctttacgcatgtagttacaacacagctccaaggttctgcttcttaaccaagaaactcctccccactactttctttaacatctatccccaccctcctgcccttcacccctgctccccagcagcagaccagattgatgtagaggaggaatggctatgacacagtccgaagaccagccctttcttcagtctgcagcaaggctgccttgaaccttgcttagaaatggctgttagctggcagggcacggtggctcacacctgtaatcccagcactttgggaggccaaggtgggtggatcacccaaggtcaggagttggagaccagcctggccaacctggcgaaaaccccatctctactaaaaat

SEQ ID NO: 15699 - DNA, 1051 bp, Homo sapiens
gaggaggcagcagtgtgctatgctgtgaggtttctgtgacctcggcaggccaacaggctgtgctttgcccaaagggctgtggtttcttagcagtcttgtgacagccagccatgatcttactgatacaaaaagtggtattaacagccttagccgggcgcggtggctcactcctgtaatcccagcactttgggaggccaaggcgggtggatcgcctgaggtcaggagttcgataccagcctggtcaacatggtgacaccaagtttctactaaaaatacaaaaattagccaggagtggtggcgtgcgcctgtaatcccagctagtctactcgggaggctgaggcaggagaattgctggaacctggggggcagaggctgcagtgagccgagatcgtgccactgcactccagcctgggcgacagggcaaggctccatctcaaaaaaaaaaaaaaaaaaaaacagccttgaagaataattctggctgtgctgtcagccaaagactgaacaaactgtcccacagaatgttggtttgataaaacactgaagcatatggcattagttctcttgaactgtgtgtgtgtagagagagatattttaaattttttaaagctggaattcagttatttgttaatgcccaaggttaagaaaagtgatttgtttttaattcctaagactttttccccaagaccaacagttgtatatctatctatctatctatctatctatctatctatctggggcatggattcagtgctgtttagtcttgaacaactgttttgtgtttgggaaataacaatagtcaaagatagtttttagttaaaataatttcaaactttcaaggaagagggcaggatggaggaaaaagctgcaagagactaggaatggtgataatagaaatttgatgctgataagaagttatttattatagactaataaaaactgacacttatttgggtgacagggagatggaggtgtacacagaatgaggagaaggacaacagcctttttcatctctgcgagacttgggggcagcacaaaagggttcttcaaatga

SEQ ID NO: 15700 - DNA, 1122 bp, Homo sapiens
actgcactccagcttggaagacaagagtaagaacctgtctcaaaaaattttttttaattaaataaataaaattaaaggttttacctctcaacactgttgcattggggattaagtttccaacacatgaactttgagaggggcacatcgaagccgtagcatatctctttaaaatctccagcacagttttagtacttagtgagttttcaatgagtagttattgaattgacttcagttcatttcagaaaacttccagtgtctctcaggcatcagagggtacagtaccattcagtgtggcttatggtttcaggaaccccagtgcttcagtggcactgtttcccacaacttctaatttcatgcaggcagttgtaaattttataactaggtgaattccaggggattggggctgaacagttttctggggctccttgggtcttttcctttctcctacttgatgatttaagattagaatgcttctttgatccagctgaatcagattgactcttctaacatgaactctattataagaagcatccctgagatttgaacacttaaagttgttttttttttttccttgagctgttgtaactcttttaagggcttagtgggaatagctctatgacattgtactcctactgaactaggccatacattgatcaaaatgtttgaattaaagtggaatattagataaaacttatgttcttttcagtactcagatttatattaagtaaatccaagcttagcacatatccaataatcctaattcatcatggccttccctcaaaatttgacagggcaaccttttcagatgtggaaatacacattttcagccgaagttgttgcctactatctcttgatttatatgccactcaatttcacactgttttgatttttgagttttatttcccaattcaataagcctgtgtggtttcccttctgttctgttcctctgtagtaccagttgcagtatcttgtgtccttgcctgctcagagatgtttgccagcagcatgttcttgttgctttccggcaccccacacagatagaggctttgtctggaatgtttgtgattttagccagagccaggaattttctgcaactgagcagggggaggagttgtggctgtt

SEQ ID NO: 15701 - DNA, 1032 bp, Homo sapiens
aacctttcacttaggaatccactgatgactactgtgtgcatttattatgtcattaaggttgtgaaatgatgactttctaattccgttactccttccatatttattagctgaaattattcttaaggaattaatatcatctgattatcctaaaatttatcattcacattggtaggataaatgcagaatttatttcttctaattgataattgtcagagtaaggaattgttgcccttgtcattttcagtgttgtccaagagtttttgggtttttttttaaagtattttactgaactctttttaattgttggcttcaacttttagaatcattgtgttttaggcagttgtttccattctttatgcccaatttgtccctttggttccttcatattggctcctgtattttttcaacataatcctgttaggttttgatagcatccttgttttctggcacaacaaagtgttctaggcttatcttgtatatgtctatcctctgacctcagaacaactgtttctctaaggaattctagttcctttttgtggggattggtatttggagaccacaagctaggtgtcatttttgaaaatgtaatataccatgcaagccacagaacacatttgtgagcagatgcagcccatagcggctttcagtctttttcatggtgtccgttcacttagttccactttttctttttttgttgagatggagtctcgctttcacccaggctgcagtgcggtggtgcaatcttggctcactgcaggctctgctccccggggttcacaccattctcctgcctcagcctcccaagtagctgggactacaggcgcccgccaccacgcccggctaattttttgtattttttgtattttttgtatttcaccgtgttagccaggatggtctcaatcccctgacctcatgatccgcccgcctctgcctcccaaagtgctgggattacaggcatgagccaccacgcccggccgttccactttttcttatattttgacgactgcttcaaggattctccctatgcatcat

SEQ ID NO: 15702 - DNA, 1031 bp, Homo sapiens
ctgaggtcaggagttcgagaccagcctggtcaacatggtgaaaccctgtctctactaaaaacacaaaaattccctggatgtggtggcgggtacctgtaatcccagctactcgggaggctgagtcaagagaattgctcaaacctggaaggtggaggttgcagtgagccgagatcatgccactgcactccagcttgggcgacagagtaagactctgtttaaaaaaaaaaattgtttttgtttttgtttgttttaatttggaacaaacacagtaggaaaagaaagcaaagattaacagttggagtaagtgcctatagttctcgccctataggcaagaagctaaaactctagagcctcagtttcctcatgtataaaatgaaacaaagggctatgtcatgggtttgttttgaaaattaaatgagataatgcatgtaaagcaattaacatgattcctccgtcaaaaattttttcaaatctgtgattaagtctaagaatcattttctttttggcaaagaaccccatatggacatcacattctccagagtttcctttcagcattttcaggcagcctcttgttcaccccaactgttatccccactgcaggcagctacaatgttaagcagtgccattgactgttttcaacaaatgccctggcaatagggcttttcccattagcaaactccaagtcaggttaaatagcaacatgtcctatgaatagggcttttccggggacctgctaggtaggtcaaatagtaattctcaggggtggagctccaaatcgactttgctccctccaatggctatgagacagttggttttcacagctccacggctgcgaggctgctggatgtcacagccccatggctgcaaggctgtagtagggagaaagggattggaatagggcaagtgaaaacacaaggcccactgttgttactgatatttagccatttctcttgaataaatgctgcttggattgttgcaagccatttgttaaaagttctgaaaaaattcatttggatattttttgccattgt

SEQ ID NO: 15703 - DNA, 1023 bp, Homo sapiens
ggccaggctggtcttgaatcctggcctcaagtgatcccccggcttcggcctcccaaagtgctaggattacaggtgtgagccactgtgtctggcctatctggtcagttttctaagcagaaaagttctttttagcttgtttgttttttaacaagcctacaactaacatcataaagagcaggaaagtcctaaatccagcttctttactggctgttgtgtgatacaactgaggatcctcttcccaagttcttgcagaggaacttgcatgcgtggctgctactattgctgaatgggcccaggaagaggctgtagctcatgtagaggtagcagcttatgtgacctggagcagagtaggtggaagccttgagtcctgtataactgccagagcagtgctgtttgttcacagtgctgcatggtaagaatggtgtctagggaaatcatgtttaagatcctgcaggtcactgtgattttgtgtgtgtgtgtgtgtggcatattgtaatgacaaaggatgtaacttaaagatactagtgttaaaaatgtttatgctccaaataacattgcatcaacaatcacaaagtgaaaccataggctgtaacatggagtaatagacaataactaaaggtagaaggctttaattgatctttctgagtctgcagcagatcaagtagataaaagatgactaagaatatagaataactaagtaacatgtcggatgataaatctgattcatatatatcaaacaccgaacattgacagcagagaagacattttctttttaagtattcataggaaattcttaggaattgatcatatgttagatcataaagcacatgcaataaacatataagttaaaagtgaaaagctgggcacagtggctcatgcctgtaatccagaactttgggagactgaggcaagtgattcccttgagtcctggagttcgaaataagcctgtgcaatgtggcaaaaccctgtctctacacaaaatggaaaaatagaaaaattagcctggcgtagtggcatgtgcct

SEQ ID NO: 15704 - DNA, 1043 bp, Homo sapiens
ctgagtagctgggattacagacacacgccaccagtcccagctaatttttgtatttttagtagagacggggcttcaccatgttggccaggctggtcttaactcctgacctcgggtgatccgcctacctcagcctcccaaagtgctgggattataggtgtgagccactgcctggccctgagctactcctgtaagactgcattcccgggggaatttctgaatgactgagtctaggtcatgagcccacatcctggctgccagcaagtagagggagagagaatctccagctttgatttctgtgatttgatttctgtgatttgatttgatttattccataaatacccctcaggaagggacattcccatccccagctcccaaacagaataggagcattctggatggccttcccaattggtgcctccagacttcatccctctcaccctcccccactctgaagtccaggaggctgatctgtatgggctgcatcagctgaactctcatgcttcctggcttctggctgggtttgcccaatgggcggcaccactggagaagaatggaggtgggaggtgggaggtgggaggggagagggtggggtattgttccccttgctcctttcctttgcagctttgggtctctccagcatccagtcactctgtccctgtcccaccaggtcttcatcattttttgttggtttccctttgtgctgcccacctttacaacttgtcccttcttgaaagatccttcaattgccctattttagggtaacatctgttttctgctgggaccccagaattatacaggagggtttaacagtgagaagcaacaaagctccaatgaatgcccacaacatggtggaacagatgcccattggaagctggcagcatgataaatgctcaagagcaaggaattggaagccaggcctaggaaggtctaaattcttagcccagctcttactacctgtgtgaacttggctgaattcctcaaccatgctgagtttttgttctttttcagaagtaaaagttaatccttaactcagggataggttg

SEQ ID NO: 15705 - DNA, 1602 bp, Homo sapiens
aggtggcgcccccgccgcctagcgcccacccgggcatggaccaagtgcacccccaaaacattccggattcccccatggccaacagcggacccctctgctgcaccatttgccacgaacgtttggaggatacgcatttcgttcagtgcccttccgtccccagccacaaattttgcttcccttgctctagagagagtatcaaggcccagggggccaccggcgaggtgtattgccccagcggagagaaatgccccctagtcgggtcgaatgtaccttgggccttcatgcagggcgaaatcgcgactatcttagctggggatgttaaagtgaaaaaggagagagacccttgaaccactgggcagccacctcctttgccctagaccagctcctctccaatcctgagggcccctcccccaacccaactcgaccctccctcccctcacccccaaggtgtagaattgtgaatataacgaaactgcaaaaagttagtcttatgtatagacattattttcgtcgtatgtttctatattttgaaacaaaggtatgtaacttcttcatttgaaggataagctggtttgtgttaagcagtatagtattggttgggtcatttgcatcatatcgttagcatttatttggtggcagaatgtttgcctaggtacagaattaatagcccttagcaacgactgctgctggtgtgtatttttgtaaatgttatgcactctctgaaaggaaaaacacacacaaaagaaaaagacttttttttttttttttttttttttgccaaggccagtgttgctgcctaaaaaaaaaaaaaaaaaaaaaaaaaaaaaaaaaaaatgctataaaatggtgaaagcttccttctaaactgccccaagtgttgaagtcttcactttattttgttgttttgttttgtttttctgttttgtttgcaaaatggtaagggggtgtcgggggggatggggtgtattttgttgcaagtttgtgaggggaaaatgttttggtttgtttctactgacctgaatgtgttggatctacacgtgttgttttgtttttgctttattgatgcacggatgcttttgaacagtagagcgaaatgctagacatggagaatctgctctgtttgtcctttatacatttctgtagttaacagaacactgtaatgtgccttggagcttagtaacttgtaataaattcaattgatattaactgcgctgagtcagcaattttgtctttctagggctaaggccatgcaactccgacgtaggcgacaccctccctacctccagtatagaacgaaaatcctagtgcttttgaaagccctgggagctggcctgtgggaaaggccctgtgctgccttgctgcccctccccctcggtaccaggctatttaaattcacctcttggggaggcgacagttgctgactaagcgatttcggtttactcttcagcatctctattttcccccggatgcgggcccagctgcaaatggcattgtcaagaatgctttctggtgcctcgccctgtggcggtgaacataggctgacacccagtgcagctggtgacttgacaagtgggcgaaaaagtctaggagaaaagctaggat

SEQ ID NO: 15706 - DNA, 1001 bp, Homo sapiens
acaagaggtcttcggaaagaggtggctgctgggcctgctggtccccatgttcaatgtcggaagtgagagctccaagcagcaggataagtagtagacactcccgtcatttatctctctgtctctgtcttgactcctcctgagcataaaaccatggcagccttgtctccacccatgactcactacaaccttgtgctggtaaggtcctagcatcttcccctcaccttccacccatgagaacagcgtgagctggtggatcatgacaaggaggaaaaatgtccccccaggcatttctaggctcctcacgagccagccaggtggctgctagctgttaggctgcctctgctttctttccgtccccttgggatccctgctttccccctcttcctggctcatccattctccaccgtgtctcattcatcactgctgtctgctagagcccttcctctcagcccccatgttgggagaggggagtggattcttgctgctggtatgagactccctgggacctagaggctggcaaatgtttaaaatcaccacgtgtaagaggcagccaagtcagctctgccaactgctaggggagttgggaaagagtgggtgtgtgtccgcatcccctctgtaggaaaaagaacttagtagcttgctgctccctcaccaccccccaccaggttcaagaccctttttctgggagacagcaatcaatggcctgctttttccaaatgttattccctgtccaccctgccccatctggccggcccagcccagtccaggacctggctggatgcttcctgtccctggaactcttccagcctttctacttgatctccagcccccaggtctttgccagatgatgggaaggcaaggaagaagggacagggaaagataattactgataaatgaaggggatattcgactgtataaccatatggaagtgtgtgtgtgtgtgtgtgtgtgtgtgtgagagagagagagagagagatgggtggtggtgagaagtgttgtta

SEQ ID NO: 15707 - DNA, 1023 bp, Homo sapiens
gcagcaggaacatgcgcaacttcgtcctgttctgcctctacacctccctggcctgcctctactccatggtggccggcgtggcctacatctccgctgtcctttccatctccttcgcccaccccttggccttcctcacgctcctgcccacctccatcagccagttcttctccggtgagtgggccttggcgggcaggttgggctctacacaaagacctcccaccccaaaggttgccgggccccaaaccccaaccccaaaagttgccagatttagcaaataaaaatacagaccgtcccgctaaattaaaatttcagataaacaactcataattttttagtataattatgtcccagatattgtatgagatacactgagaaaatttgctattggctatctgaaatgcaaattaagcggacatgctgtattttattggtaacatccccccttgcccccatcattctcatccatcatgctgtccatatgctcacagagttgtggcatccaggtaatacacctgctctgtgccaggcaggactaggtgctggccattcctccatgtagccccatgaggtacaaccatgctatgacattcctctgcctggtccccagttctgcttacatgtcacccaaggactctgctctccagaggtctcaccaaccaattgcagtaatattgaacttgttgccagcccagcccagcaggaggctaagctctgtcctcctgcctattatgtttgacctcaccagcctgttctccagcctgctgatggctcagagcagagggaacgtgggtgggagaggcaggttttttgttttttttttttaagacagagtctcactccatcacacaggctgaagcgcagtggtgaaagcaatctctgcttactgtaacctctacctcccaggttcaagtgattctcttgcctcaacctcccgagtagctgggattacaggtgcgtgccaccacgccacactaatttttgtatttttagtagagatggtgttttactgtgttggccaggcgg

SEQ ID NO: 15708 - DNA, 1048 bp, Homo sapiens
ttattctggcttatggaaaacctgtgttctgcaggaataatgtttaagaatcactatctcaagccagatatgtgattatcactctacccacagcattgcagggaggtgtagcacttgttatttttcccctggtaagccattgtcaagtggacttccctggaagtgattatgtaagcagtactcagtacatatagttgacttatttcaccagattaaattttaaaaattcaaattttgtcatttttgcgcattgggaggtgataagttgacattaagcatctctgggtcacttcctttctgactctctgcttgtagctgtcactgtggcctgatgacatagctcttttgaacatgtgcctgtcagtcagaatatcattctgggcctgggtcaaattttaagactaaatctacgagtttcattttgtctttcattatctaagaagtagagtcagagaagaaaagggaagtaatgagagctttcttattcagccaacaaagagtcagggaggggagagagatgaaaacagtgagtccagactatagaaactgcaggggcagggctcttccgctggctgagtagtggcccgggacctggaggagaaggctgccttgcctggtgcagttacaggaatgagcccatccagatttcagccatagagaacaacttacaagtacatatgcctgtgatggttgcagatttttctttcctcttttagtttagcaacagagcaggatttctcagagtttaatgtagtgaataagattcccttggcttggtacagttctggctggagtccttgggtttgggaccaaactgtacaatttgaaggaattggtttccctcagcaactgccgcaggggtccagaatgattcattcctcattcccaggtccttcaaagggccgcagtgacgctggggccgtgcagctgtcccctttgtgtctgatgccctggatgcacttttgaccttggaggcacaacctctccaccatgtagaggcctgtaaactattcccagccccttgctgaactggattcataaggcactg

SEQ ID NO: 15709 - DNA, 1021 bp, Homo sapiens
tgcctggtaataaatggtagccattttcagcatcagcatttcatgagccttttcccatgttgctaaaaaaatgctctgaaacattttttatggctgtataatattctatcccaggacatactatcatgttaactatttttctattactagacagtcatactgtttccagattttttgtataaaacgtgagttaaattctaggacaggatatctgtggagctttttcgtttcatttggccacattatagaaaatataatagcatgaatttttcatttagaaagtttgaggcatgatcttaattacttttttttttcccaagatagagtcttgctctgttgcccaggctgtagtgcagtggcgcgatctcagctcactgcaacctctgcctcctaggttcaagcgattctcctgccttagcctcctgagtagttgggattacaggcgcgtaccatgcccggctaatttttgtatttttagtaaagacggggtttcaccgtgttggccaggctgatctcaaactcctgacctcaggtgatccgcccactctggcttcccaaagtgctgggattacaggcatgagccaccacacccggccttaattactttgaaaatgcacttaaatcctcattctgtttttgtgttggagtcagttatataaggcctcatggttcctccctctagaaggctggatggaacttttaggacaagatgcagaaagatacaaagaaacaaaaaggctcttgtgggacaaagcttctaaatgcagaaggaaggagagaatctcactcaccagtgctacatatgagccccattgggaaacatggcccctcaggttggtggctggggattctgaaattggcttaagcaacattggtttgaggttgattgtccttggccagctgtgctgatagtgatggtattctccctcctgcttcctcttccctccgcccccaccccccacccaggtcaccacctatttgcacaaggactacaacaacctgtggattatcaagaaacata

SEQ ID NO: 15710 - DNA, 1076 bp, Homo sapiens
tagagacagggtttcaccgtgttagccaggatagtctcgatctcctgacctcatgatccacctgcctcggcctcccaaagtgctgggattacaggcatgagccaccgcgcccagcctgtatcctcctctttaagttggggaaaatgagtagtacctctctccatcaaagggcagttgtgaggattaaatgagataacaatgtgaagtgcttatgaaagattagccatgtgagtatcatctgaatgagtgaacgatgctgtgtccatgttaaggagtgtttgtgtggctgcagtggatggtgcctgagagggagaagcaggatgctgaagaggttggtggggccatattggggagaggcctgtgttatagtagatttgactttgctccatagacattagggaggcaatcaaaattattatgattatgattagatctctagtttagaaaggtaactttagtggaaatgtgatagctcacaaggaaccagtttggaggcaataattatgacaaaggacagtgaacagaggcaaaaagcatggaatctttactttgcaaagatttgttctttgcaaaaagttgtctctctccaaatgctttatttttatttcccttttagttgctagaaagtgactcagtatgtattagtgcaatttcatgctgctgataaagacatacctgagactgggcaatttacaaaagaaagagatttaattggacttaaagttccacatggctggggaggcctcacaaccccggtggaaggcaaggaggagcaagtcacattttatgtggatggcggcaggcaaagagagagcttgtgcagagaaaatcccattttaaaaatggttttaaaaaccatcagatctctggccaggtgcggtggcttatgccgaggtgggcggatcactttaggtcaggagtttgagaccagcctggccaacatggtgaaaccccatctctactaaaaatacaaaaaaattactcgggcttgatggcacgtgccagtaatcccagccactcaggagactgaggcaggagaatcacttgaaccggggaggtggaggttgcagtgaact

SEQ ID NO: 15711 - DNA, 1069 bp, Homo sapiens
tatgcggggagctggaggtactgagctctgttgggcttggctgttaaggaatattcactctggcagaggaggcagccagagagccagagaatcatagtgtagagtactaggtgctatacgaatagcaaaatggttaagagcactaacattgacccaattgcctgggttaaaactgtgccccactgcctgctagctgtattactccacctctctgtatcttgatttcctcctgtgcaaaaagaggacctagtgacaggatcctctgtgtgctgtagtgacggctagaagagttaatatatgcatcgtacttggaatgatgcgtgacgcatacatagtaagcactcggtaaatgctgccttcgacaagggcagaggtgacacaaaggagagggctgcctgagtccaggggcacctaaggattctccttttactcctgcctgactggtcacttgtgaagaaggagcccccacttaccctgagccctgtacttagccaggagcactatggacactctcccctgaagaataccctgcgccctcagacagtgcttttcctgccgttccaggggtttcacaggccgcctcctccatggagccacgccatggtcccttgaggctaagagcccccaagacagggcacagcacagccgctccaagtctgagaactgccctgtcccctgctgcgcttgcgtttggctttggttccagctgccaaattgaactccgtcttgttgattttcaggcccttctctgccccctggtggttctggctcagcctgactggcgttagtcttgctggtgctttaggggtcaagtttgttggcctctttatcatccttcaagtggggctgaacaccattgcagacctttggtacctgttcggagacctcagtctttcattggtgagcacccaagggtttgctgtggaaatgtttttgctccctgatgttgctgagtaggagctggtggccttctctgtctctactgcaggtggcagagtggctgtgttctgggtcccaggtgggctggaccccccaacctccgcagacagcaggacatcagggagtgggc

SEQ ID NO: 15712 - DNA, 1074 bp, Homo sapiens
aaattagctgggtgtggtggcacgtgcctgtagtcccagctactagggaggctgaggccgaagaatctcttgaacccaggaggcggaggttgcagtgagccgagaccatgccactgcactccaacttgggtgacagagtgagactccgtctcaaaaataaataaataaataaataaataataaaaaggacaatccagtaataaaattggcaagagacttggagaggcacttcacaaaagaagatttttaaatggccaagaaatacgagtcattggtgaaatacaaactaaattagcatacatctaccagaatggccccccaaaaaaattttaacatgaccaagtgtcagagaaggtccagagtaatgaaatgatgctacaatgctggtagcattatatttggtacaacccctttagaaaatagttcggcattatctactgaaatttaacattcaaatttctatgacttaaccgtttccattctgacatttatatccaacataaatgtatgcactgtagccaagacacaagaatattcatagcagcattattcataatagccccaaactggagttaacctaagtatcatcaacaatagatagatagctcatggtggattcatggaataacgtacagcaatgacagtgaacaaactggctgggtgcggtggcccatgcctgtaatcccagtactctgggaggctgaggaaggcggatcacctgagctcaggattttgagaccaacctggccaacatggtgaaaccccgtctctactaaaaatacaaaaattagttgggcgtggtggtgggcgcctgtagtcccagctgctcaggaggctgaggcaggagaatcgcttgaagcgaggaggtggaggttgcagtgagccgagattgcaccattgcactccagcctgggcaacaagagtgagattctgtctcagaaaaaaaaaaaaagaaagaaagttaacaaacctacctacaattacatgggtgcattttttgatgcagattttgatggatgcatcaatcaaaataatgactgaaataagcaagacccaaaagaaaacattcttttt

SEQ ID NO: 15713 - DNA, 1717 bp, Homo sapiens
acatctgagtgttgggtacaaagctgctccgtagagtgatgtgcactcctggtgggtgaggggcaggggcagtggcagtgtgcaaagaattgattactccttgcagagcctgtggcttgcatttcctactgctttctacgtttgaaaattatgacagtctctggctaggtctgggtccagattaggatttaaactgataaaggaaactgttggtaaatcctctgctcagaaagcatttatcatgttcctatttaaggattaggtttattaatttaggcctcttagaagctaacccacttaaatattactcttctgaatgctagttctcttttattcttgatgtcctaagtcaattgaatctggcatctggggctagggtctgcctgtctacatattttttatttttttctgagaaattctgaacacatagatctctttcctaaactgacattttctattttgactgttttcatactataaccaggtaaagggacttctttcagagagctttatactgcctgaccaaagaacaaatctgaaaatcaccattttaaagttattttttcagttgaaccaaagtttaagtgaagaggacttttggcatattatacccaggatcagtttgtctttttgtatccatcaagtattacaggagaaggattgggaacagaatggaaaaacagtgtatgaaagtcatgttacaggccgagtgcggtggctcacacctgtaatcctagcactttgggaggctgaggcaggtggctcacttgaggtcaggaattcaagaccagcctggccaacatggtgaaaccccgtctctactaaaaagacaaaaaattagctgggcgtggtggcgggcacctataatcccacctacttggtaggctgaggcaggagaatcgcttgaacccaggaggcggaggttgcagtgagacgagattgtgccactgcactctagcctgggtgacagagcaaaactgtgtctcaaaaaaaaaagtcatgttacacatttaagtttttgaaattgctccttttatcggtaaagattctcaatccaaattctcctgggtgtgttgtcatcagctgtgatatgtttgtgcacattacgtatagcagaggatgtaagcaatattattgtttgtgaagttttgtttttaatgtcttgagtatgagttatgtttagtcactgtcagcatctgagaactttaataagcccttgagatattccaaagttttattttacttttttaaagaacagaaaaagatgaatgaaagaaccaaggagagatgcagagactatatttagcatgtataggttaaagtaagaaggaggttgtggtaactaaataggagtcctataaaatcaaatacattgtcaaccttttctgcacatctagtttcctaccatagaatcccactggaataccacatagcttttgcactgcagttactatttactaatgtaaacgtagggtttgtaaaagtcacaaacttataagcaatgaacttacctgctagtctttttattttggcttgcatgaagtcactgcaaattcaaatgtcagtaccggcatttaaaatatatctatatcactttgttggtacaaagttatttcaagataagtgtaattttgttacaagtttattttgaagagacaaatctcctgtgatctatgcaggacctctgtactttctaaagaacaaaatgttatgtaga

SEQ ID NO: 15714 - DNA, 1050 bp, Homo sapiens
ctacagtgagcaaacagtgtcacctataataaatttaaaacttttttattgtggtaaatatatataacaaaattaatcatttttcggtacaattcagtggcattacatacatccagtgctgtgcaaccatcaccactatccatttatagaaccttttcatcatctcagaaaataatttttaatattctagttcaagtttggaagcagtagtcttgacctactgcatttcaaaatctaggctctagaaatacttgctccaccaaaattgagttgtgtctccacagtttttagcctttttgctggtttcccctcaaaccaactttttcttttgtgtttcctatctcaggtaatggcatcactattcatgaagttgtccaaacaagaaatacctatcatcgtttctctcctttatcccctgtatttagtcaccagtgcctatggatcatgcttccttaatatctttgaacctgtctacttctccatatctcattgttatttacttgacttagatttctgtccactttcacctggttttaatagccagccagtcataatagtagaggaatcagtcaagcaaaaatgctttggaagaattaaataagcaatgctgaacatcaggaattgtagatatccgtacagagagttccagtaaaattttatgagtccacgaccccttttctaagcagtctggtccatgttggtctcatacctcatatgcaggattcattcattcattaaatatttgtttcataccttgtttgtaacacttctgtctgccttctaaatgtatcctcagtccactttctaccacttgctactgtgttcatccaagtcaccatcttccctcctgtggtgtctctgcttccctctttgcatctattctaaatatagatagctctcagtgtgatcctgatgggagatcatatctatcttctgtttaagaaccctccccaaaggccttctcatcccgcctaaagtcagtgaagacctgtgggcccttgggatctatctgtctgttgacttcctctatcccactcttcccctcactcg

SEQ ID NO: 15715 - DNA, 1042 bp, Homo sapiens
ttagctggaaagagaagaaaataaaattttgtgcggaggggaagggaagggagggttctttttaagatagagttgaatgccaagagtggtaagtaaagaatttgacttgctgaagagaaatctgacttctctttattttctcccccagtttcgctttttcaattttaacacttttttgaaactttaatttagacttacaaaaagagttacaaaagagtacagagagttcctgtataccattcattcagcttccctttatgttaacatcttgcataacagtggaactgtttcttacagctaagaaattaactgtgacacaatactataactaaagtacaggacgtatttggttttcaccagtttttccgcttcaggatccaggtgaggatccacattgtctttagctgttgtagctcctcagtctcctccaatctgggatagttcctgtttttctttgtctttcatgaccttaatacttctgaagggtactggtcccttattttgtagaatgtctccaatttgggtctgtctgttgtgttgttatggtttgattgagtccgtgcgttattgagaaagctaccacagaagtgataccattctcagtgaatcatgcgagagactatgtggttttgatacatattactgatgatgtaaatcttaatcgcttgtctcaggtgtcagcggggattttctactaccaacttactgcttttctctttgtaatcaccatatattgtggcagagatactttgggactgtatatagcattttggattaaactttcacccactaactttagtatgcatctgtgatcttgcctgtggcagttattaccttggtgttcttttttttttttttttttttttttttgagatggagttttgctcttgttgccctggctggagtgcagtggcgccatctcagctcattgcaacctctgcttcctgggttcaagcaattctcctgcctcagcctcctgagtagctgggattacaggcacccaccaccatgcccggctaattttttgtatttcttagtagag

SEQ ID NO: 15716 - DNA, 1028 bp, Homo sapiens
caaaataattagccagtcatcatggcacgtgcctgtagtcccagctactcgggaggctgaggcaggagaatcacttgaacctgggaggtggaggttgcagtgagcagagatcacgcccctgcagtccactccagcttgggtgacagagcgaggctacgtctcaaaaaaaaaacttttttttttttgaggcagagttttgctcttgtcgcccaggctggagtgcaatagcacaatctctgcacactgcatcctctgcctcccgggttcaagcaattcttctgcctcagtctccctagtagctgggactacaggcgcccgccagcacacctggctaatttttgtatttttagtagagacagggtttcaccatgttgggcaggctggtcttgaactcctgaccttgtgatccacccacctcggcctctcaaagtgctgggattacaggcgtgagccactgcgcccagccaaaaaaaaaaaaaaaacttttttttttttgagacggagtgcactccaggctggagtgcagtggcgcaatctcggctcactgcaacctccgcttcccgggttcaagtgattctcctgcctcagcctcctgagtagctgggactacaggcacgtgccatgatgcctggctaattattttgttttctagtagagatggggtttcaccacgttggccaggctggaagaggaattttctctgcacttcctcttattttaaaatatgtctggctaaggtggatccactcactactctctgcttattattttggtagagcctcttgcctgttgctctttttttgcaccccatgtctggtttttcctggaagggtgccaaggcctcagacatagatgtcctgctgaacaggacagactcagtgagacttggctttccagtgttctcattttttcagttctttggtcactaagataagctggtcttaccccatttctcttttcccttaatctaaaatattggtttattagagtaaaaaaaaaaaaaaaaagaccctaccctaggtggatcc

SEQ ID NO: 15717 - DNA, 1055 bp, Homo sapiens
atccaagcactttgggtggctgaggtgggaagatcgcttgagctcaggagttccagagcagcctggggcaacatagtgaaaccccatctctacaaaaaatagaaaaattagccagatgtggtggtgcatgcctgtggttccagctactcaggaggctggggagggaggatcgcttgagcctgggaggcagaggttgcagtgagccaagatcgcaccactgcagtccaactgggtgatagaacaagatcttgtctcaaaaaaaaaagatatttgcctgctctataatgactaggaaggagggaggtgggaaagaatttcctacagttgacagtttcgtgttttcttgagctacgatttcttctttcctatcctctatgctttagaagatgccttgtaactagcagtgcagtgcctcttgtctcaattagacatttgccaccaagggagtatactgattataagaataaaatgaaaaaaaaatattggtatagaccattttctttgcctactaaccagttactttgtctgttttttttttttttttgtaatggtcttacactgtcacctaggctggagtgcagtggcacaatcactatagcctcgacctccccagactcaggtgatcctcacacctcagcctcacagtaactagttactttctaaaagctccacagtttcagccaacccaacttagatacattaactgctccaaatgatgacagatttgttttaaaaatatttgtgatataattctgactttcagcaatacagactcagtaggaaactagatattttttgaggggaaatgccatgtgattttctttggattagacagcctgagtttgaatccttcctccggtaatgatagtgcctacctcataaggcagttgtgaaaattaagtgatcagtgcctgtaaagtgatctcaatggtgtctggctattctaagcagttaaatgcattatcacaataaatgttagcttttttttttttttttttttttggtgataatatttttactgttgatattgttattccccaagacctcaaagttaa

SEQ ID NO: 15718 - DNA, 1034 bp, Homo sapiens
ctcccaagtagctgggactacaggcacccgccaccacgcccagctaacttttttgtgtttttagtagagatggggtttcaccatgttggtcaggctggtcttgaactcctgacctcaggtgatccacctgccttgacctcccagagtgctgggattacaggcgtgagccaccacgcccggcctctagtacctatttttaaggccatgattctctgttgctctaggctttctccccttaacagattgttcatgccacaaacttaaccccacttgagttttaaattgtctaaactgctgtacttgctttctgaggctttctaggatttactgcttaattaagccacatcttttgggtgggtgtcccattatatccttggagagtttattctgtctctcttgccattataagctgtgtttattttatttatttattttttacttactttcccctataagctgtatttaatagaaatataatgtccaaaatacaggagagaacagtctcttcttactctgagttgatcaaaaggattgtgtttacttctggatctgacttaatctgaaggaagctgagtatactacaacctgtcctcacacttgtgtgaggacacatcctcttgaacaagaggataataggcctggaaaccagaaacagaatctagggaagaaaagacttatgggggaacttgacagcattaaacattgaaaaattgtcctgcacaagaagtggtgggaagcagtgcacaccagtggttaaggcgtaggttctggtgccaggttacctgggttcatatcctggctctgccatctactaactgtaagactttgggcaagtttttaaattctcttgccctcagtttcatcatatgtaaaatgtatataaaaatagtacctacttcataaggttcttatgaggattaaatgttaatgtatatgttaactgcttagatcagtgcatttatcaagcacttaaaaatgatttggggttgctctaggtgtcagaacccaagaccaatgactgaaaattatagaga

SEQ ID NO: 15719 - DNA, 1014 bp, Homo sapiens
ctactacactccagcctgggtgacagagtgagatgctgtctctttttaaaaaattatatatatacacacgtgtacacgtatgcacacatataatacatattacagtgaagtacttttcaactgttcacacagaggatggggaggcacgtgagagggatgaaatccggcatgacaggcgaaaagagagacagcatgaccggaatctttccagggcagctcctgataagaggtaggtgttatttaagatgtgtaccaatcatggtggccgggcgcagtggttcacccctgtaatcccagcactttgggaggccaatgcgggcggatcacgaggtcaggagatcgagaccatcctggctaacacgatgaaaccctgtgtctactaaaagtacaaaaaattagccgggcatggtcgtggcaggcgcctgtagtcccagctacttggcaggctgaggcaggagaatggcgtgaacccgggaggtggagcttgcagtgagccgagatcacgccactgcattccagcctgggcgacagagcgagactccatctcacaaaaaaaaaaaaaaaaaaaaaagatatgtaccaatcatgaagagtggcctttttgtaccttttagagcagagttttagtccactaagatcagttttgcttctctccctttcttctttagtttgataacttaataaattagcacttaattttcttgtacttaactactttgtcttagctctagttgactgtctttggaattaatcttccatcacttaagtcagaattgagaatgatgggaatatagaaaacggaatcgagatcagatttttgaaaaggatgtagtagtaaatttggactgttatagtccgttctttttctacctcaaatggtgagataaatggattatgtgcctctttagacaggaaataagctttcatgcttttattgagatcattttatatgcatagtactgcatctagtacaattgaggagaagagcagttttgaaagaagtagaaaatcagc

SEQ ID NO: 15720 - DNA, 1024 bp, Homo sapiens
aaggaaagctgctggcgttgcccatttgtagcggggcctcatgaagtttcctacctggttacttatggggtttccgtttttttcaaattttgacctgcattgatttgcctaatgtttcccctttttacattgggggcatatagaagggggttctttcctgagttactttggtctctactatgggggcattccttgttcatatgacctggctttccgcataggaaataattttggcttctctccctttttactttaggagcccttaatgccatagccaatattttggctttgtgtgtctcagttcccaccagctgacatggttgtataagttccctgactgtggctgcctttcctctgattgcctgcattgcttgctggcgatccacattagcattttcaaaagccagttgcaccaataagatatcagtggcctgggcgtgactaatttgtctcttatttgctttggtttaccgattgataaactcaacacatggctcctgaggcccctgtcgaacatttataaaagatccctgttgaactccgcttttgggaattcagtcccaagccctgagagcacacaaagacacttgagcataggcctggggatcaaaatctagttgttgttgtacatcagcatggggacccctcccctggagcatagcagctgttatgtcttgcctgtctgcctgattctggttggcttgttgttcacacaactcatcatattctgccttccaaaggaggtattggctagggtccaaagttgttttagctagcattgaccagtcccatggggtcatacggaagttgtctgccaagtccttaattattccttttgtaaatgggctagtggctccattttctttaatgctttttcttagctctttataagcgttaaaagaaatgggttcatgttgctgattgccttgtcagtcttgcactaccaggcaggctgaaagctccccttctaatgccgcttgcttaaggcaaggtcccatagctggagtgtgtctcttgtcttttt

SEQ ID NO: 15721 - DNA, 1026 bp, Homo sapiens
gaaaaagagcacacagggtgggctccagagtggacttaattagggctgttgcaaggttctgcaataaatagagtaggcatagtcgctaacaatattgatgggctgagccgaaaaagtttccaaggccaatatcagggccccagtctcagctctttgagtgctagtaaatccagatcaagtgagtgaattatgtagtctccaaaagactgccgcctttccatgtttaccagatccatcagtaaacagtgttaaagcattaggtatgggggagtgaactgtttgtgtaggcaagatcacaggagtacaagataagaaatgaaggagtttgtcagcgggaaggacatgctctatttgttctgtgtaatcagagagtgctatttgcaagtccatcgataagggcaatactgcttctaactgctttttacttaaaggaatcctgatgatattaggatcataacctagcaactgactgcatcatttgcagcctgaatagatgactttactaagtaactggatatagggaactagtgttttagtcctggtatgtgagcaaaaacaaaaaaaccattctagaaagtgcagtcctggggtctgtggttaaccctgtaggggagtgtttggtgggaaagataaacatttgaattgagtagcctggatctatgctatctaggtgcctctgagagatggtttattctatttcctcaatttcccttttgctgcaggggttaaatatctgggagaatctagggctgtattgccctttaagatagaaaacaggttttgcagcttatccgtagatatacccagagtagggcagagctagttgatatcacctagtaatttctgatcatcatttaaggtgtgtaagtttctaatatttaatttaacattttgagatcttactgactgggaagttagtatgtacccacgatatttccaaggagaagacatctatactttctcgggtgcaatgattaaaccttttagctatgtattctttatgacagaggtaaatacatttaaaag

SEQ ID NO: 15722 - DNA, 1037 bp, Homo sapiens
ttcaattctaggaatttatgttaaatacataaaaatatggacaaaagtttttgtaccaagatgtttatcaaatgattatttataacagagaatactaggaatcaattgtaaattttgaacaataggaaattagtaaaataaaatactatataaccctaataatgataatgatgatcatgatagagaaaattcccatgaaaaaataggaaacgaaatcatcaacgaaggtgatctccatacaaatagatatttataagtaagacctgggaaaatgtatccttaaattatgctaataagtttttattttaaaatatttgttgaataatttttctcctgaatttttccatagtttttaaatttgctagaatgaaatatgtcagtgccatattttgactatcatatgccaagtaactggcttcatcattaaaaatttaaattaggccaggcgcggtggctcacgcctgtaatcccagcactttggggggccaaggcaggtggatcacctgaggtcaggagttcgagaccagcctggtcaacgtggcgaaaccctgtctctactaaaaatacaaaaattagccaggcatggtggcacatgcctgtaatcccagctactagcgggggctgaggcaggaggatcgcttgaacctgggaggcagaggttgcagtgagccaagatcgtgccactgcactccagcctgggcaacagagcgagactctgtctcaaaaataaacaaaaaaaattaaattattatttttccctaaatagaaaatatataaccaatgctttgatgccagttgacttttttttagaaatttaaaaccatgccttttaggaagaatgaatagtatttaaatatctttgtttaattcatccttcctctggtaggcgcattttgaagccaccattacaccatctgtttcaacaagatactcaaacctgtgtctctactcctgtcctctcactgtctgtctcagttgtggcgttagtgagtaaaagtgtgtgtttgctttccccttattggcctctaatcatcaaa

SEQ ID NO: 15723 - DNA, 1034 bp, Homo sapiens
tgatagtttcaatttgaaatgattataaataaaaccataaaaattaaaatgctcagtaatagtgctaacgatcaaatattatgaagtcctttgatttcatatgacattttaagggacagattttaatgaacttggtagactcttcaactgataaagtactttatagttcataaaatcaaatatgctgaaagctatctcaagatcatttattattctctcccaagtcagtgcttaaaacttagaaaaatgttgttggtccatatttggttgagttgttattaacagtacagaaggtgttgcatgtagagcatatatcatggtgctatcaatatgcaaatgtttgaaatttcaccattccattaggagtatttacagtagattgattttagcagtgcagtagttataatacctgaaaagaagatcaccttttcatcataataagaaacttggtttagcttgccaccaattatctatctgcttaggtcacagtcacatgcccatttttccccgtcttcctcaacttttccctctctttctttaatagcaggtaagctccttggattagaaactgcattttatttgcaaatgcgttgccagggtctgtcagaaatgtttgatatatagtagacaatcaataaacatttgtagaatgaaagaatgactgttaaactgcatgtatctcaacctcacataagactgtgctcaggaataaatagcattagtccagtagttgtgagaaattccccagaagcacggcaatgtattctttatttcctagaattcctggtcagtgctatatgctatttggtgtttcacagaagctctaaccatcttcactaaatgttaatgtaaattttcctgggatggaaccaccttcagccaaaatagaatgggttgattccctaaataaagctaagtgattacatgggaaaaaactttgattgagagcccctgctcatgggccaaggatgggactcagcagtggaaatttattgggctcaatatgaggcattgtgttgacaccaaggaagaaa

SEQ ID NO: 15724 - DNA, 1733 bp, Homo sapiens
gaatatcattctcattattttaggaggagaaaggaagcattttagttgtaggacctgtaatctaaatgttgtcataagtatttttgaacacattatttggtattattagaaattttattagaaatgaactgaatccttttcaatcttgttaatttctaacagtgggtttacagattttgtatatatacatgtatatgaatatttcatatactatataatagattttaattacagatttatatataatattgtattatataaatctataataaaatatataaaaatatgtacaatcttgaatatatatatttaagtgactgatttttctgagacattccagaagctctgcctgaaggatattaaatatcattagtgccatgctgtttttcagatgacccataatcatttttaagttgtctatcagttggctttgaaaaatagtctggaatctcccagttgaagggttcgattttctttttagtactgttttaggggtggagggacaggtgttagattttgtttttgtcacctcaatagtgcttaggcaaaaacatttgaaatgagcagtaaggggaaaataatctcttccccagccattatttatttcagctacttatggagtagcctatggcaacacagtctttcgaggaaaaaaatagaatataccttcttggttcttttggaacaagtgtaataaatattaatattagggtgttataatataaagaatgccagtgtagagttgtcaggcacaactgttggagataaaccgggcaggaaaagccaccaaagaatgcgactgtcattagcaaataaattaccctcctggaagctggcaagatagtacatgaacctctcaatacccagtagatggctaatcctcctggtaaggaaaccgtgtgagaaactgggctattgatcgaccaggtggataatttctgtggttttgctgtcagtcttttctgccgaactgtagcatgcccataaccagtacttttagagattgcaggtagaaatgcagggtggggcagccacgagtccattttagagttccctcggaattgctttagaaggatgagggtgacagggaatgctctgctctctcactggatctcagaaagaactgaagcaattcatttccccagaaattcccattttcttgggagatactaaagtacatttttagaaatctcaatttgaataaattgataaattaggattaactgtttaaggtttcattaaactagaaagtaatacagtccctactcatccctaagatgactcgtgagagttataacagaatttttattattctggaaaccaaaatgtaatgcatacccacgtattcttctcaaggtgcattcctcaaagcttaggcaaataactgcgtatctctatgtcttcttctgaaatgtgatttaaaaataattgttctaagcaatggcataaacaaaacaaaatacagtgttgtggggatggaaggttgggcgaccctttgccactttcaggcagaggtaacttaacagctcattaaaatctctattttctcgaaaggtgaacaggcttaccaaccttaaatttggtacaaagttacaccagaaagaacgcattagcagtctgccttggggtcaaacaggttctcagccaattaggtttacacccttcaatttactacatcaagagacctcatgagagcagggacccactctcagtaaaaaggattccactgaaat

SEQ ID NO: 15725 - DNA, 1044 bp, Homo sapiens
gcaggaagccaaatcagcctctatgctacttttgataggaaattttattccttggtatagcataataggaactgcagcattaggaaatgaaggcagtatcctttcatagtcatttccctcaaaacaggactgatgaatgaagatgaattcatggaatctacattttcaagtgaaagtcaaaagtattctgaccccatgggtgtcatctactaatgaccaaccaattaacacataaatagagcttaaggttgccttgtacagcctctcaattcagtacaggtttattcacatttgttgggctggaaaatggtgttagaaagattccactcgaattttagttgatatttctgtgatatgagcaatggatgtgaagttggcatctgacagaagttctctcttcttttcacattgggctaacttacaaatgggtaactcaagtgtctgtctttattaggggaaacataatcagttatattcccatgatagaaccaattcacttaatgtcaggttggggactaagaacagtaaatactttggacatttagagttcttcatgggcctggagctacaaggcaagactggagagtgatgtcatgagctggtttgagtgctttacgggtaaagatgtttgcttttggcaaatgaaagataggccacataaagtccaaagagcaagagaagtgttctgtgattggggattcttctacctgatggtatacccattaagagaaaattgtataattgatctgaaaatgcaaaggaagcatagtttatacatccagtaaaagtggtacatgttagcttcagttttgtacagattagattattttaacatcttgtactatattcaggtataaaaaaaaaaaaagagcattggttagtccagtctggggctaggaagaatctcaagtgtatacttgacctgcctatctctgtgaaactaatatcagcaatgcttgttgttataaaaagcatagctctttgtacactaaatgtgtatattgagaaagtcttttttaggcattgtggttgtgtgttgtgttt

SEQ ID NO: 15726 - DNA, 1042 bp, Homo sapiens
tatttagaggagataacacgatatttgactttcaaaggtttagtagaaggtatctgggtgaacaaagacactcaggaaagaaagagcagcactatgaaaatagagtctcataaagcaggctacctgggtgggacagggttttttatggttggaggtaggacatgagagcagaaattaggcaaattatattctgaaaccagatctacagagaccctagatgttaaaatgaaaagttaaaggatatattaatagtaatatttgagatgtagccatagaaggggaattctcaaacgacactgagaagaaatgataaaaaagaataggagggacttctagagagtgttgtcacatgagccaaaggaagggggtaagcctggcgtataggaatgtagtcagcagtatcaaatgctgcagagatcccaaataagacacaaatagaagagtgtccactggcttcaacaatatggaagttatgtaatgataatggtaatataattctgtgaaacaaaatgagctgtaatacttctaagtcattttatcatttggaagtaggtgccctttttttcattcttttttaaccacctcaatttttttcttccaattttatgtatattttttgtatcttgcttgttaatttttatatgtcattctccttgtccttgactctttcccctctgttatttaaaaatctagtcttgtcaaataagaaaaagataattttattctgcaaaattatgcataaaatatttttgtaatcacctattctttattaaatggtatttatctttttacataaatcattaaatgtcttcctttacaatttccttattatggtgagtaaatagacatatttatatttccatataacctgcccatcataaagaactctgtttcctgaaagccctatttgctgtcttctgccccttgtttcactctagtcttatctcttggtagcttgctatcttaattcataatgagtcttcatcaaaattagaatcaaagttagaatttacatttagaaatataaacagcatatgtacat

SEQ ID NO: 15727 - DNA, 1110 bp, Homo sapiens
tggactgcagtggcgcaatctcggctcactgcaagctccgcttcccgggttcacgccattctcctgcctcagcctcccgagtagctgggactacaggcgcccgccaccgcgcccggctaattttttgtatttttagtagagacggggtttcaccttgttagccaggatggtctcgatctcctgacctcatgatccacccgcctcggcctcccaaagtgctgggattacaggcgtgagccaccgcgcccggccctgtctcactcttaataaggacaattgtgattacatttagggatctcctgaataacccatgctaattttttcatctcaagatccttaaaatctgcaaagtctcttttgccttgtaaagttatgtattcacatattccaggaattagaacctgactatctttggggctgattattcaatataccagtgttaccatttagtattttatgactttttaaagagtaatacaggctcacttgatattggcatgaatgagagaactaatctgatatggtaaaaatttcttctgtacaagagtaacaaaaagaaagaagaaagagagaaagaaaggaaagaaagagaaaaaagaaagaagggagaaaaaagaaataaggaagaaaaaagaaaaagaggaaagaaggaaaagagaggaaggagagggaaagaaagagaaatgaaggaaggaaggaaggaaaaggggaaggggaaggagaggacggaagaaagaaagattataggaataaatttaaccaaggagatgaaagatctcgataacaaaactacaaaacactgacgaaagaaattgaagaggacacaaaaaatggaatgacatcccaagctcatggattgcaagaattgatatttttaaatgaccttaccacccaaagcaatctacagatgcagtgcaacacctattaaaatactaatgatattcttcataaaaatagaaaaaaaatcctgaaattcatatagaggcatgaacaacccaaaaacctcaaatagccaaagcattactgagcaagaagaacaaagctcgaggcataacactccctgtcttcaaaatataccacaaagctacattaaccaaaataatgtgatat

SEQ ID NO: 15728 - DNA, 1048 bp, Homo sapiens
ccactatttttgttgtttttattcttaagagggagacttcagtttaggctctatcgcaatcagaactgtatctccagttaaaaagattcattacctaagagcaacttcctgcttccactgtggttgccaggacctcctgtatctttaaagtactcttgaagtatattgatgatggctttaagatctaggggtgatccagcaatgaaattaatagtacaacaaaccagtagatttttttagttttaaacattcaaataatgccatggcattgttgaaaatggagcagaagaggaggaaagatggatgctgttgatttttctgtgggggggagcacgttttattttaaactattcctttcggaaagcttactagttccattgcttaatcccatatttctatttcattgagtagccacgcccagcttcaagcaaatgaacttttattcagcaatgacgtcttcagtgacgctgggttactatgtagcactgtattggcttttatgggattcctctgctacatgtgttgaagggtctgtggaaagacctgtgtaaggcagtagataagaatatgaattttgtttttatgacaaagcagtgactcggctaatgctattgagtagaatttttttggagtaaaattggtagtgtagataaaatattgctgaatgtctcagggtgtatgtgtaggaagaatgtgctgaagagacaggatagccaaatggctaagatagccaaatcagtgtagcacttgctatgtgactttgagaatgttacatattagtaacatttctaaccctcagtttcctctcatgcataaaacatggaaaataactttcaataccttataagactattgtgagaattggctgtgcttagcatagtacctgaaaatcatatgtaatcaatgttgtcattgaagcttttcactcaacaaggtaatgatctggtagttcttttgagttgctgtttagcatgcgtctgtctatacccaaatatgatgtaggctgtatttatattagttataaactcttccagatttatcactgcag

SEQ ID NO: 15729 - DNA, 1027 bp, Homo sapiens
attgtgtggttttgagagattttctttgtattgatttctatttttattccactatggtcagagagtatggttgatataattttaatctttttgaatgtattgagactttctttagggctgagcttatggtcagtgttggagtgtgtttcatgtgcagaagagaggaatgtatattgtgtgtttataggtgtattattctgtagatgtctgttaagtctaattggtagtgttgaatttaagtctagaatttgttagttttttgctttgatgatctgtctaatgctgtcagcatgttgtggaagtccaccactattattgtgtggctatcttagtcttttcttaggtctagaaatatttgttttattaatcttgatgcttcaatgttgggtggtgtgtatatatatataggataggtaagtcttcttgttggatggagccctttgtctttatgtaccatccttctttgtcattttaacattgttggtttaaagtctctttcatctaatataagaattgtgatccctgctctcttttgttttccatttgcaaaataatattatttctccagtcctttattttgtgctcaggggtgttgttacttgtgagatgggtctgttgaaaagagcagatggatggtcctgtccagcttgccaccctgtgcctttaaagttggacatttagatcacttatattcaaggttaatattgatatttgaggttttgatcctgttgtgaagttgttagctggatgctttgtagtttctattgtatggttgctttatagggtctgtgagctatgtacttaagtgagtgtgtttgtgtgtgtacgtgtgtgtttggtgggggtggtgggcaactagctatcattcttttgtttccatgtttagaactccctccaggttctcttgaaaggctggtctagtggtaacaaattcccttagcacttgattgtctggaaaagatattatttctcctttgcttatgaaacttagtttggcagaaaatgaaattgttttttggaatttatt

SEQ ID NO: 15730 - DNA, 1118 bp, Homo sapiens
tttttgtattaaatgtatcttgaaaagttgattataaaattcatttggaagaatgaaaaggcaagaatatccagcaaaatgctgaaaaagaagagaagtgaaaaggttaatgctaccagatattaaaacataatttaaaactggctgggtgcagtggctcatgcctgtaatcccaccactttgggagcctgaggcagatggatcacctgaggtcaggagttcgagaccagcctggccaacatagtgaaaccccatctgtactaaaaatacaaaattagctgggcatggtggcaggcacctgtaatcccagctactcgggaggctgagacaggagaatcacttgaacccgggaagcagagtttgcagtggctgaggtcatgccattgcacgtcagcctggatgacaagagcgaaactccgtctcaaaaaaaaaacaaaaaccctaaaaataatagtaataatataaaacttagagttttattttattattttatttatttatatttttatttttttattacaggcgtgagctaccacacccagcctaaaacttacaattttaaaaaaattgactagaaggactactagaacagaatagaaaatctccccaaataggcccaaatactgaaggaaatttagtttacaatgaagctagaatttgaaatcagtggagatggatataccttttaataaatgtgctgtaacaactggatatttatatggaaaaatataaaaattagatctattctgacaccattcatcagtataattttaaatgggccagaagtttaatgtaaaaactttaattattcaaatactataggaagcaaatgcttttataatgtggctacagattaaatttacatgactactagctaaaattcagaggcaatcagggagtaaagattgactaatttgattgcatagcagttttttaaaatggcaaaacattttcaccataagcaaaataaaaaacaaataatgggtgcagcacaccagcatggcacatggatacatatgtaactaacctgcacattgtgcacatgtaccctaaaacttaaagtataataataataaaataaaaaatggaaaataatcgaaaaaaaatggaaacagtat

SEQ ID NO: 15731 - DNA, 1064 bp, Homo sapiens
aaaacatttgtcaagcaaaaacccgtacacgcatgtacatagcagccaaatgtttacaacagccttaaggataaacaacccgaatgtccatcagctgacgaatggataaataaaatatggtatagtcatacagtggactattatttagcactaagaaatgcagtattaataaattttactacatggatgcaccttgaaaacttcatgcatatgaaaagtcaatcataagggaacacatattatgtggttctgtttatatgaaatgtcctgaacagttaaatctttagatactggtggttgtactatctatatcatcattaagaaatagtgattctggctggtagatgaaataaataactgcatgactacgagagtcaacgtgatgggtgatatgggatttctttttggggtaacaacatgttttaaaattgattgtggtgatggttgtacacctctgtgaatataccaaaagccatcaggttgtacactttaaatggataaattatatggtgtgtgaattttatctcaattaagttgttaaaaactaggagtctcatttaatttatttggttcactttgcatatttaattcattgaataatcctatcaacttaataaaatatattttgaatctgtcccattctgtaatcttggtttaaaatcatcatttgcccagacattaatgcagtggcctggtagctgctggtctctctgtctccactcttacattcatccagttatttatttcatctgccagcaagtgattattttttactgatgatgatacagaagatattaatgctaatgaaaaagtggttaacactcatttcacaatttcttttgccaagcattgttctaagcgctataacatgctaacttactcagtccttaccacaactctttgaggtaggtgctattactatccccattttatagatgaagaaactcaggtacagtgagattagtaattcatccaagatcacttaacatgtaagtggctgttacataaagcagatcaaggcacacttttgcttgaagatctctaatgacttttactccttttcc

SEQ ID NO: 15732 - DNA, 1050 bp, Homo sapiens
tatatagtatgatttcgttgcaatgaaatgccaatgattatgaacaaatacagaaattaattttcttattttttcttaaggtgcaattgtaagctcatattgaaataagagactgcttttattttccaagcctgctgtgactatggctattcaatgtgtacactccaaagaggtatatatctaagtaataccatctcttattccacatcagtgaggcctctgttgggtactcgttaatatttctgtctttgttcatgctgagtttagcttgacagttcaaggaaaagaaaatggctgcagtatgtactgtgtcttctgagatattccctaaacacaccaatcctcataaatatttcaccaaatgtgtttatcataatggtgtttgttaagggaggaaaggagaagtaaatgtaatttcaattaaatacctatcttcaagcaaatattcttcatgcaaaatttggtgataccttctcctgcaagaatggccataattaaaaaatcaaaaagaaaatagatgttggcacggatgtgatgaaaagagaacacttttatactgctggtgggaatgtaaactagtacaaccacaataaaaaacaatacggatattccctaaagaactagaagtagatttaccatttgatctagcagtctcactacggggcatctacccagagggaatttatgaagattatgaaattatatgaaaaaagactcttgcacatgcatgtttatagcagcacaatttgcaattgcaaaaatgtagaaccagcccaaatacccaccaatcaacgagtggataaggaaaatgtggtatatatatatatgtataccatagaatactactcaaccataaaaagcaatgaaataatggcattcacagcaaccctggatggtgttggagaccattattctaagtgaagtaactcaggaatggaaaagcaaacattgtatgttctcacttataagtgggagccaaactatgaggacacaaaggcataagaatgatacagtggactttggggacttggggggaagcatgggaggggg

SEQ ID NO: 15733 - DNA, 1074 bp, Homo sapiens
agataaagattttcaatatttccagtaatgtattcagttggcaacagaccagtattgattgagtggggagtttaaatatttaaagtttgtatttttcctcttccaaaatattgaggggagagacagtgtgtgtgtgtgtgtgtatgtgtgtgtattctgaaatatattctggaaaattcagaaatgttaaatatattatgtgaattcttagattttcttgtttcttcactttatagattatttgtgtagcaaagctgttcttccttaaacttgaatcatgagcacacttagggagatgagtaaggcaaagctccttgtgctaaaatagattcgatttgagcttttaggttactaagtagctttcattaaattcaaagcatatatttgctgtgtttttttttttttaaaaccttatattagagctaccttaaaacaaatgcagatggaaactgtgtacattttgactatttgttgttgcaaatatggatttctgggaggtcgtttctgctttgatggtgtgttgtaatgagtactatctgtcttttctataatgttgcatacaaaatgataatgcctgcctattccctccctcctctgccaaaagatgtccacaacctaacagggttggatactgggttgaatctgtgaatatgttaccttacatggcaaaagggattttatagctggaaaaaattaaggttctagagatgagattatcctgtattatctgggacacaatataatcacgtggtccttaaaagtgaaagagggaagcagagtaggattcaatatgagaaagactcagctgaagattgcttattgaagatggaagagggggaccatgaaccaagggatatgagcagcctctagatcctggaaaagacaaggaaatggattcttccccagagcctccagaaaggaaggtacccttgctaacacttgatttagcccagtaagacgtattgaacttctaacggacagaactgtaacataataaatttgcatcattttaaggcactaagtttgtgggaatttgttacagcatctatgaaaaactaatataccaataaaata

SEQ ID NO: 15734 - DNA, 1045 bp, Homo sapiens
agagttcaacaaaagtacaaattgagaaaaaacttttgtatttacaattataaagtcattgccaactttgaatacagttttactttagtaatatgacaaaaccagatgcaagggattttataaatgagttggcgtgaaggaagtcaaagcagctagcgcagatgaactattgaaatacaaggcaatgtttgcgtgaagtcatgtcgatgagtttgtgtctattgacaatcattgataagacaaaatggcccttttactattaaattaaagaaggataaatgagagagaattgtttccatgtaatcacatataaccctctttgaagtacattatgtagaacacgactgaggagaggaaacaaacagaaatgaaataaactgactttaattgaagctgtttgccatatggaactccacagaatcagcctccatatatcctagcaatgatagcacttgatagttgatttttccatcaaaatatttattgccaatacataaataaatgaatacatacataaaaaggcatataaatgaatgctagtttggaactggttgagtatttggggcaacaatttttctttttaaatccttaaattggggaactaaacttttggatactgtggtgaagaatttcatttatatatgtttatgtcagagaaaaatgtatttctaatcgactgttttctcttttgtaggttttttcatctggtcctgatatacattatgacccacatcgctggttagcagaaagcaaggtaattaatctttaaatcctaaagttattgtaatatttatgatctttaagccatcctatttggtttagctatttattttgttatgtaactgaacatatgaagctataatgcttaattgcaggggaagatatcactgcagtccacttagggaatctccatgtttcttattttaacattttaaagttaaatatgtaggcctagaaagagagaataaaggaaagtaaaactgttgaaatattaagaaccagattatagatatatgtgaacattgacaaaggaacacagaagaag

SEQ ID NO: 15735 - DNA, 1044 bp, Homo sapiens
ggaaaggtgttttccccacatcagtccagctttggagacattctgttagtgacgtatgccccttcccccaaaaacaacaatgaagtgttctgtgtgctaacaacatagcttaaaaaaaagtaaaattatgcagttttataaaacttgataaaaaatagtatttcaaactgtgcagtcaacagaagtttacacagttatcaaaaatgcacacacttcacttggcgtctccagcaccttcagttttatgtgcctggtctgttttggcatctccattttctacagggctattcccctccttgccagcatcagcttttccctttttccctttgggtactttctctcccttctttgcaggggcctttttacgcttgggttctggctttggaggagcaggtttagctgacaacctcatggatcttctgtgtgattcgtccttcaccttggctttatctcctttagcatccccttcagcctttctcttgggcatggtggcggcaggatgtaggtggtggacgcgggatgcagtggtgcacgggctttggttggttaggggttcgttctcgcctcttcttcacactgctcccattttgaagtgttaagatttgacttccctgttggattttggacttgcatggggccagtagcccctttgttttggccaatttctttcatttggaatggctgtatttactcaatgcctgtacccccattgtatctaggaagtaactaacttgcttttgcttttacgggcttatgggcggaagagacttgccttgtctcagatgaaactttggagtatggacttttgagtggactgttgggaaggcatgattggttttgaaatgtgaggacatgagatttggaggggccaggggcggaatgatatggtttggctctgtccccacccagatctcatcttggatccccatgtgttgtgggagggacctggtggaaggtatttgaatcacgggggcaggtctttcctgtgcttgtctcatgatcatgaataagtctcatgagatctgatggttttgtaaagcagag

SEQ ID NO: 15736 - DNA, 1153 bp, Homo sapiens
ggttattagacctacttaaccatggggctttctcttagaaagagcctgcaaaagcagtagtttttccagcctccgattcccatgcccaaatatacgtgcatatgtgtaagtgtgtaccagtctttgtacttaaattgtaaatgttgctctgtctttcacattctcttatctcaattttcagtataagagaaattaaagtcagtaccctatcttttttgtcgtctggagttggtgacaaaaattaatcacaactcaggagtggtcatgagctgtatcactggctttttatgtggtttaggaatactttgtgtttgaaaaatattaggataccttctcagtggaggtgttaatttaaattatggaatttaatgactggatgtatattcaggtttaataatgataatattgagattatataattgtttctattaggtgagttcacattgctcagcttctgtattatcccaataatgaggcttcctactcaaatgctcaaagtattggtgaaatttttgtaagtgttggatgtactgttaaattcagggaaggtaaatattgccccaggctttccaaatacacctccatatgttgcctaagctagaatttccacattgccagaaaatcttcaatggatgacaaattttgacaaagctattctaatatattttcttagtctgttttgtgttacactaaaggaatacctgaggctggatagtttacaaagaaaaaagctttatttagatcgcagttctgtaggctgtaccagaagcatggctctagcatctgctggaattctggggaggagttttgtgctccatccaaacaatgcaaaagaggtcaaatggggagtggggatgtgtaaagggggaccaaattcaagggatgtcctggcgttctgacaacccactcttgtctgaactaatcagttcccttgagaaccagtccagcctcaggagagcaagaactcactcctgctacaagaaggacaccaagccgttcatgagggacctgtctacgtgacccaaacacctcccagtaggccccatctcctaacagccatagtggggataaaatgtcaccatgagatttggtgaggacaaataaactatatccaagccttagcatatttttatttgtatgccattaagtttca

SEQ ID NO: 15737 - DNA, 1031 bp, Homo sapiens
tatatattgggatttaaagatatattttgaaataattatagatttataggatattgtaaaacaagatgcacagagaggtcccatgcacccaatttgcctcaatggtaacattttgcataattgccattcaatatcaaaaccaggaaattggtgttggtacaatctacttagtttatacagatttcaccagctttatatatataactcatttgtatttgtgtgtgtgtgtgtgtgtttgtgtgaagttcagtccatttttatcttgtatagattcttgttaccactaccaccgtcaggatacagaactgttctatcaccacaaggctccctcatgttctttcataggcacacctaccacatgtacagttattaaatgattaatatacagatagcagttgttcaactgaaatgataatttaggataagtgttacaaatctaagcacttacaagcatcttaatataaatgtgtgatttttataaaactatcttactgttacagaatgcaaacaagtctagcacatataagctctaaattgttaagaaacttgtgttctatcctattacatatttcaacttgaaatcatctaggcatgttaggagtttgtagaatatttagtcacttaactggtcacatttttttgagacggagtctcgctctgttgcccaggctggagtgcagtggcgcgatttcggctcactgcaagctctgcctcccaggttcacgccattcttctgcctcagcctcccgagtagctgggattacgggtgtctgccaccatgcctgactaattttttgtatttttagtagagatggggtttcaccgtgttagccaggatggtcttgatctcctgaactggtcacattttttatcgatatttatctaatggcagtatcattaaggaaattttaaatgtctcattctgaatttagacatctaaaaatttaaggaatgtcttataaatattagaaatattaggaatgtaggaaatcaccaattagatgaaacttttgagttattgggtccctgca

SEQ ID NO: 15738 - DNA, 1062 bp, Homo sapiens
cccattaaaatcactctcgtattgatcatcccagcagcctctctaatctttgagaaggaccaatagagtttacaagtaaatgaaagtttaaaagtcaaacacaatcctgtggaaagcaggaggaaaactcagaggatgtactttatttttcttattcttaggacataagccctagaattgagtccttggacaggactgtgtgagccccatggggttcggtaagcagagagtaacacaggcagggtgtcagagccctcaaaccaccaagaggctgaaagcactatcacaacaggacaaccacacatgtactactttgttggaaaatgcgtgtagcaagtgaaaatcctaaaactcctactccagtgtttattcttcacggggtaaagttgtgtgtgtagtataaatcggggcttattttgagccacactttttattcttttaaccagctttaatcccattgactatttttcttcttctgtaaagatggcatttttttttctttcactgtccagtttctggtaatacatatgtgagagctttgtccccgattatttatgttactgattcttgatatgttctctcttttaattttacctattttgaacacttttcatttctagtatttgaagataatacttactaaatatttgtttaatacgttaagtagtgaccacattaatacactgttttggtcctgtgtttaactaggtttatttctcacgtagttcttttaacatttcattattaaatatttagtacaaaaagcgttttttaatataactaaatgtgatcatatgaaatattcagacattctcttacaatacaggcttatttatttatttacatggctgatttttttcctacatctcttccaactctgttctttcatcatgaaccacttctcttacccctaaaaaaaggaactcatgttgacggcctggaaggtatccctttatatttttctgtttgcttttaattacctggactgatgtatatagactatatatacacctttgcatatatatggggactttttggtcatgtattcgtttttagaaaatg

SEQ ID NO: 15739 - DNA, 1045 bp, Homo sapiens
caggtgagtccagcagggaccatctgtggggacccattaacgacacttcacaatcttaaaacaacaaagagcttttatttcatggtgtggtttatgagcattcagaagtaatgtcatctctgcttggagacttttctagcaggacattagggggctatcatcacaggtaacctggagagtacatctgtagataaagatcctgactattttaagtaaagaagaattattggggaaaagaagctttatgtccagtgatcaacagggctggaaagagctggcagtttcagaaaagaagaaacctctcttgacagctttagtatcataccgtggactggaaatggcaaaaatcatccctaaagacaagcgaagtgttttgaagtgactcttcatagtgaagtagcaactctaaatagccaaaatttgcaaccatcgtttactcttttatataaacacgaatctgtttttggcctgatataacagctgggtagatctagtaattaaatgaatgattcagatccaggcgagtatgtttacttaattgaatttttggctcagacatcataatcaaaagtgaaacaaaggaaaaatttcctgggtcatgtgtctaggcttcaaggactaggagtcagcagccctacaaaataggaaaaacagattctacttacttagtgctcttctttctctttatcttagaaatatatatttgagggaaagggatgtactagagttttaaaattggaagaagctattggactccttcatttctacagatttaagtcccatagttaattagtgtccagcctgttttattaatcaacaggggattgagtgtgctctgcccataattcccacttattgctactcagaaagacttcctagagttcacatcttttatgctatgaggctggccaagaagagcaattcttagtttgctaggccacataagctgaaatcttgccagtttttccaggcaacacataatagcttggtcacatcaggtggattcttgtgaagagatgattaataggttgagttaaaaaacaaa

SEQ ID NO: 15740 - DNA, 1046 bp, Homo sapiens
gggggggtgtgtgtgtacgtgtgtgtgtgtatgggttttttgttacttgttttctctgttttctgattgtatctctcaatttttaaaatgttgtttttgtttagatacacagaagtaaaaacaaatggaaatttcatctcaaggatggcattatgaatcttaatggaagagattatatattttccaaagccattggagatgcagaatggtgaagagttgctttttttcttttataaataaaagaaacttaaaaaaaatgtaaagcggacagtttgaaacttggggcatatgccaaccaaaacttcgtttctgcatgtcagaaaagtgcagtagaagcaaagctactggaacaaagatagaccttgacaacatagacactacttactggcaagccatggaactgtagcacctagggtttttgggtgggagggttggggttttgtgtaggaaaaccataattgttgattttaaatacaggtacctgccaccggtaattagcatgtaaagctttgtctatattccttcctccaacttgggttcaatcagaagatacttgttggaatgaactgaagaaacttcccttttgatagattgaactgaaactgcttattgtatgtggttatatttggtaaaagttgcgtgtgagctttttacaaaagggtaagaattgtgttgaattttaattcacttgtataagaaaacaatttaaaactctcataataggtcttaaatatttttacttgctattctccctcagtgatatatacctcttcctttccagctttatgaaacatctatttaagatttaaagttatcagtgatcatagtttggagataaaatttgacccaggaatgaatatttattttaattaggttttcatacttattaaatgtaattaaagacttgggtcttgtctgagttcagtggaattgaaaccacaactttaatttccttacagaaaaacttaatttgtttcttttagtgccacaccttaaaaagaaaccccaaactagctcctcaggaatatagttttattttgcaagca

SEQ ID NO: 15741 - DNA, 1094 bp, Homo sapiens
ccagcagcaaccgcaggcccagcctgctcaaacacaagctccattggtcttacaagttgatggaactggggatacatcatctgaagaagatgaagatgaagaagaagactatgatgatgatgaggaggaagacaaagagaaagatggagctgaagatgggcaggtggaagaagtaagtttctagtaacatacttaaaataatctacttgattatttccttttttagttggtacaacactgataaattatatcctgtttttttcagagactgttaggtgctgtacaacataagattttaaagataaagttagattgttttaactttagtaaggtttttatattctggctatatttatcttcataaaatataactttcatatagctggtaataaaaaatgtataacaaattaaattgtattaatatgtgtagtaaagagtacaggtaattctaactctggcttacgcatttataatgtggcttaaacataagacattggtagataaatagatgtggttaatcttttgcttcagtaatttaaaaagcgtggcaacatttggggagagagcaaactcaagaaccaaatgtcacaaatttattaaatatttaaaaccttttggtccatgttctataccacttccttaaaaacctatgtacccttaatgtctgtgttcttctagaagcatataaatatgcctttgttttcctcactatttcagcttagttactaggctccaaaaactatttgtcccaccacaattttcactgttaattgccttcgttagcctaaaatgcagtctttttgtttcttagtacaaagttcttctaaattatctaagtaattttttttctgaagaaaacatagtttattattgaatattgaatagacacaaatgaatagaaatgtttcaagataaaaatcatcctggtgcccaccatctagttaaaataaaattccattatttaaagtgccttagatgcctctccctaatcccatcattcctaggccatcaaagtacctttgctcatacatttgtgttgattattaattgcttttatattttaccatatatatttatattcctaaatagcatat

SEQ ID NO: 15742 - DNA, 1032 bp, Homo sapiens
tacaggcgcctgccaccatgcaccactaatttatgtatttttagtagagatggggtttcaccatgttggccaggctggtctcgaatgtctgacctcaggtgataagcctgcctcagtctcccaaagctctgggattacaggcgtgagccaccatgctggacccacaaattattattaatttttaaaaacctaacatcttaatttcatcaaatttgttttccctctactgtttttaggaaactgattatgggtagcatttaggggtttggggataataatactatatatttttagacgtaatgagtgttttactaggtttaaataacttctaaagaaaatacaagtgggcaaattagctatgtaataacctacatagaaaacagttgggcaaattacctgtggatatgcagattctacttttgcaaccctggacctggactttttattttttttttttgtggtcacaaataatctttgttatcaataatgtgaaaatattaaaaatgaattcattttaccagtacatagtattactcttagaacataaattagatatcacgtggtatcaagagctgtgctttcttttgagtctagggcctgctttttgactttacagcaaaaagataagaaatgtactcatgacatgtcagacaagacaatgtgaggcactttgtggggagaccattagatgatcccccttgcctgctcttgcagacatagtactagttattccttatcaaaagtttgcatttcattcatattaaatattatctggacagtttcattttttctatttggctcttcccttactgtgccttcctgcattattggcagggttcataatccttgagaacattgtttgatttaaaatattttttatttgaaatgagactgatttctattcaaatccagtggctgggagtaagagtttatttccctagaaacttatgtttctgataaatgggatccatgaaggcaaggactatatataattttttgtgtttccaacacctagcacaaagcttggaatat

SEQ ID NO: 15743 - DNA, 1028 bp, Homo sapiens
gggctcagttctttacatgtattttttccagttctcacaacaacccttcaagtttttgagtaattattcacatttcacaaatgtgaatactgagctggcatcccaaccagatgtatttacttccaaatcttgagcacgttccactctgtctcaatgtcttcagacattctctctgctagtatatcacccaactgaaatgtcagctcctttgccagtttggcttcaactatcccaggcagaattactggtcatttcctcttttgggttcacacagcactttttatatacccataagaacactttgtgttgtattgtaattgcttttgctgtattgtggttgttggtttatttgcctgttgcctctgctagtctctgaacttcttaaaggtagtgacaaagtcttattccttcttttacatttagcttgtcataggacctggcagtgttgtgtagtgtggaaggactgagtttaaatcttgtgtcttttttggctgacattatgtttttcggacatggtttactgcctagtaacaaatagagtatgttcaataaatattgaatgagagaatataatcttagatattattttttctctattaattatttctattattaaagctgaaggataaaaatatcttccttatggggttggtgtgagattaaatgaatgaatcaaacctggagaaatgatggtgcaatagtaacttctgagattcagagaatggttatgagattcgtcatgttgttgcatatataaatggtcattttatttttattgctatagtggtattctatgatatgaatatgatactctttgcttattcattctcctattgataggcatttggggtgtttccaggttttcactattattaataaagctgctgtgaacattcttgaacaagtctatttgtagacatatttttcatttctcttgagaacaaacataggagtagaattgttgggtcataaagtaggtgaatgtttaaatttatcatttaaaccatttttaactgccaaaccatttt

SEQ ID NO: 15744 - DNA, 1200 bp, Homo sapiens
atccacctgccttagcctcccaaagtgctgggattacaggcgtgagccactatgcccagcctaaacatcagatttctgcatgaattgtcattgagtcatgactctcagtgcagcgtggaagaagtgacaggtccagacaggcttcccttactgaacacctaacactgagaaggctctgggctaagtgttgatgcatgtagggaaaagttacggaacactgggcagtgaatgagcacagaaataatgttccttctgcttaatatgatacatttactgcatacttattgtctcagtttctgtgctcagtgccttagctacttcatatcatgtactccttacaacaattgtatgaggaaggtattaatattaatccatattacacatggtggaggagactcagccagaagtgggctttgggaattcaaccaagattgtgtgctaggaaatggcaggagagcttccgcaccaggctgaccggccccaaggtcttggagcagccttcggatgccctgtgctctccttccgtttgcctcactcttcctgctgctgctgctgctgctgctctagtatcctctgctccctcattacccaggaggcagtgggggcaaggaatggaaggtaagtgatgggtggggtgctctttctccactttgctgccctaaaatggccgtgccttcaggtcatggattatattcatgccattcagattctttcacattttatctttagcctcaaagatttcctgattgctcaaaactatttatatgacagtcaatttgctcaactcttcactgatttttccaaaactaattttgagattagtcataattatgttgcccccatctgactgaggatcttatcttgtgactgacaatgcttttgatatattgtgaaagctttaccctttaaggcagcaattcacagtctggcccatagaccttgctgtctcctgagaccctttcaaggcgtctttggggttaaaatcattttcattctaattctaagatgttatttgccttttcactgcattgacatttgcattgatggttaaaaaataacagcagatgaaacttttggccattgtctactcacagtaaaacaaaatgtatatttcacccaataatatccttgatgaggcagtaaaaattattaatttcttaaaattgtgattcttgagtatgtctttttaacattctctgt

SEQ ID NO: 15745 - DNA, 1024 bp, Homo sapiens
caggcctccagggccacggccagctccaccccagcaggaggggccaccagagcagcagccaccacagtaataggcactgggtccagccttgatcagtgacagcgaaggaagttatctgctgggaacacttgcatttgatttaggaccttggatcagtggtcacctcccagaagaggcacggcacaaggaagcattgaattcctaaagctgcttagaatctgatgcctttattttcagggataagtaactcttacctaaactgagctgaatgtttgtttcagtgccatatggaataacaactttcagtggcttttttttttcttttctggaaacatatgtgagacactcagagtaatgtctactgtatccagctatctttcttggatccttttggtcattatttcagtgtgcataagttcttaatgtcaaccatctttaaggtattgtgcatcgacactaaaaactgatcagtgtaaaaaggaaaacccagttgcaagtttaaacgtgttcgaaagtctgaaaatagaacttgccttttaagttaaaaaaaaaaaaagctatcttgaaaatgttttggaactgcgataactgagaaactcttaccagtccacatgcaattagacatattcagcatatttgttattttaaaagggagggttgggaggtttcttattggtgattgtcacacggtataccatactcctctccttcaaagaatgaaaggccttgttaaggagttttttgtgagctttacttctttggaatggaatatacttatgcaaaaccttgtgaactgactccttgcactaacgcgagtttgccccacctactctgtaatttgcttgtttgttttgaatatacagagccttgatccagaagccagaggatggactaagtgggagaaattagaaaacaaaacgaactctggttggggtactacgatcacagacacagacatacttttcctaaagttgaagcatttgttcccaggatttattttactttgcatttctttttgcacaaa

SEQ ID NO: 15746 - DNA, 1045 bp, Homo sapiens
tctcaatcaagggaacagaacatttaagtctagaaactttataaataaattccatatgtcatggaagaatctcaaaactttttcattattttgaaacatagtataaatcaatgggtattttcacttataactaaatcctaaagtaaggaagtttagatggaatatatcacaaaggtttttacaatagggaaatttcatcatgatttgcctcatgatcatactagtaattggggtgtggtaactacatttaaatattccagctgttccatagcatagaacttggtatttccctctgtttttgttaagcatttaagaacgtttcattcctcctcttttggttcttgctctgaattactgtcattgtctttaaaaactattttttacatttattgtttctttaacatatatgtgaataaagacagtcttgaccattctgtttttctttctcttggccctttatcattctccatacctgatgctctaattgtttagtgtttaaaccctcttcaagtaaaccttttagttacttcgtttcctgaacttaagacccacttgtgatcttatcctggggaaagtagtggtagaggagaaagaagaatgaatgccgcaagcagcttcccctttccttgttgaatcactgatctgatcctaagcaacttactaaccatttgacttccctggaatagagtgagaaaaatgattcatgttgggcttaaagatttcttctgagactaatatatgagctgattttatgtattcatgtttataaataagtcataaatttgagatggcaacagagtatataattactaaaatgtttgcttttaagagtttgcttttaattcttttgttttttttgtttgtttgttttgttttgatatgaggtcttgctttgtggcccagtctggagtgaagtagcaagctgtcagttcactgcagctgcagcctcctgggcccaagcaattctgctgcctcagcctcctgagtagctgggattacaggcacacgccaccacgcctggctaatttttgtatttttagtagag

SEQ ID NO: 15747 - DNA, 1083 bp, Homo sapiens
gcttctagtaagtttccttttttctgaagagcacccatttgtgtttcctttagagcaggttcactggggacaaattcagttttttttttgtttttgtttttgttttttgagacggagtctcgctctcgcccaggctggagtgcagtggtgcaatctcggctcactgcaagccccgcctcccaggttcatgccattctcctgcctcagcctcccgagtagctgggactacaggcacccgctaccatgcccggctaatttttttgtatttttagtagagacagggtttcaccatgttatccaggatggtctcaatctcctgacctcgtgatctgcccgcctcggcctcccaaagtgctgggattacaggcgtgaggcaccgcgcccggcccaaattcagttttaatttatgtgaaaatgcctttatttcacttccactttagcaggatactttgtgtttttgttttttgttttgtttattcatttgtttgttttttaagacaaagtcttgctctgtcacccaggatggagtgcagtggcacgatctcggcacaccttaacctctgcctcccaggttcaagcaattctcctgcctcacctaccaagtatttgggattacagatgtccatcaccacacccagctaatttttgtatttttagtagagatgggatttcaccatgttagccaggctggtcttgaactcctgaccttagatgatccacccacctcagcttccaaaagtgctgggattacaggcatgagcccatcgtgcctagcccgttttttgtttttttgagaaaacatctctctctgtcgcccaggctggagtgcagcagcacaatcacagctcactgcagcctcgacctctccaggctcaggtgatcctcccacctcagcctctcaagtagcagggactacaggcgtatgctaccacgcccggctaatttttctatttttttgtggagacaggattttgcgatgttgcccaagttgttcttcaactcctgggctcaagtgattcacccatgacctcccaaagtgttgaggttacaggcgtgagccaccgcacctggccgcaaatggta

SEQ ID NO: 15748 - DNA, 1068 bp, Homo sapiens
tgttctttttttttgagacagagtcttgcactgttgcccagtctggagtgcaatggcatgaccttggcttactgcagcctccacctcccgggttcaagagattctcctgccccagcctcctgagtagctgggataccaggcgcgtaccaccatgcctggctaattttcttctatttttagtagagttggggtttcaccatgttggccaggctggtctcgaactcctgaccttaagtgatctgcccaccttggcctcccacagtgctgggattacaggcgtgagccaccgcacccagcccctcctttgtttttaagtgtcattttatttgctaaagaaatatgcagtatcctttgtgctatacagtttcccacgttttggatcttgctggtcatgaacttgtaatgtcattgagcttgttccattatctgctgtttattctataaactgggagttagttctagagacatgggtagatttggttctgtctttttattgagagtatttcataggtaggtggtggtgtgtactttctgttgctttacattgagagacatgtagtgtctgatttttccacttttactgatgttaagattaattagcgaggtcaggtggtatcaccctgatctcaccattctaaagttcctcattaatcttttgcctaggggttttggcaaccatttatgtttgttgcctggatcttttaattattaggggttgcaaaatggtgactttctaattctaccattcctcctgcatttgttacctgggattcttttataaagaattttctctcatcaagtctttgattaccctgaaatatagtctcatccagagaaagctagataaattcttatttcctttgcactgttgtgaaatgaaaatttggtgcccaagcaatctctgaaagagactaatgagtatgtttttgtttgtttgtatttgttttgttttgctttgtatttgagcattgtaaggatatagtaaaaaccaaaccaaggtgtgtttttctttctctttctcactgagttaacacttctgacaccagatatgttgtgggtatttcccca

SEQ ID NO: 15749 - DNA, 1033 bp, Homo sapiens
ttctgtctctgcttccagccaaagtaaccttacgtaataattgaggaagaaggaaggctctttaggcatttcataatcccggtagcagtagcgaacaaccaaactctgctaaatcaaacgtaaacaaggcgtaaagctgtgcgatggtgattgctgtcgttccctccccaacctagtcctacaaagtcaatgaaatgtacattttcagttgcagaattatctgccagaactttagcatgaattgtcagagacagtatacttagtttttatccaccgatgatgaatgtactgtttgagttcttcgaagtatgtgacttggacataatttatcctgactcttgtatgtaggtcagatactttgattaacaatgaacataaaattttcttcttttggacacaaaaaatacagtccctctatgtccatgggggatagattccccctggggatgccaaaatccacaggtgctcaagtgccttatataaaatggcatagtaatttgcatataacctatgcacattctcctgcatactttaaaccatctgtagattacttatgatacctaatacagtgtaaatgctgtatacatatttgttatacaatattgtgttttaaatgttattttttattgtttttttccccaatattttctatctggaattggttgaattcttggatatgtaaggccaactgtacctcagtgtttacatgtgaaatcttaagaactaaagttcttggaatcagactaccttgtgattccattttccttttcataactttatatagaaaagtatagaatgtatgtttaagctgcccaaaacaggttatataaagaagtatgagtagcttaattttgtatattaagtttgtaaaacatcaaaaatgcatactccattttgactgcagacactactagtattacgtatacaacaaaacagtggtgaacatttatacatgaggaagaatataatggttttattattatcattataggaccttgtgttggagctcatttttggttatcgaggcagagac

SEQ ID NO: 15750 - DNA, 1027 bp, Homo sapiens
caataaatgtttttataacaaatattatgtatttaaagtagttaatttttgtcaaatttccagtatttgtgaataaaaatatttaaatcaatgtttaaaccaatgtgacataagttagacatttttgtatttccttaaaattctgttgacatgttgcctttcttctgtttgctaaaatgctgtattctattcatcatcaatttttatatgttttcctacttttttcccccttgctccttttgaaggcagggagtagtaaggtaagtgttttataaaagaaaatattttattcaaaaatttaccctttattttattctttatggtattttaaggtattttttccctataaaacatttaactacatttgtcaacaaagcattataaaatgaagtaggacaaattctataaaagagttgcatttttagatagcatatatggttgttattataagggtcttcattatgataaattgttttacatatgactgtacaaactactacaatgcaaatgaatagttttggttttctttaagtttcagaggctcgtaaaaacaaacctaaccacacatatatttaagtgaaagactattcaattttaaacctgttaacatgatttaatgcatgtttaatccattcatttaaaaagatgaaaagagggtaactatggtatttgtatgtttaataaaatgacatgtaggtaaagactctttgggttacttttatatctacctttggtgatgtgaaaatgtcttgaaagagtttctgaaacgacagtgtggaaatggctagtctgttttataaattaaaaaaggtatcatggctgggcacggtggctcaggcctgtaattgtggctcaggcctgtaatctcagcacttgggaaggccgaagtgagaggattgctagagcctgggagttcaagaccagcctagacaacatgatgagaccctgtctctacaaaaaataaaagtaaaaataaattagctgggtgtggtggcagccctgtggtcccagctactcaggaggctga

SEQ ID NO: 15751 - DNA, 1259 bp, Homo sapiens
taggtcttatgtttaagtctttaattcaccttgagttaatttttgtataaggtataaggaaggggtccagtttcagttttctacatacgggtagctagtttccccaacaccatttattaaagagggaatcctttctcattgcttgtttttaccaggtttgtcaaagatcagattgttgtagatatgtggcattattcctgaggcctctgttctgttccattggtctatatatctgttttggtaccagtaccatgctgttttggttactgtagcattgtagtatagtttgaagtcagctagcatgatgcctccagctttgttctttttacttaggattgtcttggctatatgggctctttttttagtttcatatgaaatttacagtagttcaattctgtgaggaaagtcattggtagcttgatggggatagcattgaatctactttaaaccaacaaagatcaaaaaagacaaagaagggcattacataatggtaaagggatcaatgcaacaagaagacctaactttcctaaatatatatgcacccaatacaggagcacccagattcataaaccaagttcttagagacctacaaagagacttagactcccacacaaaaatagtgggagactttaacaccccactgtcaatattagatcaacgagacagaaaattaacaaggataatcaggagttgaactcagctctggacaaacggacctaatagacatctacagaactgtccaccccaaatcaacagaatatacattcttctcagcaccacatcacatttattctaaatttgaccacataattggaagtaaaacactcctcagcaaatgcaaaagaacagaaatcataacaaacagtctctcaaaccatagtgcaattgaattggaactgaggatggagagactcactctgaaccatacaactacatggaaactgaacaacctgctcctgaattactactgggtaaataacagaattaaggcagaaataaataagttctttgaaaccaatgagaacaaagaatacagcataccagaatctctgggacacagctaaagcagtctttagagggaaatgtatagcactaaatgcccacaggagaaagtgggaaagatctaaaatcaacatcctaacatcacaattaaaagaactagagaagcaagagcaaacaaattcaaaagctagtagaagacaagaaataaagatcagagcacaactgaaggagagagagacacaaaaaacccttcaaaa

SEQ ID NO: 15752 - DNA, 1026 bp, Homo sapiens
tccccttttaattttgataactagaaaatgtttctaatttttcaatgatctcagctatgaattttaaaggatacttactatattaatcttcccttaaactcaactttctacctgctttatgcctgcacccaaccagcagaataagcattgagtaaaacagggaactgtgataattgacctcactactattctgtttctcttccctcttttgtagcagaactcctcaaaatagttgaggcgcccttctctgtgtgttcacatgacagtagctccataacccactccaattaggcttttttccctacttgtccatttaacctgctgccaatctgttgatcacttcctggttctcagtgtattcacctcacagcagtttgtgacacaatttatcattcccttttttttttctgaaatactttattcacttgtctctggaacccgtgcgtgtctgtttcttctctctacttcactgactccctttttctgtttcctttgctagtgctatctcttcttcctgcactctgcatttaggactgctccagcgcttctccccggacttttcttttcatatgtacactcacactttagattcagtcggtcactgtccagtcagaagatgagactacaaggcttatttgaacagtgggaatttaataaaaagaattgctaactagcaaaaagtgattacctactgaaaaagccttagaggtagccaccatagaaagcagcaaccctagtactaagggagagtgaacaagttaaaggtgattcagacctgtttggaaatggtgtggctgccaccagaacattcagtgagcttgtggcgaaaaagcttgccagagggtgcagccctcagtggaacagtgagagtagtcacttggtgaaggagaagcttgccagaggcagcaggccagagctgaatggtcagaaccactgcttgaagagcttaacctagggcaaaatcattgaactgtgaggactcctgccagagaatcttcctgaagtccgcaaattgcagctaaattg

SEQ ID NO: 15753 - DNA, 1155 bp, Homo sapiens
gtcttacttctgagatctctattctattcccttggtctatgtgtctgtttttgtactagtggccatgatgttttggttactgtagccttgtagtatagcttgaagtgggattagcatgatgcctccagctttgtttttatggcttagcattgtcttggctatatgggctcttttttggttccatatgaattctaaagtagtttttttctaattctgtgaagaatgtcaatggtagtttattgggaatagcattgaatctataaattaccttgagcagtgatatagtttggctgtgtccccactcagatctcatcttgaattcctacatgttgtgggagggacctggtgggaggtaattgaatcatgggggcaggtctttcccgtgctgttctcgtgatagtgagtctaatgacttctgatggtttcatgtgtctggcatttcacctccttccactcactctatcctgccaccctgtgaagaaggtgcctgcttctcctttggcttctgccatgattgttaagtttcctgggacttcctcagcaatgtggaactgtgagtcagttaaatctctttcctttataaattgcttagtctcaggtatttcttcatagcagtgtgagaacggactaatacagtaaagtggtaccagtagagtgggatgctgctgaaaagatacctgaaaatgtggaagcaactttgaaactgggtaacaggcagaggttggaacagtttggagggctcagaagcagataggaaaatgtaagaaagtttggaacttcttagagacttgtagaatggctttgaccaaaatgctgatgatgacacaggcaatgaaatccaggctgaggtggtctcagatggagatgaggaacttgttgggaactggagcaaaggtgactcttcttatgttttagcaaagagactggtggcattttccctcagccctggagatttgtggaactttgaacttgagggagatgatttagggtatctagtagaagaaatttctaagcaacaaattattcttgaggtgactttggtgttgtttaaagtattcagtttttaaagggaaccagagcataaaagttcaggaaatttgcagcctgactgtgacagaaaagaatatctcattttctgaggtgaaattcaagcca

SEQ ID NO: 15754 - DNA, 1043 bp, Homo sapiens
tacaagttgtgtgaccttgggctggtaatttaccctcactgtaaataaggagaataagaataaatatattatttaggatataggatcctatatatgaattgatatttctcaaatgtttataaggatagcacataataagcatgtaaatgttaattggtattttattttcattagttttgctaaacattattgtgctttaaagcttacaaaataatttgagactttttcttatctgatcctcacaagaacattgtgaggtacacggtgtctttatattggccatgtaacacacatgagaaaactgaaaaacacggtagctttcctaagattacaaaagacattcaggagtaggcagaaaaagtaaaattctctctttttaatgatattataagtatattgaagaaatatagacaagtaaaaagattattaaaaggaaaagaatacaattctataaaggtaatttactaattgagtacttattgaacaatgcagactgaagtgttataagactggctgagcaagtagacatggctagagttgtctacaagggagaaggaagaagagtacatgtcttgaaggatgggtaggaactaggtacataaaaagacaaatatttcatgtagaaaacaacatggacaattgaagaaaatgtgagtatagatcaaggacttacatatttcttctgtctcacatctaagatataaaaggtacaaaattaacttcaatttaggaagattggaattattgacacaggatattttgggtgctaccttgccagctggagacctccatggcgggcgcaatgcccctgtcccgggctgcactgggctccaggctcgccaggaggtaccctgcccacttggcctggcaggctgcgcttggcttatactctggctggatcccacacttgctgcaggatccatgctcagcctgtggctgggccgggtgtgctgtgacctgcttctgccttgggcgttggcgtctggttgaagggaatgtggtggcacctaaaaaacttggggactctagcggccctgaagccc

SEQ ID NO: 15755 - DNA, 1051 bp, Homo sapiens
aaatacagggtgcaatttgtggaaaagtaatatagatatggtcaattgatttttgacaaaagtgcttggggaagtcaatggagaaaagatagtcttttcaatacatggtgctggaaagttaggaatcttacataaagacagcaaaaaacaaacaaacaaacaactataacctacattacactttatacaaaaattaactcaaaatagattgtagctttaaatgtaagacaaactataaaagttttagaaaatatcagaggaaatctttattacctttggttaagcaaaagcatggtccataaaacaaaagtcaatgaactagatagacttcataaaaattaaaaaatgtttgctctgtgagagaaacagagaatgcaaagaaaagctacagtctgggagaaaatatttgcaagtcccatgtaggacaaagggacttgtattgagaatatatgaaatactttgaaaactcaaaaatataaaggcaacctaatgaaaatggctagaagacttgaacagatcattataagaccaattagtccatgtgagtagtcatcagggaaattcaaattaagaacactgacactaccaaatattagtaggaatgtggagcaactggaactttcttacattgctggtgagagtgtaacatggtacaactactgtggaaaactgacagtttcttataaatctaaacacggacccaccctatcctttttctctaacttgactttgaatacctctgttctattgtatgaagattttgtagttaaactatgaggacctgcatagtttttctccccagtttttttttttttttttttaagagatggtgacttgccctgtcactcagactggagtatagtggcatgatcacagctcactgcagccttgaactcctggcctcaggtgatcttcatgcctcagccttctgaataactgggactacgggcatgtaccatcacacctggctagttgttttattttttgtagaggtggggtcttgctgtgttgcccaggctggtcttgaactcctagcctgaagtgatcctcc

SEQ ID NO: 15756 - DNA, 1030 bp, Homo sapiens
ttgagatgtgtgagataaatgtaaaggaacattgatatatttgcatgtaagaatggagatttatgaggaagatgatagctcactttatgtttgtttaacatgttatttccttatagttatgataaatttagagattaaatacttaaagcaacttaatatgtaattgtgggatttgatgacagtgcttatatctaattaatttccattactcagcaatattaataggaagaagaactttaaaaaaatctgttctttccatatatttcagatgatagtgtcacaatatggatgggtaataatcttgttaaatgttttagaatgggaatataccctcagatgattacatctgtcatttgtctcccaaattaatccataaatgttgagtttttactatatgttcagcaatatactaggcattatgtggatgaaacttaactgtaagatattaagttaacctgaaggatacctgaacaacactcatgctttcattctcattaagaaaattggaccaatcggaagagaatcttcagattccaactgtccaaaagcaatacattcagctcctatccaatattaatcctgctgcttgtgtactggatcccactcttttttccctgtttcagaaacgttcttatcttaacctacatcagcattttttctctgtactgaatggtctcttgtcaacaaatgatgtgaaaaacaactgaatatctattatgaggaaaaaatgaaccccagcatatacctcaccatatataaaatttaaaaggtgagaggtaaaactataaaatttctagaaaaagcataggaaatagaacacaaaaagcatgaattataaaaagtaaaattataaattgaacctcattaaaataacttatcagacctccaggtaagtgaagacaatggcaggtatgtagtaagtaacctcccaaaatctcttctccagactttctgtgcaaaccatagccccagcattacttaaacagagaataccaaaactgcaaaatgactgtaagtaaaaagagaaaaa

SEQ ID NO: 15757 - DNA, 1087 bp, Homo sapiens
aggagtgagtttagataaaggatctaataaatggattcctgtggcactccaacattttaatgtaggggagatgaagaactgacaaaaatgtggccagagaaacacgagaaaaaccaagagtataagatcatggaagtcaagtgaagagagtatttcagggagaaaggaattatcagctgtgtccaataagatgaggactgcttcaccttagcgaagttttgctataattatattgtaatcataagactccccaaaagactgtgtatgcccaggggaaaaggaagagcaggaagaagatgagaaaatgagtcatgtcattattggtacacaaaactagcctctttcaagattcgttccaatgtataactattatgtattcataacatttcttaaaaacagatttgttccagcagtttctgctttacttggttattaaaaaaatgacacatagctggcagccctggatcgttgcttctgaaaagtgtggtcttcagactagcaacggcatcacctggaaagttactaaaaaatacgaattatctgggctcattccagatctaccaaattagaaactctaagtgtagagcccagtaatcagttgtgtggttttgttttttgttttttgttttctgttttttgcttttttgagacagagtctcgctctcgtcacccaggctggagtgcagtggcatgaactcggctctctgcaacctttgcctccgggttcgagcgattatcttgcctcagcctctcaagtagctgggactacaggcacctgccaccacaccaagctaatttttgtatttttagtagaggtggggttttaccatgttggccaggctggtcttgaactcctgacctctggtgatctgcctgccttggcctcccaaaatgctaggatcacaggcatgagccactatgcccggccccagtaataagttttttatcacctccaggtgatgttaatataatctaaagtttgagaacactgctccagattcctgattctcaaccctggctgcttaatagaaagttaaaagaaaacaaacaaaataaaaccaccaatggccaagccttacccaaagaa

SEQ ID NO: 15758 - DNA, 1029 bp, Homo sapiens
agagtagagtttaccccagtgtcttgtctttttccctaatcctttcaagtctcccttcttttccatatgctaggtctcccaaagtaccaggcatagtagctttacctagctggagcagccttaactgaagccctgctccagataatttagtctgttaggttgaattcagctggtggagtaaatgtgaaggattttgaggtcttctcgtggtacacttgtattgtttttactccttgggggttatgagagcagtatagcactaaggtcttctgaaactagatatgatttatttggtgaggtaaattacatcttgttcttctagcagtaattagaagctgtgttatatgtcacaccgcttaaatttcataattgtgtttcagtaaactgtaaggaaggtaatgctttgactttcttttggtatagttgcacaacttatacaaaacaacaaacatactcgaatttctcatcgttgaatatacatgcttatgattttatccaaatgacacatctttaatgtataacaatgaaaataagtttcctgaaaagtttcaatgagggagtaaaatctgaatcatacagcatcttgaaattggtggcacaaatttaatatgatactgagaatataatttaggaatcagtgaaagggctctggacattttatttcaaatagtaatgacagatcattcatgtttgtgaaatatattgagctaatattaaaacctcaatattttttcagttcagtgtttgacttgtgagtatagaaacaactctagtaatttttaaattatgccacagcagaagatgtaatattcacaaatgtgatgcatagtgaaaaccaatgttgctgtaaccttagctttagtaataaaaagtcagtgctgttttcatcatctgttttgtttccacctttgcctgaaacttatgtaaaacttattggtcaaatattacttagtctgaggatagaactgttccagaatgagcagatcattgtcctcaggttttgaaaatgtgagtgcaatgttggtggta

SEQ ID NO: 15759 - DNA, 1045 bp, Homo sapiens
ctgggcaacatagtgagaccctgtctctgtttaaaaagaaaaaaaaattgaggccaaattgtttcttatcctacagaaacactaaaggcagattccatagtttagatactctcagcaaaacttttgcccccaattatttccttttttaaaatttttattttattttattttttaaaggaagggtagagggaggtaggagagaagagcaaagaaaatgatgtttatttcactaaagaaaccatcaattgtgtcatcccaggtagttttgggcatcgccttcctaggtgaatttgggtgggaaggtggggctgccttcccggcttgctgagatgtttcggtgaccaacaggtgtcctcctgagctcggctgggtgtctgtgcccctgactcctgggttgagctcctttttatagtcatttgtaaatgaggccacaaaataaagaggcagatttcatgtggcccacactccttagattcacggtaaacattacggatttctctgtccacttgtattagtctacgtcccctgccctctggctgtcactagactggatttacatttttttgtatcttaatatatgtaagcgtctttccattagaatccaaagaccttgaaactctgtggaattgtgcataattttcatgtatttcctgtcttgggggaccaggcaacgctgacagatgttaaaatgagctggtatattcccagctttagttgactctgtccagagctccccagccccacagtgggcataggcagggtacttctcaggtgacatcagctctggagagctctgtgtgccacagcaatggccagtgatgggtttccacggtgacaactaagttctcaagaaaagattgtgtaggccgggcgcggtggctcacgcctgtaatcccagcactttgggaggccgaggcgggcagatcacgaggtcaggagactatcctggctaacgcggtgaaaccccgtctctactaaaaatacaaaaaattagccgggcgccgtggcgggcgcctgtagtcccagctacttggaaggctgaggt

SEQ ID NO: 15760 - DNA, 1612 bp, Homo sapiens
ttgtgaacaattttgagtctcattagaggtgtcttaattttaaaaattaagttgggaactagcaagtgagattgaagaggctatatctttggttctgacctggattttctttactcaattactcttcaaattatactgatttgagatgtgattattattatttttcctaagtagattggataatgagagaaatgcaaaggcatgctagactaatagtgatctgagtttctgctacctcacttgtccttccatttcccctcccccagccagagcaccgccccagcccctgcttcctggtctacctggtgagccacctaacctagcgaaggcagctgcttccctgtctttccagcgtcagcccagctatgaccactgcagcgccagggatcctggccaacttgcgcattgtaatcacgtgatgcagtgctcaccatcctgcagcagtttcccatgttagttcccagcccttccttatatgcctcatttaaatgtaagatttaaattgtaccgtctaccctgagaacccactgtgtagccaccctcatctcctcagggtcaaacctgctcacagtacctttatcagaattgcccctcaactgcttgaaacacatttctttcatctccctgtcttttttcctgtagggaagaagggaagaaggtaaactacctaaaagggagatggtgatgttttctccccgcatcctgcttcatcacttttcccctttgcttttacatacacacgtgtcatgctcaagtgctgtctgtgcattgactcatggctcgtgcctttggtatgagcctcattactgggtgagcttcgccaaatgagcttttggtgttgctgcaaatacaatggcgtctcttttgttttagggcctggagtgacattgtgatggagaagtgcacagttgaccatattgagccggtcaggagggtagatttaagagaggcagcaacagcagcctctcgtataagcagcagagtcttccctgacaccttacttatttcccccaggatctgagctcattcgccatggcaggaaccactaagattgtttggttatcccgttacttctgtcttccagccagactgtaatctccttgaggctggagttttcttatctctatctccagcaccttgcaggttacccagcacacggtaggagatcaatgaaggtttgtaaaatatatccatgtaacttactgttatggactgaattgcatctccaccgcccccccagccgcctccaaaatttatatgttgaagccttcaccaccaccgccccgcatgtgactgaatttggagatagagccgttaaagaggtaattaagatgaaatgaggacataaaggaggagtttttataaggactggtgtctttgtaagaagagataccaggaatgtacatgtactgaggaaaggccacgtgaggacacagtgagaagtcggtcacctgcaagccagggagacagcctcaggagaacccaaacgtgccacctctttgctctttgatgtcggacttctagcctccagaactgtgagaacatcagtttttgttctttaaaccacccagtcttagtattttgttctggcagcctgaactgacttaatata

SEQ ID NO: 15761 - DNA, 1026 bp, Homo sapiens
gctaggtttacagcagtgagagatgtagtagcaaacaacagtggccatgaagaagcagcggctcagtccgaaactggggaaatcactgaaatgaaaggtgcagagtttcacaaagaaggaaggggcaggagccccctcatagaagaataggaggccaatttcagcaaaaaatttcagggctctggggttttgtattagcatgcctctttctcctcaaattaggattattttatttttattttattttaatttttttttgagacagagtcttgcgctgttgcccaggctggagtgtagtgacgtgatcttggctcactgcaacttatgcttcccagattcaagtgattctactgcctcagcctcccgagtagctgggactacaggcgtgcgccaccatgcgcggctaatttttgtattcttagtaaagacagagttttcaccatgttggccaggctggtctcaaactcctgacctcaggtgatctgcccgcctcagcctcccaaactgttgggattacaggcgtgagccaccgctcgcagcttaatttttgtttctaatgtcagtccctcctgcccaccccaaataacatctattgcttttgttaccaaaataatatgtctttgttatagaaaatagacaatctaaagatataattactcctaattttaccatccacatgtaatacctatacctttttttttaattgaagtgagactcataaaattaatgattttacagtgtacagttcagaggcatttaatagttgcagcattgtgcaaccatcacttctttttttttgaaacagagtttcgctctgtcacccaggctggagtgcagtggtgcgatctcagctcactgcaacctccgcctcccgggttcaagcgattctcctgcctcagcctcccaaagtagctgggattagagacgcgtgccaccacacccgggtaatttttttgtatttttagtagagacggggtttcaccatgttggtcaggttggtctcgaactcctgacctcaggtgatcc

SEQ ID NO: 15762 - DNA, 1056 bp, Homo sapiens
ctgcctcttgaattttcctgcctcctcaggtctttctcttcaccccagtacaacccagtatccaaagtcagcaactcagaattgtctttgattcttcccttgactcaggtaccaacatcctattgattttgtctcagaagtgtcctcttgggcccaggcccctggtggcctttcctgttggcccagtctgggccctcagcacctcatcttcacactccctgcaatagcttctctgtctggtgtttctgcctccgttctccattccagcccgtctttgatgtaaccattgtttagtccaaaacctaggttgagttgacattgcccatgaaatagaatacagatgcatcgggtcggcggcttcatctggccacggtgcaggaaggcagggagaacccggatttgagtggtcagctccaccagtcactgctgcgcacaaccaggctatatcacctgtctgtgcattagtgtccttgtctgtatctgaggataaaaacactgcctttctcatagggttgatgcaaggattaaatgagtgaacatttaaaatccttagaacacagcctgacacataaaaggtgcttgataacggttagccaagattatgttttataattatttcttggcattctcccctctgggctgtgagctgcttcctgtattgtgcctggctgtagctttttaataaccaattgctgaatcaatgaatgagagaaagaaaaaggggccgggtgtgttggctcacacctgtaatcccagtactgtgggaggctgagatgggtggatcacctgaggtcgggagtttgagaccagcctggtcaacatggtgaaactccatctctactaaaaatacaaaaattagctgggcatggtggtgggcacctgtaatcccagctacttgggtggctgaagcaagagaatcacttgaatctggcaggtggaggttgcagtgagctgagatcacgccattgcactccagcctgggcaacatgagtgaaactccgcctcaaaaaaaaaaaaagagaagaagaagaagaaagaaaagaaaaagggagggaa

SEQ ID NO: 15763 - DNA, 1549 bp, Homo sapiens
aaatacatgttgagaattagtgtcttaatcatagaatattgcagcagaaaagaacctaaaatcacccagtttagagtccttaggtgggacaccacatgaacagcttcctggggttgttaggactttagttttgagtatacatgaagttgcccgtggtcaataagtttgggaaacgcagctcattataacttctttgtagtaagccaaaattaagatatttcctacattttatcaaacagacattaaaaaaatcacagcacactgatcaacatattccaaggaacaccaatttgggaacaagtaatctaaaataaagattaccactccgtaatgggttatgaaatcaatgtaggggttacaactatctttttgttttacaaaaaataatacagtagaataagaaataccagagtgcattgcacagaggaggctattattttgtgaaacctttgtttcagttatgtatggtatatttgtgtgaactcagtcagaatgaagcctatttgttactataaatggtggccaaaaatacgctggagaagactggtctgattcagttcctcaattttacaactgaaaacacagaggagacccatgtggtcctaagatcacacggggagttagtaacagattgagtctgagtctgttcttcatcctcagtccccttcaccactgcttttgctaaatccatagaccatcctgtttaaaaagcaacactcagggaaacaacgcaaacgtccatcagcaggtggtggatgaacaaaacgtgtcttgtacagacaatggaatattactcagccttggaaaagaatgaaattctgacacaggccacaacatagatgaactttgaacattatgcagagtgaaaaaagccagatacaaaaggacaaatatcatatgattccacttatatgaagttttcctagaatagacaaataacatagagacagaaagtggattagtggttaccagggcctgggggaaggtgggaatggggagttagtatttaatgtgtacagagtttgggatgatgaagaagttctggaaataaatagtagggatggttgcacaacagtgtgaatacaccaaatgccactgaactgtatgtacacctaaaaaattgtttaagtggcaaatttcatattttgtgtattttatcacacattccaaaatgaatctaggcgcaaaagaagaagaggaaacagaacaacgtagcatttcttgtagacagacctcatttcacattccagcagccgtttattccttcagcctaccccttggtgggcccaggtcctgaggattctgaggcaaacaggacaggctccctggccttaggaatccatggaaccgactgtggccaagtgtggccttgattctggaatccctggcaggtgatgactgctggcatttccacaggtgatgcattttacagcagcgagtgatgcttagccaatgacctttcatgtgctaatagctctgatttttccaattgcagcatttggataaacccacaatttgcttttggaatgccaaggaaaaacatcgttta

SEQ ID NO: 15764 - DNA, 1049 bp, Homo sapiens
gctaaatattgagatgtgtagacccgtgcctctgttttccttttttgcttttttttgagacggagtcttgctctctctccaggctggagtgcagcggtgcaatcttggctcactgcaacctccgcctcctgggttcaagggattcttctgcctcagccgcctgagagtagctgggactacaggcaggcgccaccacacccagctaatttttgtatttttcgtagagatggggttttaccttgttggccaggctggtctcaatctcttgaactcatgatccgcccgcctcggcctcccaaagtgctgggattacaggcgtgagccaccgcgcccggcccatgcctctgttttctaaagtgcccttttgaatgtatgttaggatgttcttccacacctgctttgttgataccaaatttgtgaattgtttttaatcgaagtgcagagctcagcgtggagtacttcaaaccaagtgacttaaacaacagaaacttactgtctcaaggttctggaggctggaagtccgagaccaatgtgtcggcagggttggttccttctgtgggctgtgagggagggtctgttccacccctctctcctagcttctggtggtttactggcattttgctggaatgcttttggccttccttggcctgtcgaaacatcactctgatttctgccttcaccttcacttggcattcgttttctccatgtggtgtctatgtccaaattttcccttcttgtaaggacacactggtcgtattggcttagaggcccatctttctcccgtaataattcatcctatttaactaattacattttcaatggccctgttcccaaataaggtcatgttcagatgtactgggggctagatcttcaatgtaggaattttggggaggcataaatcaccccatagcaacccttttcttaagggagacattttgctgatgaatatatggagaagcagaaagtaaggaaatatttaaagaacaaaatggtggggtggggggcaggggtgtcaaagggattcgcctgaagttgctcctagtagccaa

SEQ ID NO: 15765 - DNA, 1048 bp, Homo sapiens
ttctgcacaaactgaaattgttacaggctatccctccctggccagggcagaacaggcctgggcagaggtggtgcctgctccactttgacatggggcctgcctccttatccccgttctttaggcactgccccagagccacgtgtaagtcccccactgttgctaatagggggctttcttcctcacaagtggtgagaagggggaaaaaacacaaccagacactactgtcctagatcagtggataccaaactttgttgacccggcttcccagtaagaagtgtatgttacttggtgatcagtaaacatgtatatacacaactatgcaaatacaaatttcactatatgttactgcagatatatggtagtccattctatttggttctagtttgttacattctgttccattaaaacagtgctgcttatgatccattccgttcatttcatgacccatgaatgtatctggcccacggtttgaataacaatgtttaaagtataggctgggcgtagtggctcatgcctgtatttccagcactttgggaggccaaggcagacggatcacctgaggtcaggagttcgagaccagcctggccaatatggcgaaaccccgtctctactaaaaatacaaaaaaaaaagaaaatagtcgggcatagtggcgggcacctgtaatcccagcctctcgggagactgaggcgggagaatcgcttgaacccgggaggcggaggttgcagtgagctgagattgcgccactgcattccagcctgggcacgacagagtgagactccatttccacaaaaagaaaaaaaaaaattactttttttttttttttttacatttttgctaaccatttcttcctacaatatgggctcttgtttgcttttctttttgtgcattgattttttatttttaatagagagttgatttttattcccccaggtggtttttaattttaaaagaaacttgggctcatccataattttttttactcatttttccatgtaatttttctcagttttttttctgggggtgttagtgtatatatacacacaaaaa

SEQ ID NO: 15766 - DNA, 1033 bp, Homo sapiens
tcagtgcatattgttattagtgtggtgttttttgttttatatcttgtaggtttgctggagattttttttttttttaccccatgagacagcgcatagtttttaaatttgaaactttggttcctgttttaatttcctgtgggttaccctgacctagtaaataacaacagtggtcttcaggatgaggttgactgttaagtcttaaactcttggaaagtttggttgtatggtgctcttgttacaataaatgaattcctgttataataaatgtagttaatatcaactctatatagtggctcaggtaagattttgtttcagtcagctgttgtcaaattggaagcctcactgacactgttgtcctatttgcaatttttatgtgcgtttagactgactctgaaacataatagtaaccattgatgatgcacttacaaggaattctacagagaatatttttagtaataccatacttttctaatactgtaatcgagttttcatgtttcaaagcttactgtgctttttaggaagatgaattctgttttttcaagttttgcaggatagtaaattattatggtagtttcggtggcatatttttttttcctgcctgattgctatcctttatgacttggggaaattgcaggggaattattatgtacatactgtggcatgtagattccaagaatgaaattctgggataatcaattccgttttttattttgtcagtcacggtcctggcagaagacagatggcacactcagaaagaagaaactgtggggagaggatgagttctcagtggtaggcagggatgcgagaaactagcaaagccgggggtgcactcccccaggatgaggatggcaggctacccccagggaacttccatccccccgggacctgaacgggtgaaggagaagagcagataatagatgccagaggagaaagtagctgggctaatgggtgtctggtgggggtcatggtctttgatagcagggtgcagctcactcactgcagcccagcacagagggagtcagggggttaactt

SEQ ID NO: 15767 - DNA, 1055 bp, Homo sapiens
tggaactgtagtgatcagcagctcttcaccctgttggtataaaatgcgggatttatagggatgcagtgagtggttggagagtacggggtcccagcacaaaacgcacacatgatccaagggtactgaactcccataaccctctcttcgtgacaatgccactttttctcctaaaaccatattgctggcagtgtttgtttaaaacaaaaggaaacatggagaatagcgtgttagttcctctgggaagctactgacaaataagcaaattaaaaagaaagagagcagcatgttgtcatagcaacagtgcaattaaattactttactgtcagccatgatataattttcctgtttggaagctcaggagacataaaactttcatttagagctaaagttgacttcagtggctgggtagttctgttttatactctactgtgggcatatgctggtcatcagaaaattttctgatgggatctgaggaaactttaagaaagacaagtggtgctataattcgttcataaagaagttaaaagcaggatcagaccagactctgttgtatccccaagccaaaagatgctagcttgttttttgtctgaaatgtgtcagggtaacctccttatttgacagaaagaaatattccctgtgagtgaacccaagacgtctggagcatcctgcctggtctgtactgcaatgcctcatgaagttttctctccttaagagttgggcatcttggccaggcgcggtggctcacgcctgtaatcccagcactttgggaggccgaggcgggtggatcacgagatcaagagattgagaccatcctggccaacatggtgaaaccccgtcttactaaaaatacaaaaattaaccagtcatggtggcacacgcctgtagtcccagctacttgggaggctgaggcaggagaatctcttgaacctgggaggcaggggttgcagtgagcggattttgcaccactgcactccagcctgggcaacagagtgagactctgtctcaaaaaaaaaaaaaaaaaaaaccggttgggcctctcaccacagctccccctt

SEQ ID NO: 15768 - DNA, 1048 bp, Homo sapiens
ttgccccggcttattactgccccaagaaggtaaatcacaaatcacctttcagtttcatcctttttaacgtaaggtgaatggtatgaaaaatttagcaggttcaggtctctgcagggaggatgggttacatagggttcaggtaattgggaggagggttttccaggagagactggtgttagtgaatggagtcgttggggagttcttcagtcacaaagcattatgcagatgcagttgttgttgttattctgaatcgaggcagggaggagggaaagggcccagcaggttgggacagtgcaaaggcctctgggggagttggcctgaaggctgagagataagactttggggaagggcagggttggggaggaagggaagccggagcctcggccactttctcatacttaattcaggggttccttttgtgcattcagacctgtgcccatcctctctcctaaagaggtcagcatccagcccctcttcatggcttggacacgtgaacccaccattgccatcatgtctgccttgctacagcctagttagcatcacctgaaaccataaataacatcaaagaaaagagcctattactaacccactgcagagtcccactgttgcccattgacaggttgacaggggttgaacgcactgctttgcagtgtacttttcatggcatctgtgtgaagagaccaccaaacaggctttgtgtgagcaacaaggctgtttatttcacctgggtgcaggtgggctgagtccgaaaagagtcagcgaagggagataagggtggggccgttttataggatttgggtaggtaaaggaaaattacagtcaaagggcgtttgttctctggcgggcaggagtcggggtcgcaaggtgctcagtgggggtgctttttgagccaggaaaaggactttcacaaggtaatgtcatcacttaaggcaagaaccggccatttacacttcttctgtggtggaatgtcatcagttaaggtggggcagggcatattcacttcttttgtgattcttcagttacttcaggccatctgggcctatacgtg

SEQ ID NO: 15769 - DNA, 1146 bp, Homo sapiens
attccctgcatttgccgtcaattggaagaggatgcaaaagaggagaaataagtggagcttcattttagtttgtggcaaagtcatacttgtcagcaaaatggcggcccccgggaggtctggatgtattggttactcacatctcagtttgccttaagcggatcaacttgaatgccttagacgaccaagttgtaatttcggaaggcacagatactaatggaaaagagatgaaaaggaagaaaatgaagtggaagctgcagactagaggcattcagtcgttgctggaggctggaataccaggaagttcctggaggggcagccctgtgtttgctggctgactcctccctacccacctgctcagtgacgatcacactgtgacttatgtggggggcagctggtagatactttgtgtgtgcatgtgcataagtgaataaagctaatgagatggagatgggaatgaccctgatattctgttcaaataatcagcctgtcttaaaggacactgttttatgtaaacctaaaaactggaaacaatgtttgaattaattttacaatacaatccagagtgatgtcctagcttactgcatctagaaagctcttgagttgagatttaaatggaaaattccaagtgtcttctccctcagtcaatgattaagaacaaatcttcatcaattggagaggatgtaacatagcctctcagtacctgaaatgataaatagctcaagttggaggtattagatcacacctcacattctttgcaactctgaaccctgtgagtttcagggagtctcttttgagtgcagacagtggtacaaaacataaccttgtgggacccccttgaaaagttcttctggattgtattagtccgttctcatgctgctaataaagacatactcaagctaggcgcggtggctcacgcctgtaatcccagcactttgggaggagggtggatcacgaggtcaagagattgagaccatcctacccaatgtgttgaaaacccgtctctactaaaaatacaaaaattagctgggagtggtggcgggtgcctgtagtcccagctacttgggaggctgaggcaggagaatcgcttgaacctgggaggcggaggttgcagtgagccaagatcgtgcgactgcactccagcctggc

SEQ ID NO: 15770 - DNA, 1031 bp, Homo sapiens
gatgctttaccgctgggatgattggaatatgagttggggaaccttctggacactcatgaacgcctgcattggtcaggcatgcacttttgtaatggaacaggagaagaagcctttgggaaaaggcagggggtgatgaatttggttactgttttcttttctttgagatggagtctcactctgtcacccaggctggagtgcagtggtgtgatctcagctcactgcaacttccgcctcccgggttcaagtgattctcatgcctcagccactaaagtagctgggatttacaggcgcacaccaccacgcttggctaatttttgtatttttagtagggccggtgtttcaccatgttggccagggtggtcttgaactcttgacctcaagtgatctgctggcctcggcctcccaaagtgccgggattacggtgtgagccaccgtgcctagtctgggtactcttttcagtctacagtctctgaactctgacaacttcctgtcgctctgagtgtgactgtgcttgtggttcctctgagagtcgaggtggagctacccaccccctctccacactggtctcatgtgtgatcggagctgtgtgctggggagatgcacagtcaggttagagggcagcttgggtcctggagctgcaatggacacacacccctctctgcttagctgtggctgccctcagtgcatatgcagggctggctccctggcagatctgactttctctggttctgtggctgtcataagatttattcagaatccctcttatgagttttggaactgaagctgttctcaaaccagtcgcagattctacttgttaagagaagcaatgtatacagaatatcggcagttaggaggcatgcgtgggttccagtcccagtctcactggcagtgagaccttgagcaagtcactcaacttccctgagcctcagggttttcatgtgcatcatggaggaattctccttcctgcctcctgcttttctctaatcttcccccatggtgagaggcctctcccaggaggaggtctgcctgct

SEQ ID NO: 15771 - DNA, 1035 bp, Homo sapiens
tcttggtgctatcgggcggtgttgatggttgttaagttgctggatgctgaaacagaaaagctgacaaacacccattgctgaatttttactttacccaagtcacgattcctgggctttttttgtcctatattaggtgattcttgcattgctataaatacctgagaccgggtaatttataagaaaagaagtttaattggctcacggttctgtaggctgtacaggaagcatgatgctggcgtctgcttggtttctggggaggcttcaggaaatgtacagtcatggcagaaggcaaagggggagcaggcatgtcacatggcctgagcaggagcaagagagagagggaggaggtgccacacacttacaaatgaccaggtcttgcgagaagtcactattgtgaagattgcaccaagaggatggtgctaaacctttcatgagaaatccatccccatgatccagtcacctcccaccaggctccatctccaacactggggattacaatttgacatgagatttagaggggacacagatccaaactatatcagatgctaaaacaaaaaagcccccatatgcccattgctctatctgttaatttacccaaaattatgattcctgggcttttttttttttttttttttttctgagacagagtcttactctttcacccaggctggagtgcagtggtgtggtctcagctcactgcaacctctgcctaccaggttcaagcagttttcctgcctcagcctcctgaaagctgggattacaggcacatgccaccacacctggctaatttttgtattttagtagagacgaggtttccccatatcgtccaggctggtctcaaactgctgacctcaagtgatctgcccgcctctgcctcccaaagtgcttggattacaggcatgagccactgtgcccggcctgatgcctgagcttttttccccggagataaatgttgcttctcccacacagtggtttaaattttttttcaatttcgttgcctttacatgaggcatacaccctctagatgaccccagt

SEQ ID NO: 15772 - DNA, 1044 bp, Homo sapiens
catcagtgcttctctttttatggaaatgtcctacctccccagttagacaataccgtgggtatggatttcaaggtgcaagaaatgcatttctttactgaatttatttcttgagtttttgtgccacagggatagcagaaaagaaattctagttagtttgggggttttctaatgttttttatttgaacccaagttctggtttgtggaggcatagctggcctttaatgtcatcaactgatggagacatcctcatttatttgatatttcattgtcagttaactgtgagatttttactcattctttactataaggcccttccattggttcagggctcagctgctccgattccctttataggtatgtaaatataaagaggcttgtgtgagagtccagggtatcagagaacctgtctgtgggtcagtgggtagaagaaagtactaaggacaacaacaacaacaacaaaaacagccaagattgttatacatcaaaaatataatgccaccacaaaaagtaagccccttgagggcaagaactgtatcctgaccatatcctggtatcctgtccagcaaatcaagtttttcttttcttttctttttttgaaacagagtctcattctgtcacccagcagggagtgcagtggtgccatcttggctcactgcaacctccgcctcctgggttcaagtgattctcctgcctcagcctcctgagtagctggattacaggtgcacaccaccatgcgcagctaatttttgtattttttggtagagatgaggtttcaccatgttgaccaggctggtcttgaactcctgacctcaggtgatccctgcattagcctcccaaagtgctgggattacaggtgtgagtcactgcgccaggccaaatcaagtttttcttaatcaatatttgctactgctcttaaatgaggaagaacagtcaatgggccacagaaatggaaaaaaagattcccagtgttcttaaaacagtaactttggccgggcacggtggctcatgcctgtaatcccagcactttaggaggccaaggcaggc

SEQ ID NO: 15773 - DNA, 1046 bp, Homo sapiens
cccaaaaccctaccatcttcataagacaagtttctgcgtagcatataaccttcagcttctgcccaaaagaatataaatgtttataaaattgcaattatgggtccgaccgcagtggctcacgcctataatcccagcactatgggaggccaaggcaggaggatcatttgaggtgaggagtttgagaccagcctggtcagcatggcgaaaccccatctctactaaaactacaaaaaattagccggacttggtggcgcatgcctgtaatcccagctactcgggaggctgaggcaggagaatcacttgattctgggaggcagaggttgcagtgagccaagatcataccattgcactccagcctgagtgacagagcaagactctgtctctaaataaattaattaattaattaaaattaaaattaaaaaacgaaaacattgcaatgatgatgcgataccattctgtattcttgctcccacttaaaaatatcactttcatagtctttatgtcattttaatagaaaagattccatcgtttcaatgtagtaaaatttaaaccatttcctttttctttctttttttttttttttttaagtaacttgggtaaaagcaagtactctagtctgaagcctggctttggagacttagacatggggtactcctgaataattttacaagaaaaatgattttccaagaaataaccactttcagaacattctaagaaattgttatgatgtcaacattttcatacaagaaacatttactccttgtgagaaacattgactatttacattttttttttttttgagacagagtctcgcactatcgcctgggctggagtgcagtagtgcgatctcagctcactgcaacctccagctcctggcttcaaccagttcttctgcctcagcctccccagtagctgggattataggtgtgcgtcaccatgcccggctaatttttgtatttttagtagagacggggtttcaccatgttgcccaggctggtcttgaactcctgacctccagtgatccacctgccgcggcctcccaaaat

SEQ ID NO: 15774 - DNA, 1062 bp, Homo sapiens
tttcattctaagactttcagttggttccttttcatttctacctctttttatttcacaactttctgattttacaatcttgctagtaatctctattatgactgaggatttttaagtctttattcagagtgttctgtagtacatatttcctcggatatgaatctcctcattcattgaactgcttttaatcatggtgcatatccttttgtaattttctttaattaagagcttaacttccctacagatttgccctataaaggttctctttgggaattgtctcaaccccaggcctatgaattcctcagctctgaaacaattcataagttaggcatagcttgggaatcctactgcagggaagtgatttctatgcccatgtgaaatgcagactcagaagctagttatatataggtgtcttatcttcatctctaatcataggtaatttggggccttgaccctcactgaaaaaaaagaaactgatatcacccccacagctccccgccccacccctagatttatgtggagtcatgctcaggattcatattcttttccctttgcagatgtagaaacctcagaccccatgtcttttcagcacctgcccctacctccaatctcacaatggccatagtcttacacgtcactaccagcatgggtttattatcgttttttattcacagagacttttctttcttgtttttaaaaatggttctatcagtcagggccccagcagaaaacaatgttattcagatacctaaattcaagagatttgaatgaagggactatttacagatataaggccaggaataaagcatacaacaaggtcatttgaggtgcccagagactaagaacagcaggctctaaagggcaagggaggaaatgttattacaggagcccaagagagctggagctattgagaagggctgcctggtagaagctgtatctggaggaaagtagccattaccagaaggaagcagggaggctacaggaaagaaatatcccatcctctcttctcccacactccagtttcttggtggaacttctgttggccaaacctaactggaagggagc

SEQ ID NO: 15775 - DNA, 1033 bp, Homo sapiens
ctcagttttcccattgctaatgttcccctcctggctacaacattaccataaaatgttatactctttaatcttattttcatattccccaaacaaaacaaaacaaaatctttcatctcaaagggatttttagcatgttgcaaattatcattaaatcacacacaattttctgtcttcaatttttcaatgtaaaaaaccacattttaaaacctactaggttatatttcttaggaaaaaccgtagacatcaaatgttcacttctaatttagatgcgtcagctgacatactagtttcaatgagttgcagtaatgaatttgtcatagaattgaagccattttctagctataaatcgcccaaacccaaatgctataggaaatttacaaggactgccattagaataggatattttaaattatctcagttgtattgaaacaaaaccaaacctgattaacagatatatcaggtaatcatgaattgatgtgacagaaaagagttattgggctatttgtcaaatgataaactggatgatgatgatggggaaagttacctttaatttatttatttatttatttatttatttatttatttatttatttattttagtgctctaatgagtgccaggcattgtcagtatttcatgtaatcctcatgataaccttatgagatgtacagtattactatttctattttacagataagaaaactgagcttggagaggttaatgttcccaaagtcccacactttaaatagctgaaaatgtttcacattgcttgttgtcaccttgagttcaccatatttaaagtgaaagtcatcatcctcatcccttgttgttctttctgtttcgtcagtgatatcatgattttctgtttcattcttgcagtcattgatttttccttttccgtctttgctctaaatccattcaattaccaagtccctttcctcattcagtgtctttctgctgtcagccctcttctcatcacttagtgtctaggcctcccaactaaatgtacaggctaaaggccaaactccataactc

SEQ ID NO: 15776 - DNA, 1047 bp, Homo sapiens
catctggcagatgttcccatttgggataaaagtaacttaatgaaatatgaccagagccagcccttctcaatagaaattagtaaataggttatttgaatgaagatttgcagtcattatcattaacagtgacatatatgaaattcatttgctgcatcattgacaagcaagctactgagcaagctattgaagaagagcaaagaagttaaagccagatgcatacaaaatgcttatgggaaaacattacttagctgattttgtaaaagcaaatcctttaaaatgtagcatctttgtattttgtgatgagataggtagtgaatatcaatatacttctaccatacaaaagttgtttttaacaaaggaactaaaaattgatactcattttctttttacaaaaagaccagttgtccaaatatgatgaactttatgtgttaaatggttttagtagatactaccttatagagatttttgaaaaatgtttttaaatatagccattcaagatacaggcaatgttttaacgatgaatgagaaagtaacaccttcttagaagaaaagctatgctacagggagaacatttttgaaatagatgtttgaaaatgttattttattttaaaacataatgtcacctattaaaattcatatctgcatgtttggtatgtttaaaatggaatgtcctggccaggcatggtggctcatatctgtaatccccacactttgggaggccgaggcaggtggatcacctgaagtcaggaattcgagaccagcctggccaacatggcgaaaccccatgtctactaaaaagacaaaaattagctgggcatggtggcatgcgctgtagtcccagctactcgggaagctgaagcaggagaatcacttgaacctgggatgcggaggttgctgtgagctgagatcacaccactgcactctagcctgggtgacagagtgagactctgtctcaaaaatctgtaaagttgtggtgattttagcacacaattattaaaaacagaaattcggcctggtgtggtggttcatgcctgtaatcctagcact

SEQ ID NO: 15777 - DNA, 1035 bp, Homo sapiens
ccctggtcgcctgccttgttcagatctgtgccaacaagcgtttattgagtccctgctaggcagtaagtattgtgccaggtgttaggaatatatagttacttaagatatggttgtgtcacgtagctcatggtctgtcttgttggaaccttcctctcaaaatatcttgaaagcggcatgactttaggaattagctcgggggtccagtgatactaggtgaactggcagtgccactgtccctggttagactggcctggcaggataagaactaggaaactactcccttcctacccatctggagacccttcttgctgaacctcagctggtctttttgtaacctaatcccgggagtgaccccccatcacttttgccatattttgtgtgttggaatcactaggtccagctcacatgcgagtgtgaaaaccacaaggcagaggtagggtcatgggggctatcttggaagctgcctgccacgctagatagatcttttttctatcttggggtgtgtagcatgtatctacttcaaagactgatggcaaacatgatttcaaggatcataagcttctcttatatccaccagcgcggattttgcccactgactcagcagttttatacaagtgaggtctaacgtccattctaaaatctgaacaggtggaattctttgaacccttttgggacagtggagagccccgggctggggagaagggagcccgaggctggaaggcgtggatgcaccagcaggaacgaggtggctgggtggtcatcaacccaggtaagtcacctctcattgaagacgtgtacttctgtttcttctggaatttgtttttacatcctcatgattatttatctgcttaagctatttatcagtagcttcagaatattgcacaaacatcaaaatgtcaaaaatgttaagtagatgtcatgggttccccttagaagttttaaagcagtggacttattccttcagtacataatgctttgaggatttgaaagtttctgtaatttccctttttccttttataggctgcaactgaagaa

SEQ ID NO: 15778 - DNA, 1069 bp, Homo sapiens
gaaaaggaatcgcagagaggttaagtaactgcgcaagatcatgcagccaggcagcagcaaggttgggatttgaacccgcgtgtctttgacttcacatttcaaatgttctttcaccacccatgcagaaagatgagacagggtgtgtggtaggacgttttctagatttggaaacagaggactctggttctctttgtgactttgccatttactagcaataaagtcccaggcaaatcacctgacctgtctgagcctctgttgcttcatttgtaaattggaaattgtaacttctgccatgccttgcgctcaagtatcagaatatttgatatggaattggaaattggtgtgcaaatataaagggttagtatttattaataggtgaaaggaggggagtgtactaacaaagagtggctcttgagcttctgctaatgaatggcacaggcttagggagagagtaattggaaacagccttattaatctaaactgcaaggataccactgctaaagggcttagggcattgttatttcctagccatttggtaaagtttacacaagacaaatcttgcctggattagtagctatataactgttaatgtccaggtctgggaagatgttgatcccatggcagtctgagctggtcagaggacagtgggaatactgtcactgagcaatgggcttaatgcctcaagtgcatagaagtcaatactatggcaccagcttttgagagaagcaacagctttattgcaaggtcaataggaggcagcacttgaatctgtctcccccagatggagtctgtgtgttttataggaagagagtaactgtgagggagataggaaagtgcattgaggcgtgatttgattgggttatggagacagacagtgtagggttcttggttcttttttttttttttttttgagacagagtcttgctctgtcgcccaggttggagtgcagtgatgctatctcgactcactgcaacctccgcctgccaggttcaaacaattctgctgcctcagtctcctaaatagctgggactacaggcgagtgctaccatgcccggctaatttttttttt

SEQ ID NO: 15779 - DNA, 1104 bp, Homo sapiens
tgtcttattgccctttgtcttattgcactttgcagatactcattttttactaattgaagatttgtggcaaccttgcattgagcaaatctatcagtgccttctttttttttttttggagatagagtttcacttttgttccccatgctggagtacagtggtgcgatcttggctcactgcaacctccgcctcccaggttcaagcgattctcctgcctcagcctcccaagtagctgggcacctgccaccatgcccagctagtttttgtatttttagtagagacagggattccacatattggccaggctggtctcaaactcctgagctcaggtgatctgctcacctcagcctcccaaagtgctgggattacaggcatgagccaccgtgcctggtctatcagtgccatttttccaacagcacatgctcactgtgtttctctgtgtcacactttggaaattctcacaatattttaaaattcttttattattattacatctgttgtgatctttgatattactattgtaattgtttgggggcaccatgaaccacacccatataagacagcaaacttaataaatgtggtcctgactgctacactgaccagctgttccgccatctttttccctctccttggacctccctattccctgagacacagtaatattgaaatgaggatcattaataaccttacaatggcctgtgagtgttcaagtgaaaggaagagtggcatgtttcttactttaaatcaaaagctagaaaggattggccaggcgcggtggctcatgcctgtaatcccagcacattgggaggccgaggcgggcagatcacggggtcaggagatcgagaccatcctggccaacacagtgaaaccccatctctactaaaaatacaaaaattagccgggcatggtggcgcatgcctgtaatcccagctactcgggaggcagaggcaggagaatcccttgaaccagggagttggaggttgcagtgagccgagatcacgccacagcactctagcctggcaacagagcaagactccgtctcaaaaaaaaaaaaaaaaaaaaagctagaaaggattaagcttagtgaggaaggcatgtcaaaagctg

SEQ ID NO: 15780 - DNA, 1033 bp, Homo sapiens
cttttttttcctctagagcaaggcttatgaagtatttagtgcccagccttccaatgcgtccatgtgcttgttgagaggaccctgaaaagtgcacaggccctcatttctctcttgcctttcctcgctataactgcagttccaactcacagtgccgaggacaaagtagtgcctcctactggatgcctcctactggacacttcatcttcgatctttgctctgtcttctgtctggtgacacacactcttcgatagctgcttgatagttttagcttcttcgatagctgtgtgaagccctttcaacaattattgatacttggcttaaggattacctttctctacaaagaactttgaagcctcatatgtcgtgtctgctgcgtgtgctctcctagtacacagtgagaggggactttcttgtttactgatggggaccctgctgttggtcacctgccccaggtcacctgtaagttaggagcagaagcagaacaagaaagtcgtgaaatcgtatgttggtgtggtcccttaggaacccagagcttcagtgacaggcggtggaaagatcgggagcacggtgctggcgccagctgcctgggttccagtcccagctgtgtcgcttactaactgcgtaccccgagataagtcccttcatctctctgtgcttccatttttctcgacagtgaaatgggagtaataacagtgcccggtggtgttgctgtgcgggttaaatgagttagcagggtgcctcacactccgcaaatatcagctctgagtgtcgctgtcattctctgtaatccaggtcgcgcctgggctgggagatcctttgcgtctgtttgacagtgagtgagtcatctcctggccccatggagcttccctttctgcaccagcgtgactgactttcactggttggaggagccgaaatgagaatatatctcggtgcgtggtcggccgcgagcacgatgcttcgcttttgagtgtgacttgctgcctgtttctgcagagccagggccctggttttgaggtggaaaagggtgggagag

SEQ ID NO: 15781 - DNA, 1048 bp, Homo sapiens
tgaattaattatgtggaggtgctttgataagggaagcattttgtgagcatccttgtggtgacatttttaggtcttttaggtatttctgagcagtctagccaggtgttcagtttatgggcacggagtttatgaggctgctttagattcatttacagagttcagaaggcttgcaatttttctgatcactaatgtcctctctctcatctgcctggcctgaggatttctgtccggcgagttgcctgtggcataccaaaggggctttcccacaggaagcttagctgctgaagttgctccacgggaagcaagtattttagcatctacttgagatcaacacagggagctttttcttgttttgtttggcatttgccttatttccttcagagggtgaagtggtcagttgaattcattagccaagttgtagaaataaggtttttaaaatgtatatgtttcagttgtgcctcattagaaatttggcagttgaatatgcatcattagccaagttggaaatccttcagatgttgccctaatgcactccagaaataccaagatttctagcacttctggtttgttcctttcacggtgctgtggttaacagagaaaaatcatttgatgaggccagcatggggcctttagccagaactatctttatgtacaccctcaactcaacagatcattgccagcttttcagttggttggtattgcatagaggcaaccatgacttgatttattcgtgaagaatatgaattgaactgagaaaattataattctaagaagttctttttgagggttctgtaaatttattatttgtgaaagaagataaaataaatctaaaaatttcttcataattgtgtattatttttcctgaataattatgagagaaaccatgatttttcaatctcacttttataaacaccaaagaaaaatattctttgatgtacaaattcatggaaagccaatatttgtaaaattataaaagctgctatatactgagtggaccttagaaataagccatttagtagctgggcgtggtggcttatgcctgtaatcc

SEQ ID NO: 15782 - DNA, 1030 bp, Homo sapiens
catggaacttgatgacacaattgggtgttgggaaatgcagggctgggaattttctcccactctttaatgtagagcagaagcaggattcacgagtgaggtgcagcagggcctcacttgatggatgattcggctgctctagagcgcagctgcgtcttctatgaggctggctatgaacccgaggccagggaaaactttgtatcggctgccaaggcttcctccagatgcctgtcgacaggtacaggtgccctctaggttcacacttccaggacttcagtgtttggatcatcccgtatatcatgttctgcggtgcccaggggattttgaataaataacccaagatgacaggcctctgctcattcctacccttgtctccattcccttcgcaaattggtaggggcaggagggcctaggtggactccccgccatgcagcactaggttctctctccatctgcttctctattccatgttttttcaggccaaccgggacgctgtgctgagcaggatacctgaacacaagagtgaccgcctcatcagtctgcagagtgcatctgtggtctatgacttactcaccattgctcttggaagaagaggccagtatgagatgctgtcagaggtacagctgctgagtctggttgacatccaggtggtgggtggcagttgcacggtgaccccagggaagcgctgtgagacctggtcctgggcccccctctattagtggcagccatgtgatcttgggccagtcacttaactttggttttctcccctgtagaatgggccttgggctaaatgattaggtggtggaattgatctagtcttttaccatgagagttccataacccaccaggctgtgagtttgtgtgtgagggaaggcaaacatttctcaagcagtttctctttccaccaactgaaaatctcccatctgtgatattaatttcctcatagaacaggtttcctttaaagtatcaatgtgtacagtgaaatcgccagtggcctgacaatttcaggcacagtgtgttatgttagctggta

SEQ ID NO: 15783 - DNA, 1087 bp, Homo sapiens
gttggcctgtgcccatcagtgttctgtgcagctaattgagccccgtcttatgaagcaggctgacggggaccccgccctcatgcttgtcttccagctctggccaggtctggagcagacacttccccagtggaagtggcgagctttcctctccagctttgtgttatgggctcataaagctttagtggttcacttttgagttcaaattttttagtgtgatctggcccttcttgatgaactcagaacagtctccacacgctcactgtgctaagtgtgatggagcagtcaggattcacacctgccagacacgcggtcatctgtccgtgccccaccccaaagccgtggctggagactgttcccctgcccccgtcaggggcaccagcactcttaggagatgtcacatcatttcccaggagggtgaccacaaggccccagagaaagttttttactgttcttacctgacatgggttgtcttttgtcattgtgagccagacctgggaattacatagggagttcctgggacatggtagactttcagtaaatagcaaagaggatcaatgaatcaaactggggaatatcttttttccttcaaaattaaatgacttcaaagaagtaaagcagattttcatatgctataaattgactggaaaacagattccagaattccaaaagttttttttttttaaaacaatgatagagttttgaggctaacagaagtaataatggcaaatacttaaaaagcacttcctacatttactgactagtttaattcttacaacaaatcaatgaggtggatacagttgttactgactagtttaattcttacgacagtgaggtgggtacagttactcaatgaggtgggtacagttgttactgactagtttaattcttacaacagtgaggtgggtacagttacccaatgagggcaatacagttgttactgactagtttaattcttacagcagtgaggtgggtatggttaaatgaggtgggtacagttgttatttccattttataaggaaactgtggcacaggcacttgcccaaggtcaacaattaataaatggcaaagcttggacttgaactcatgc

SEQ ID NO: 15784 - DNA, 1031 bp, Homo sapiens
taccttagcttttcacctgcagcttttcttttagaaagatggttatataatttcgtgtctaaaagtcagagttaatttttgtagcatctcctggtacctcttgacataacgggagattcatgccctgggaattgctgatataagaccttatcagacggcagtattttcagagcagctcttgctcatgctctggatgggagtatcgtgaatgaacacactgcaggaacacaccatgtggtctgagggatactgccctccgctgttggtttcagatgatgtgttacggcattcacttgttctaccagtgtttatcagcttccactctgagccaggcattctttgggtgctggggataaaatggtgagcagccagacaggcttttgctgtcagagagaaatcagatcgttatactcttggatgtataactatagcctaagatagttacagcattgaggaggaaaggtacccatttctgagagtccattttaaaatgaaattaacctacaattggtggtcatggggggttttcctgaggaagtgactgagcagaaacctgaagatgaattggaaagtaggagctaactggcaaaggtgaggtggggtgaagggagtggtgatcttattgtttagtcaggggcgtccagtcttttggcttccctgggccacattggaagaagaattgtcttgggccacacgtaaaatacactaacatgaatgtaagctgatgagcttaaaaaaaaaaaaaaggtctgtgcataaatctcataatgtttcaagaaagtttgtgaatttgtgttgggcagcattcaaagtcatcctgggtcgcatgtgggccacaggttgaacaagcttggtttagacccaaaagaatcctcaaaggcatcttgtccagccaactcatcctttattctctgctttattttactccttagcatttaactggcatcaaatacactataagccagggaatttgttaggtttagtgaaagattccaactcacaagaatttcataggctgcccttgacaccca

SEQ ID NO: 15785 - DNA, 1050 bp, Homo sapiens
caaaaaatacaagaattagccgagtatggtggcacacacctgtagtcccagctacttgggaggctgaggtgggaggatcgtttgagcctgcgaggttgaggctgcagggagccatggtcatgccactgccctccagcttgggtgacagaaattattcaggctgcttatagagagtgagggaaatagggaagcaagagaggacgtggagactccattcaggaggctgttgtagaaatctaacaggaagtcctggcagctcggatgatgtaatggtagtagaaatggatagtcacagacatagttgagaaataattaggagggacaaactttctaaagtgtaactttggttacactttagttccttctgttaaatttaactaaattaaatataatgatttaaatttaaaactagcatatataacatgatctcatttttttgtaaaatgatttttatctttctctgcttgatacatgtgtccacaaagatatctggattgtcgttcaataaatgttaactgtggttatttttgtgtgatggaattgtgaggtgatttttttattttcttttttgtgctgtactgaattttttactttaaaataatcatggcatgtcaaaattaaaactatgctgaaaagcaaatgaaggatgatttttaaaagtttccgtgttggacctccaagtgcagcagttggatatgtgagttggaaattcacagagaaagtcttgactacagctataaacttgggcgttggcagcatactgatgattttgaagctcttagggatggatgcggtcatctcaagagacctaagagagaaaggagtgtggctccgatggtgccgcgtgcatctctggcacttgacggatgagtggaggaggagcctgtagtgggtggaaatgaggttcccagagaggaggaactcccggagagtcaggggtgcagagctgagggctaagtcaggacggagctgggcaatttctataagatgctgggatccggttcacatgcaagggttgcccacctgggtttcattcctcgatgtctcgtt

SEQ ID NO: 15786 - DNA, 1050 bp, Homo sapiens
caagtgcctgtagtcccagctacttgggaggcttaggtgggaggattgcttgagcccagaagttcgaggttgcagtgagctatgattgtaccactgcacttaaaaaaaaaagtcaataaatatgttttatttgaccaagtaagctttagcttttggtagcatttgggaagcagcttctttagcctaaggttaaatctcagcgtaggtacacgattttcaaatttctggctctgattttcaaatttctggctctggcgttttcttttttggaaaaccagtttggacctccccagatttcagcaagctgagatattagcaatgagagagattgaatgaacccaacatctgttttgactgtagtaagtactcaagaaactaactgttgattaagcagaaggctagcgaggagaataaccttccttaggtgaccaatgggcttggtggaaagtttgcaggtttttatgtggcaagatagttgtgtgttatgcaagagatacttgattggcctttttctttttttaaatgttgaacttaattgacttaattttgaactcagtaagaattatgttgaattgaaaacagaaaaggggatggaatctgatcaaagccttgagcaatccaaggcaaatagggctttattttgggatcagccctgccaggtaggaaatcacacacgctgttcctgtttgctccgctgggcagaggtggcctctccatggtgccctgtcacttccccgccattctgtagtgaagaaacttctgctcgctggggcctgtgggccttttatttattagtcctggcgtttaactttattcactagcaagagtaaaatttggggagggtttttggagacagttaggagtgtcgtgaccagtgacttttcataattgtgcttctgagggagtgccgttctctgagtttctctagtagtggggatgttcagtgatgttctgggatgttctgagttgttgggttcctgaagggcagtgacacttcagaacgaggactgacctggcttcccctcgagggagctgacagaagctgtggga

SEQ ID NO: 15787 - DNA, 1082 bp, Homo sapiens
tagaacagatgggacaaataaaaaacaaacagcaaagtggtagatttaaacctatctgtttaaaaaattacattaaatataaatgatttaaataccctatttaaaagttagagattgtcagattggaaaaaataagcaaaactcaactctgttgtctacaagaaatacactttaaataccaagacacaatagattaaaagtatagattaaaagtaaagggatgattaaaagtaaagattaaaagtaaagggatgaaaaaatttaaatgctaacactaatcaattcaaggctgtagtatctatattaatatcagacgaagcaggttttagagcaatgatgtcaatccatcaaaagaatataacaattccaaaggtttatgatcttaataacagagttctaaaatacatgaaacaaaaactgatagcacttcaaggagaaataggcaaatgcacagttatgcttggggattgcaatatccatgtttcaataaatgataaaacaagtggacagatgattggtaaggatatagatgccttgggacaacacaatataccaacttgacctaatcgacatttatatgacattccacccaacaacaacagagtcacattcttttcaaatgtaacatttaccaagattgaccatatacagggtcagaaacaagttttaacaaaattaggagacttcgggtgtgttctctggactgtgtcagaggtcctgaagactaccatcaggcattgatatactggaaagactcccatagcttagaaaagctgttatactcatggttacagtttattacagcaaatggatacagattacaatcagtaaaagcaaaaaggcacatagggcagaattcaggagagaccaggctcaagcttctggttttcttctcccagtcgagtcctatagacagtgcttaattctccctgcaacggagtgtgacagtacttttgaaatattgccaatcaaggaagattacctgagctaccttggtgcctagggattttgttaggggtcagtcacataggcatggagcacccatgttactgaccttagtcagtctccagcccctgcagaga

SEQ ID NO: 15788 - DNA, 1027 bp, Homo sapiens
attgtggagctggaagggacattgaaagaccatctgctctagcaggggaatgtctaatccaaggctggcatcctcttcttttatgagggatgtgtgtgtgtttgtgtgtgtacctgtgagcacacctcctaagaaggatatgctgtctctggcaggaaaacagcaattcaggaaagcactcagaagggaccaactgtggctcccagccaagagactttcctaaatcatagatgctctggattgacagggacctcacaggggatccaggccggcgtccctgtccctctgcttccccccagcacttggtggtttccattggcatcttctcctcccctctacacccctgcacagggccttgtcctcctattgagctaagtctatctgacacctgtgggagcccagcctttatagaggcaagaacacaagaccagccatcggggctgcccttgccaaggctttgctttgtgtctcttgaatctcttttcttgagtctcttttcagccttggaaattgagacccttggacgttgtcttatcacctttgaaggctataccatggggctgggttgtcagaaacttaccattataataaaggctttctggtactttcagttataaacacccctgtgggtcatgttatggcaaagcatcagggtgtacctgtcccaggcctggcttccagagatgtggttgagataaatgaggaagcagtgcttagagttatagtacatagttcatgtcattatattttatagtcttttcttgcattacatagctttataagaaattaatttcctgtccatttcaatgcagttcaaaaaaatcaaaatatttgttttagctgttagtctcttagacttgtacagctcaaggcagtatctcagtagttcaactcttcatgacacagacaaagaataggaggcccagcgatctggggaattgcctagggtgatgcagttcttggtaggaaagaaaatcagcaccctaaagttctagactttgatttcttgccttttcaatttgaaatt

SEQ ID NO: 15789 - DNA, 1030 bp, Homo sapiens
atccccaaagtggagacagccccattgttcatcagctgatgaatgcgtaaatagaaagtggtgtatccgtataatggaatattattcggcaatagaaaggaaggaaggttttgagttagacagagggcatggttgtgtaataactgtgaatgtgctaaatgctactgaagtgatcagtttaaaatgattaattttatgttatgtgaatttcacctcaattgaaaaaaaaggatgaagttctgatatttgttataacagctatgaatcttgaaaacattatgctaagtcaaagaagccacatatgaaagatcacataccttacaatttcatttctgtgaaccatccagaagaggcaaatacagacagacagaaagcagattggcggttcccgggggctgggagaagggtagaatagggaggaactgctgatagagatggggcttttcaaggggtgatgaaaatgttctggaattagctagtggcgactatgtgaacatactaaaaccaccgaactgtacacttttaatgggtgaattttatggtatgtgaataatatctcaatcaagctgttatttaatatatacaaaagtaatataataaacaaatacaattcttctacttggagactttccagcctactgttgcctaaatctaatagtgaggtaataaataataataatcagagttactgttttctgtgtgtctgctatatgccaggcactgttctaaacacttagcatttttgcatataaaatcagctgtggattagaaagcaaggagtctggcttcagatcccacagtcttagctactctgctgtactgctttacgtataaagacagatacatcatagagacgagagtgtgaggtagaggctgagaacgagaactcaggagttaggctgtctgggttggaatcctagctctgccacttacttaccagttgtacactcttgggtgagttacttgacagactagagccctagtttccttatctccaatgtggagattttagtaaatcccccctcgtagg

SEQ ID NO: 15790 - DNA, 1028 bp, Homo sapiens
ttgggttatttgtctttccattattgagttgtagtagttctttatatatcctaaatataatttcttttacagatatatggtttgtaaatattttctacaattttgtgggttgtctttcactttctaagtgatgtcctttgaaatgcaaacatttttcattttgattaagtccagttcatttttttttcttttattatttttgttgttttggttttgtatctaagaaaccattgcctagtcaagtttatgaagatttactcttgtgatttcttctatgagttttatagtttttactcttaaatttaggtgtctgatccattttgagttaatttttgtatatttttgtgaggtcagcatccaacttcattctttttgtatgtggatcttcagttgtttcagcccaattttttgaaaatactgttctttctccattgaattgtcttggcatccttgttgaaaattagttgagcatatatgtaagtgtttatttctggactctctgtctgtaccactggtctgtatgtctgtgcttatgccagtaccacactgtctttattactgtagctttgtagtaagttttgagtttggggagtgtgttttctaactttgttcttcttttacaagatttttttggcttacatttcatataaattttagggtcaggttgtaaattagtgtaagaaataattcttggtagggattgtgttgaatctgtagattgatttgggaagtattgctttcttaacaatatcaggtcttccaatccatgaacatgggatatcttctttaatttctttcaaaaatgttttgtagatttttttggcattcaagtcttacattccttttgttaaatttattctaagagttcttttttatgttattataagtgaaactattttttaaatttcagattgctcattactaaggtatagaaatacagctcatttttgtttattaatcttgtatcctttaaccctgctgagctcatttattagctattatattgtttttgtggattctttagggct

SEQ ID NO: 15791 - DNA, 1030 bp, Homo sapiens
ttccacctcatcctcagtgagttctcccgccctcttggtgcagtcaatgtctgctttcctcaacaccacatgaacatatctttggcccacacccttaatggcagggatggtaaaggctgttttccactgcccatcgatgatggtgttgagtactcacaaaatatgctggaacttttcagggatcactagagacatggcggcagtacaagaggtggcacgtaggcctcctgtccagaatttcttattggcttctttttaggttttctatgtcctttttgacatttcaattttgttcatacatcattttcttgactttcaccacatcttcctttagtctcttgagcatctttaaaatgggtgtttctttgtctggtagatctgccatcaggtctttttcaaggacagtttcagttgatatatacttttcctctgaataggctgctctttccatttttgtgtgtgtgccttctgatttttttttgatgttgttgaaaaatagacatttgaatctaataatgtggtaactctggaaataggattctccccattctcagggtttgctgtttttgtttattaaaaaaaaaaaaaaacgttgtaggctgtctttgtgccaaggatcagcctggggtatatatttgaggtcttcttaggtcttctctgagtctgtgcctttccatgggcatgcatggtcaaccatctaattttccccatgtatgtagttgcctttgaatgctctagtcttgaatgtctggccctcaaaagggagaaagagaaaaatgaggctgggggaaagggcactggccctttaaatcctctggatgtcacttctgttggtgtatgtggggtggcttgcaataatgaagggaggtgcagcaacaatggctactgcctcttttctgcacccctgtgatcagaagcagcagtcagtgatcagaacacagatacccaatatttggaggacagggtgctctttgcccaccctagctcctgcaagctttatatttgcttctctaggaatgtgttcacagct

SEQ ID NO: 15792 - DNA, 1052 bp, Homo sapiens
aaagtctattttgttggatatcagtatagccatccctgctctcttggttactatttgcatgaatatctttttgtttgtttgttttgagacagagtctcgctgtgtcatccaggctgcagcacagtggtgtgattacagctcactgcagcctcaacctcctgagttcaagtgatcctcttgcctcagcctcccgagtagctgggactaaaggctcatgccaccatgtctggctaatttttaaattttattttgtagagatgaagtcttactgtgttgctcaggctggtcttgaattcctgggcttaagcaatcctcccacctcagcctccctgagtgctaggatctgaaatgtgagccactttgtccagtcggaatatctttttccattctttcactttcaacgtatttatgtctgtggatctagagtttcttgtagacggcatatagttggatcatgttttttaaatccattctgtcaatctccatcttttgattggagagtttaatccatttccatttaaagtaggtactgataagggacttacttctgtaatttgctatattttctacatgccttatagcttttttatcccttgctttctgcattattgtcttcttttgttagttgattttttttgtagcgaaatatttaaatttctcatttccttttgtgtatatttgctagctattttctttgtggttaccatgaagattccatttgatatcttaaagtttaacactctaacttaaatgtataccagcttgactaacatacaaagactccattcctgtaaagctctatccccacccctttctgttaccgatgtcacaaaattatatctttacccattgtataccccaaaacataagctaataattcttttaagtgcattgtctcttaaattatataggaaacaaagcatggaattacaagccaaagttataataatactagtttttgagtaataattttaaaaatatattagtctcttaagtcatgcagataataaaaagtggagttacaaactattgttacaataatactagtttta

SEQ ID NO: 15793 - DNA, 1048 bp, Homo sapiens
gtgttaattggctcctcccagaactctaggtctcatctctaaaaggttattttaggcttcccagtacatagatagagcatgctaagacctatagattcagcagttttgggccaacttctcagaacatgtggaaaaggcttttgttttagctcttggcctttggtggacttaccacccagaatcttaggggggtcctcgctgatgactttttgaattaattttagattgcatatataataggtaaatctagtcttctttttaggaccaggatgttaaagacaaagctaaagtccatttttgccaccaaccccagttgaggtcccctccccagcaccccagctgtaactactatcatggccttaagatatgtccttccagaccttttaaaactgattttatattttaatacaattatgttctgtcccatcccagaaaaatagaccatgcttaggctggtgtatgagttgttctgggtttattcagaagagtctggggggtggtgtggattacaaagagctgctcctggagtgaacttttcatttgaattaagccaatatagacatcaacaagttataaccgtaagtagtagtatgctctcgggagtaaaagcttcatgcaagcattcccagatatctgtatagttatgacttttagacagaaacagacgaacactctgttactctgcaagaatacagacttgcgttcaggtcattttgacacagactcatcttaagatctggctgtacagacattccaccagctgcatagaatacagcaccagagctggggatttcatcgcgccactcttgaaaatacgtaacactggggtttgtgtgtgttttataaagatcataatgaacacatcataagccacctttgtttttttcctactgaacttgaactctctccacgttaatgtgtatctaccggcagccaggcgcagtggctcatgcctgtaatcccagcacttttggaggtcgaggtgggcggatcacctgaggtcaggagtttgagaccagcctggctaacatggtgaaaccctgttttt

SEQ ID NO: 15794 - DNA, 1084 bp, Homo sapiens
gactgtgtcccaggcaccccaggggagctgagtctcctgaggccagcctgcttggttgggctccatctgtgaaggggagatatattgattggttgattccagaaatatttatggagcccctcctatggcccaagcactgcagctagaacataagtatgaggggatagatggaggtagtggctaggtggtaagttacaaggattttggccttcacttggggggagagtggaaccactggagggtttagaggggaggggtgacctggtatggcttacatggggtcaactcattcatattttttttttttgcatcggagtctcgctctgtcacccaggctggagtgcagtggtgtgatctcagctcactgcaacctctgcctcccggtttcaagcgattctcctgcctcagcctccccagtagctgggattacaggtgtgtgccaccacatccagctaattttttgtatttttttttttttttagcagagatggggtttcaccatgttggtctcgaacttctgaccttaggtgatccgcctgcttcggcctcccaaagtgctgggattacaggcgtgagccaccgtgcccggccttatccatgttttctaggagaggtgtgtgcccttctcttctaaccccgctgcttgacagtgtccctgccctgttacacccggctctctgcctctccacgcctgcacctgcgcagcagcgtccctggggagtacccgtcaaccctgttgactacttgcaaatggtgaccaaagaccgggaggagcaccgccgctcttcagtaggtcggattcccatgctccaaagtgtctgttccatgtgctcctccctcccttcctttgaaagccaccctctcatgcctagctcatgaccttgcctcatactttactgaggaaataaaagcaattaggaaactcccttgtttcatgccactaactcgaccagctttcccctctgtcactgctggcgccctctgtcactgcttggagccctcactcccttcagaggccagcggctccttcacctgtgctcagaatcccttccgttctcaccctctcaggaccgggctgccacag

SEQ ID NO: 15795 - DNA, 1028 bp, Homo sapiens
aggttatgaagatattcttatattcttctaaaagctttattggccgggtgaggtggctcatgcctgtaatcctagtgctttgggaggccaagccaggtggatcactggaggtcaggagttggagaccagcctggccaacatggtgaaaccccatctctactaaaagtataaaaattagccaggcatggtggtgcatgcctgtaatcccagctacgtgggaggctgaggcaggagaatcgcttgaacccaggaggcagaggttgcagtgagccaaggtcatgccactacactctagcctaggcaacagagcgagactctgtctcaaaaaataaaactaaaagctttattgttttaccatccacattaggtttacagtccatctactgctgatatttgtatatgatgtgaaatagtagccaaagtttatgtatttccatatgagtattaacttgacccagcacaatgtattgaaaagctgagttgtaatttttatgaagtcttcatatctggtagtgtaagacctctaacttttatctaatagttctaatagttttggctattcttaatcctttgcatttccatatacattttagaatcaccttgttagttttgggggcagaggatgttagggtttaattggtattgcattgaatgtataaatcaatttcaggagaaattatatcttaccaattttgagttttccaatgcatggacatggtatatccctctatttacttaggtatttaatttgtctcaccagtgttttatagatttacatgtagaggttagatttatatctaggtttttgacagttttactttattatcaaattgtttttaattagtttatagaaatatagtttttttggtatattaccctttcacttagaaaccttgttaaattcactttttaattctaatctgtatattattttagatttctttaagtctacagttatatcgtctgtaaataatgacagtttcatttctgccttttcaatttttatttttcttgccttattgagctga

SEQ ID NO: 15796 - DNA, 1016 bp, Homo sapiens
tcttttttgccatttaacattttaatatccaatgtactaaatcttttcttttacggcttatttttttaattttaaaaaaattttaattgtggttaaaaaaacacaaaacaaaaattgccatcttaactgtttgtgaatatatggttcagcagctttaataatactcattttgttatgtaacagatctctagcactttttcatcttgcaaaattaaaactctataccttttcccccgtcccctaacccccagcagccaccattctactttctatttctgtgagtttgactacttatgatatcccatgtcagtggagttgtacagtatttattttatttttgtgactatttcacttagcatagttctcaaggttcatgcatgctgtagcatgtgacaagatttccttctttattaaggctgaataatattccatggtatttatatgccacattttgtttattcgtttatctgttgatggacatttggattgctctcacctcttggctattgtgaataatacagtgaacgtggttgtgcaaatatttcttcaagaggcctgccttcaattcttttggatatatacccacaagggggattgctagatcatatggtagttctacttttaattttttgaggaacatttatactattttccatagcagctgcaccattttacattctcaccagcagtgctaaaaagttccaggttctccgtatctttgccaacacttgttatgttggtgtttttgttattatagtggctgtcctaatgagtgtaaggtgaaatctcattgtaattctgattcgcgtttatctctaatcattagtgatgttgagcatcttttcatatgctgttaaccatttgtatgttatctttggagaaatgtctattagagtcctttgctcattttaaaatcaggttatttgtgggttttgttgtttttaggagttctttatatattctagatattaactccttatcagatatatgatttgcaaatattttctcccattctg

SEQ ID NO: 15797 - DNA, 1045 bp, Homo sapiens
atactcagcaaaactgttttccctaagtgtggcaaaaagacacttgttgttgttgttgttctttttgagacggagtcttgctctgtcttgttgttttttttgagacggagtcttgctctgtcacccaggctggagtgcagtggcacgatcttagctcactgtaacctccgcctcctgggttcaagtgattctcctgcctcagccccctgagtagctgggactacaggctcatgccaccatggctggctaatttttgtatttttagtagagatggggtttcaccatattagccaggccgatctcgaactcctgacctcatgatctgcccacctcggcctcccaaagtgttgggattacaggtgtgagccaccacgcccagccaacattttcaaacatacaaaagctgagtgagttttctaccaataggtcccctatgagaattttaaaagaagtagttttaggaagaaggaaaataatccctggagaattttccgagatgcaaaaagaattactgaacaaacagtctaaagcatactgactgtgtaaagctctcgtcacgatgtctcatttgtggagttgaaaaaagaaaactgaaaaattggacaaaatagcatttaatttgggaggtgacaggagttagtttcctgaagtaatgttcctcaaagtttaacatgcacagtaatcttgaaatgtgtaaattaccaaactgattgaaaaaaggtgtgagaaacctacatagtcctataactgttaaagagattggtcagtaagcaaaaatcctcttgctgggaagacactcagtacagttttaagaatgagttctgccacacattcaaggcatagataattctgatcttccacaaactctttcagaaaacaggaaaagggggattatttcctccaactcattgtatgagtccagtgtaaccttgattccaaaaaacacactaggacagtataaagaaggcagattatcagcccattttatatatgtgaaatttttaatatcaaatttatatagtcaaaccttgtgtgtattttcttt

SEQ ID NO: 15798 - DNA, 1030 bp, Homo sapiens
gtctgtttcccaaccagagtgggagctctttgaacacagggtctgtgccttactgacccctggtcctctgtgccccatgcaccttgtggctcaggggtcagcacatggcagtccctgggcaaacccggcccctgtgagtttttatgaacacagttgtgttggaacacagctaacacccatttgttgtctctttttgtgctccctctgtggagttgagtagttgtgacagagacttaaaacctgcagagctgaaaacattgcctgactgggccttcacattctcagggtctggcccaaatgaggtgcacagtcgggtctttcagtgagtggtaacgaccttgtgtatctgtggagctttccccacctgctgggaatgatgtcaggccctaactgcatccatgcactgaagcctcatggtggccctgcaggtttagcagccactggcagttcctcccctcttttcagatgaggaaactgacaattgattaattaataacttgcccagcatggcagttgctaagcagggggacctgggatgggaatgactgtctgcctccagaccttgatgcttgcctgtgaatgacttgatgcttgcctgtgaatgaacgtgagcttcagccttcacaggaaggaagaaataaagggggtgtgggaagtgctgcaagaggggtactcctaggagaggtgaggggctgccactgtctcagaggccgtggaggcctgaggaagggccccagcctccagcagctcacgttagggctgacatgtcacatcatacttaatcagggaatgtcaagattcagggcacttactaaggacaccctgaacacagggaagtcttctgttcccacctggaactttgtgtctcccttgttccttaataactgctgaggagttgtgatgaggttcagcacactaagacgttgaataggacagacctgccgtttggtttaaggtttaagtcccccatgcttctcaaagtgggtgaagtttaaaaacaggcaggtcttcggtgaagttcaagggatgt

SEQ ID NO: 15799 - DNA, 1026 bp, Homo sapiens
accacacattgcccttttctcagggaaggaaatggaaacaaaaagccaacagggcaggggttttgtaagtggaactctggattgactggtcagttgctacaatcagaatatgctttcttggaccatgtttgagactcagaagaatgggcctttctgccataattcttcactagtcaagaatgccagcagtttctttgtataaagagacctgcctttaaaatcatacattctgaacattttagtcaagctacaacaggtttggaaaacctctgtgggggaggggcgagtataaagttttcctcttttttaactgttccctttgcccttcaaactgcagatatttttttttttaagtggggacttctccctacttgattaaagattgagtggaattctagatgtggtcatttgtgtcataatttttttgttttattttgtttttgattttttttttcctcccctgagtgtatgcttagttgttgagtatatatatttgggaccattaaaactttttttgatgtaatataacctaacgttgtgctggtacctgttttaccatgtgtaatttttgttctacatcacagttcttaatttgtttagagttttatgaaagatggtatagtttttattgacaaaagcaaagtaatcttacaactatgtgcatacaaaagcaatactattttgtgactaaatattttatattaaaatttacatcagcaactgtcttgagaattcagggaaatagaatggaatttaaaacttcaacagttttgttaaatctagaaacatgaaattagtattccaaagagattctgaaatttcttttcttggggaaatgacggtacattaaatcaaaattgaggatggatgatttaaaaacatttgacttttgaataataaaaagaaaagtgaagagtaagagaaattgtattagttgtatgtttcttgtttttgtttttaactactccctttggaataccagtttgacttgtaagtggtggtttctaaataaatacctggccagag

SEQ ID NO: 15800 - DNA, 1828 bp, Homo sapiens
gggaggccaaggcgggtggatcacctgaggtcaagagttcaagaccagcctggccaacatggcgaaaccccgtctctactaaaaatacaacaattagctaaacgtgatggtggacgcctgtaatcccagactcgggaggctgagacgagagaatcatttgaatctgggaggcggaggttgcagtgagctgagatcacaccattgcactctagcctgggcaacaggagtgaaattctgtctcaaaaaagatttttttttttttttaaattagccaggtatggtgatgcatgcctataatcccagccatgtgggaggctgagttgggagaatcgcttgagcccaggagtttgagtctgcagtgagcaatgatcatgccaccgcactcaagcctgagcaacagagtgagaccctatctcaacaacaaaaaaataagtttgtgtagtacaaagaaagaattgttatttgcacccatacacacacacacacacacacacacacacacacacacgttgttttttattctttgatgcctgtggtattgtaagaataataggtctttgggagactgaggtgggtggatcacttgaggtcgggagttcgagaccagcctgaccaacatggcaaaacctcgtctctactaaaactacaaaaattagccaggcgtgatggtggacacctgtaatcccagctgctcaggagaatgaggcaggagaatcgcttgaatccaggaggcagaggcacatgcctgtaatcccagttactccagaggctgagacaggagaatcatttgcacctggtaggcagaggttgcattgagccaaggtcgcaccgctgcagataagtgtaatatgacttggaagatcttttaagactttacctcaggtgtataagtaaaatttatttgaaacctgaatttgttaagtatagaaaggaagacaataaatgtagtaagagctgcctggtagcacacattacatataaagcagtatgtttaatcatgtctgttcctgtttagaaaattttgtatttctaaaatattagccagtgataggcaaaaaaaggaaaagtatgaactaaaatactgagttctcctgatccttttctttagctccatatggttctgtttttgttatgtggggatttgtcacttctgtgttttcttggtcttcatacatgtaaaatgccagttttattcattaagtatgaataatttcaagttgttaaatctttgcttccctgtaatgtgctttgtaaaatactggctgccaatatgtctgtttctcttgatgctggacacttctatccaaagtgctgctgtgaaggctgtagcattttacaaatgttttggcaagaagtgattgaggtacagtttaatgcaggttcctgcccactttgtatagccccatgcacacaaaataaatatcacaccctcttaacattgactgcttcctttgtagtaccataaacattcttattttctctatttctgtacccccaactgcagcagttcagagaatgtcttttttaaccatttgatacccatttggtagaatatagtatattggagatgtgtcttgaaattggatgccatttgggtagcaaacatggtcaagatcatattaatgaggtatgacctatttgttcattttagaaaaagtaaaggtgagaataaccaaactaacttagtgccacagaagatttttctggagcactcacaacagtgaatgtggagccagtaatctagtgggagcttgtatatacatccatgtgtatgtgtatttagagtgaggcatgtctagggcttaagtggtattgaatctacttccac

SEQ ID NO: 15801 - DNA, 1108 bp, Homo sapiens
gactctgagagaattaatggtggaaaaggcatgtaaccttgtagtatcattttgaaaataatcttgactttgcaggccccatagtgtcctcagatcacattttgagaacagctggtatagattgtttttagtttgttgccattacagactctcctaatgaaatctttatccatataccttggcacttatctgagggtgtagggtaatttcctagaagaatagttggcccaaagagtagtatgtgtttaaaagttgggtaggtgaagatgattcaattttcagtcttggtactggtaaatgagtattaaggacaccttatttttttgagaaagtccaagtgcacatatcaattagtagacattagaacttgttaggaatgatagattccacagtggcagatctaattgtactgatgcattccacttagcttgagcactctcttgattttcatttttctctgtgtttcctttctcattctttctcaagtctcaatattggagttttcttgaattggagtgtaggatttcctttccttggtctttgtgacaatgtctttctcagatgtgtgggaaaaggtatcgtgtgtgtgtgtgtgtgtgtgtgtgtgtgtgtgtgtgtaaataaaagattcctcttgggagataagggcatctgtttcattggagaggatagatgtgtttctcaaatgagttggggtgaatggggtctgtcttgagtgtgtgcttcagttattgagttccactagacataactgttatcagaaacatgttgctcttagttagaaccttctctgcctccctcttaatgttgctgaggtctcctgctaaggatcatcatttctcgcctgtcatctctgctaccatgttatttaataaattcctctcctaaagttgagctctatatccccatccatacccataccttagtaggatagaattactgtgcctaatactgtagctatagcaacaaaatacaaacaaacttgttgggggtaaggattgtgttaattgatattaacactgaactggatctgttatagttgattggtttagtgtttataacttggctcaataaaacctattaggtgatggagggaaacccaatagac

SEQ ID NO: 15802 - DNA, 1023 bp, Homo sapiens
ctgtctctttaaatggtggggctacgagccgcccctgcagctgctccctgggtggccccgcgcgccgcttttgaggggcgaaccaagatggcggcggttttggctgtgtgaggaagacggaagagacggcggcggagggaaaccgacttccactagtccgggtcgcttgggcggccgggggccctcagagtctcccgggcagtggtagcagttgcagcaggatcaggcgcctgtcggcttctgacgtttaaaacagggggagcggaagggagccactggccgcggtggcagggccaggtataaggaaggaaaatatggcggcggcggcggcggcctgaggaggcggcggcggcgcgggaagctgcttcgcggagatcatggcggaggcgggagcagggcagtgacgggagccccgagttcctagcgctgcggggcgggaggctacgaagcgctgcgcggccccctcggggctgccgggcgccgggctcgccaggcctggacaatagcgccggggagccggaggcgaggaaaggcggcggcccagagctcggtccctggagcgggccatgcaggcggcggcgcggccccgcggcgcccagcggcggcagtgaggccggggagccctccgctcgcgggcgccctcacgcctcgcccctcgcctctccagggcccctttcctgggcgtctactggcggggcccccgccccggttcccgggcggcacgatgaccgacacccggcggcgggtgaaggtgtacacgctcaacgaggaccggcagtgggacgaccggggcaccgggcatgtgtcgtctggctacgtggagcggctgaagggcatgtccctgcttgtcagggctgagagcgacggtaagtgaagccccgcgcggcgggaccctcgcagcccccacggccctgggccgcctccctggttcttgcggggcatggcgctcgctccacgagaacagagggacggctggggagggcggccacctcgggggaggacgggccccaggtaccccagtct

SEQ ID NO: 15803 - DNA, 1024 bp, Homo sapiens
ccataccaagttgtgccagtcatttaaaatttttagtttttcattattcaacatacattgatatacagccttacatgcatgtctatgagaaagtggtaggagaaagctctcagctgatttttgtgcaactgaatgaccattaatgcttggcaatcttcccaactgaatctgactcaagtagaaatagttaacattaatcaaaagagattaattacctgccaccagtcttttgaaacagtctgtcctgagaaaaagagaattcgatgatatgtaaatccatgttctttgggaatgcttatttctccttttcttgggatacagaagaagagacagactcagatacaaacctcaatacctgaaatcattagctttggtcttggtgggatcaaaaccaaaaaataaaagctattaatatgtgattgaatacacaaacacacgtgcgtgcacacacacacacacacatttattataaggaattggcatatgtgattatggcaactgggaagtccaagaatctgcaatgtggtctggcaggctcaagacccaagagagctgatggtgcagttccagtctcacagaagtctgctggagaatttcctctggcttggagaaggtggtcttttcattctactcaggtcttctattgattggataaagtgcacatacatcatggagggcaatcttctttactcagaggacatcagtgtcaatgttattcccatccagaaacaccttccaagttgacacataaaattaacaatacacttttcctcatctcacccaaatttaggttaagagttctggatacctgaattaatattgccattggaatgccacttttacttttggagaaaaattagaaataacattttataaaattaaaaaactgtaggctaggcacactggtttacacctataatcccagcacttttggaggccaaggcaggaggatcccttgagcccaggagttcaagtctagcctgggcaacataaggagatcctgtctctacaaaaaaaaaaaaac

SEQ ID NO: 15804 - DNA, 1070 bp, Homo sapiens
aattaagtattaaatggctgcaaaacaatttagataatatgtataaaatataagactaacaatgcagcaaatacccacactgtcaccacccagtgtaagaaataaaacttcatcctttgaagttccttatgcaccccttcacatcccattctcatcttccacctcttaggcaaccactattccaaaatgttatgtttattacttccttattttgtttggttttcttttttctttttctgcttgttttctttatggttcttatcacataggtttgacgctccaaacaatccattgtttggttttgcatatttttgaagtctatgtaaatggaatttgaactatatgtaaattcagtaatttttctgagacttgcttttttttttttttttttttttttgagacggcgtttcgctctttgctcaggctggagtgcaagggcgtgatctcagctcactacaacctttgccctgggttcaagtgattctcctgcctcagcctcccaagtagctgagattacaggcacacaccatcacgcctggctaatttttgtatttttagtagagacagggtttcaccatgttggccaggctgttgttgaactcctgacttcaggtgatccatccacatcagcctcccaaagtgctgggattacaggcgtgagccaccgcacccggctgagacttgcttttttaaaaaacttaccatagtgtttatgagattcagtcatattactgtgtgttactgtatataggcgatttgttattttcacttctgtatgcattgcattaatatataatttacccattttattaataaagggtatttcagatatcttctaaacatacaagagtttttttagatgtatatcttgattggaattgctgagttataggacatatatggtcaacttcagctttattagatgattaattgttttctgaagtggttgtgctaatttactcccactagcaggcacatgacttcttgttctacatccttgtcaacacttgacattatcagactttcaaagtttttgacaatctgatgggtaggaagtgtcttagtccatt

SEQ ID NO: 15805 - DNA, 1048 bp, Homo sapiens
tttagaatcagaagattcttatacccgtgaagctttggctgcagaagatagagaggctaaactaagaaagaaagtcacagtattggaggaaaagctagtttcatcctctaatgcaatggaaaatgcaaggtaattttttcatttttttgcattaactttaactgaacacttcttaaatatcagactcagtaagtattttttgtatgttagctcatccttgcaaaattcattatctgtattttatggatgaagaaactgaaggtaaagagattaaataacctgcccaaggtaggcactcagagtgtgtgtgggggtttcacatttgagtctgtgactctttagatctggcattcaaactgtctgtgttttgaccatcaccctagatcactgcctcttaccattttaggagtatagtttgaaattctgactgattttaattggctctgttcaactccaaaataactatttatgtggttgtatttttcatcaaatgatcttaagttgaacaggatgtggatgttagcaggaagagagtaaaggaagtagcagagtagagaccaaggtcagtatgaagaattaactgggtttattagcactcttgagtgacccggtccctgtttatatattttagatttttatttctctcaagaaaacttttttcttgtttttttttttttagttgtaaaaaggttatatttttcatgtttaggaaaatcacacaaatcacacagagccccacatgcccagagataatctttttgtgtgcctttttatacttttatgtctgtgtgtatacattatataccctttttaaagcaaaactgagattataatattcatactgttttgtaatctgtttctatcaataatatgaatgtcagtacatgttaagccatgtatgtttgcaatattttgtggctacataatatgccattatttggatttgccatgattaacgcagtcatttattatgtgttttaacttttcaaaatcactgagtgttgacatgatatcccaagacatgtatttttgtgttgatgacagatta

SEQ ID NO: 15806 - DNA, 1021 bp, Homo sapiens
gagaatcatttgaacccaggaggcagaggttgcagtgagccgagatcatgccattacactcctgcctgggtgacagaacaagactctgtctcaataaaaaagaaaaagaaaaaaaaaaaaagaatgtgttattcaggtagagtgacttgggttagaaatttttttaaaataataagaaaatgtgctgagtgactcattaaattgatttttatgtattgattagtcacaacctggaatttgaaaagtattagccatgagtaatacttttctcatagtaggctcagtaaatattctaatcccagttctgtcactgatgtgattttgggtatgttttgaccttattggtttattcagctataaaacaggagttcatagcagttatatggatagtgccagtagcttttgataatatttaaatttttatatgcaattcattttagtaagaattattgaggatttcctgttacactgtatactatactgtactatatgatagtatagtgtagggcttgtttggcagtgtatagggtgctgtgtagggtttgtttagtagtgcctttttactgtgatttctatgcttttagtagcagaaattttgaaaagagatgataggcaaaacaataaaatattcaactagcacttcttgagcattacttgctgccaggcataagatacaaagtgattcaacttcatttgccagttaggttccctcttagagtcttggattaaagttgtgaaaacttcattttttcctttgtcatctgatgaagtaggcacactgattatcagtgttaaggtgttcttctgagataacttcttagctttaatggtactggtctataattgatgtgaagagagtcctagaggctagagcttcctattgttcactagcccaaattggctctagcttcttaaggttataagagtagaacagaggaataaagtacaatgatgtcttctgtcatttatagatattttggagttttagcgttttgtacaatttagttctatttcattgacc

SEQ ID NO: 15807 - DNA, 1033 bp, Homo sapiens
agtgcagagttactttccaggtctcggtttaaatatgtcttaaactttggccaattagtagtagaagttgagagaaaaagtaactatctgacaaagaaattataagcagaatatataaagaactcttaaaactgaataatcagaaaacaactcaataaaaaggtgaaggatttgaaaagatatttcaccaaataagacatagggatgacaaataagcacatgaaaagactctcagcatcactagtcacagggaaatgcacgataaaaccacagtgagacaccatggcacccctgtaggtatggctttaatgaagaaataaaactgacaataccaagtgttggcaaggatccaagcagctgagactcatatactgttaatgggaatgtaaaagtgtacagctttggaaaacagtttggcatttttttgataaatgtatacttagccatgtgatccagcagtcccaatcatgtatatataaccaaaagaaaagaaaacttaggttcacataaaaacttatatcaaatgcttatagctgaccaggcatggtggcccatgcctataatcccagcactttgggaggccgaggttggcagatacctgaagtcaagtgttcgagaccagcctggccaacatggcaaaaccctgtctctacttaaaatacaaaaattagccaggcgtgatggcaggcacctgtagtccagctattcaggaggctgaggcaggagaatcacgtgaacccgggaggcagaggttgcagtgagccgagatcgtgccactatactccagcctgggtgacagagcaaaactctgtctcaaaaaaaaaaaaaaaaaaaagggctggacacggtggcttacgcctgttatcccggcactttgggaggccaaggctgatggatcacctgaggtcaggagttcaagaccagcctggccaacatggtgaaaccccatctctactaaaaatacaaaaatttgctgggcatggtggtgggcacctgtaatcccaggaggctgaggcaggagaatcacttgaac

SEQ ID NO: 15808 - DNA, 1075 bp, Homo sapiens
acgcctgtaatcccagcactttaggaggctgaggcagggagatcactgaggccaggagcttgagagcagcttggcccaacacagtgacaccttgtctctacaaaaaaaaaaaaaaaaaaaggcagcttacagcagtagaggctgatgcgagtgggaatcacctctaggtaaaaaccagtgtagcgtactgctgagattatttaacctctgggttttatttatgtgtttttaaaaattatgatccagtattttttacttttttttgtataaagtaagcactgaatttttaaggttgtattaatttgcaaataaatgtctatcttattattttgagagatttaaaaaattttagttcttcaaaattgcattttcacattttgaattacgttatctttgacaaatacagaagatgtcaaattttggtttattttctttggttctaatttatatttttgtttaaaactatatttttcactatagactctttctgtctctcgaggtccctgtataatgaaaaagaaggctggaaaaagtattaacattgtcaaaatccaggaaaagtagttggtcatgatattgatcgttaactttagaaactttttgtatcttgtgggttaaattaggattactatgtggtagtgataaatgatgttaattagggccgagtgcagtggctaacacctgtaattccagcatgtagggaggctgaggtgggaggatgtcttgaatccaggagtttgagaccagcctgtacaacatagtgtaagaccccttctccacacaaaaaaattagaaaatttgtcaagcatcttggtgcacacctgtagtcccagctgcttgggaggatgaagcgagagaatcacttaagcccaggtgttcgaggctgcagtgagctatgattgcaccactgcactccagactagatgaccatctcttttaaaaaaatgtgtttatatgttatatgtgatagtgctttttaaaaacatttttaaattatagagacagggtctcactatgttacagcccaggctggtctcaaattcctgggctcaagcaatcctcccaccttagctaa

SEQ ID NO: 15809 - DNA, 1047 bp, Homo sapiens
cctggcatcctttgcagcagaactgctattcttttacatatgaagggcactgctgatgcagtcaggcagagcttggaccagagctgtctggtgaaagaatagcagttctgcaaaggatgccaggcattttgagtcactcactggtagatttcaggggctcccgtgcattgcctgcgtactgctggggtgaccatgcctttcagactgtgactgtggccctgtggtcctgaaagcatgaggagtaaatgtgagcctctgagggagaggctggacttggggtatgttgggcacctctgctcctcccactcaaaccagctctctctctccctctctctctggccttctctcactctctctcgctttctctctcgctctctcttgctgtctgtctccccagacaatctccaccatgaaagtgatgcagtttcagggtatgaaacgcaaagccagttctcccgtccccctacctccagtcacacaccttgacctcacccccagccctgatgtgcctctcaccatcatgaaaaggaaactgatgaacaccaatgatctggaggagtccaggcagctcacggaggagatccagcggcatctggatgtgagtagtggtgaaaggagctgtgcccaggtgctgtccccagcccaggtgggcagcatgcatgagcacggccctgcctcctatgctccctgccacacaggagtatggggggacagaagccagcctttgtcctccatgtaacggaagcgggtgggcggagccgtggttgcctcccatcttcatgagtaaactaaccttgacctcttcggtagtagggagcagtggaatgggggcctatctcccctgtatcgtaccaagaagccatgtacatgggtgtttccctcttttataccttgttgcttagaggatatttttattttgttgcttattaagttattagctaatcatattcattttaaaaatccagagacaggtacggtggcgtgcgcctctagtcccagctacttagggggctgaggcaggaggattccttgagtctgggactttga

SEQ ID NO: 15810 - DNA, 1027 bp, Homo sapiens
agttaatgttgtgtttatttctgtaactgtaggggtggagtataaacctaacttttggaaacatgaagaaataaacaatagcgccagccgttcggagggtgtccttctgtgctttgcagggggcagggggtgcgcattagccgccatgagcagcccatcctcatcagagaaacccagacttgccgagacccctcaaacgactcaacaccattgcagtggttttctgtgtgggctcctgatcatcaccataatctggtaaggagatagtaagtattgtctccattttatagatgaggaaactgaggcactgagagggccaggagcgcctgcccaaagactcctgctcattaatggctgggctggggagttcaactccagtcttaggtccaaatctgagttcccaccatggaaccttgcctgctcagactcaccaggcagagcctcagggacttggttcccaaatcccaactggcctctggacttggctctgcctgggaccctggagggtggcagcgatgcctctgagcctcacccacccacaatgcccatgtctttcccattcctacctggaagacaccacgtgggcagcctgcgaaggccgaggcccctccctgcaccctctccaccactgcctgggatcatcaccctccctggcttgctcgtgtttgagctgcaaaggccaaggacgttagccccagaactgccacctggacaggtgaagtgactggccaaggctaaccagccagtccagcagaacctggctcgaacccaacctcctcctggcctgcaaggagcgccctccagcgtgggcgtgtgctcctcctgctgagcgtacttttgtccccatgggttgctttggctgttgaagggtgcagctgtccccgctggacagtgagcttcttaaagccagggcttgtctcagccatgctcaggcctaccaggcccagagcagccatgcacaaatgtttgacgagtgactgaatgatgggccctgatattcagccagtacacatgggtcctgactgtg

SEQ ID NO: 15811 - DNA, 1052 bp, Homo sapiens
ttgagtggcagaatgaaaaggggacaacgtcagtggctggagggccaggggggcacagggaggcctgttagaagagaagttctggaaggagggaggagacaggagagggtgggaagctttgcacctgagcaaggccagtgcctcccaacacaaaatgtgtagatggtcgcgatctatgggtgcagataagggatggccttgtgagtcagtgtggggcactgtgagccagtgtggacagggagggttcttccagagaagccaagagaagggccacccagatggggtgggactatggctgagcctggcggagactggtgagggagcctggtactgaggagaggcccagggctctggcagggcagagctggttccccgggagatagctcagtgtgtccgccttaccatagagcacccttttggggccaagcagagcagcaggcctgttctcctgcaccccacaggaggcaccttgggccatgggtgtccagcagcacgtgggtgggagaggcctgggagagggcccctccagagaggggctggctctggagtaataaccgcaacagctgcaagcgctgatgacaccgtgagccaggcctgccccgacgcctcacttcgtcctcacgaggcgttgtgcaaagggccgctggaatctctgtgttgctgataagaatgtgaggctgggggttgagtggcttgtccaaagtcacgtggtggagctggatggggcccagactgtcagccccagcctttccacctctcagctccagccatgggttcgaatcttgcctctgcctttacagtctgtgatggcacaagccacctaacgtttaagtctcagtgttcactgcagtgggaaccagtttcccaccctgcagacagaggagatggcttttgcacagtgctggtatggagctggcaccctgccctgcaggttcatgcctcagtccgctccccgagctcctgtttatcctcaggcctccgtggaggcagccgtctctgcaccaccacagaaagcggcctccctgccctgggccactgggcgttgtctgggg

SEQ ID NO: 15812 - DNA, 1041 bp, Homo sapiens
cagtcagatctgcgagcagcggattcaagattccagagtctggggatctgacaccaagcaccttgggctggtaaagatacaaagtctccagcaggcacagggtggaagaggaggtttctgtttttaatttttttttgtagacaaggggtcttgctgtgttgcccaggctgatcttgaactcctaggctcaagtgattctcctgccttggcctcccaaagtgctgagattacaggtgtgagtcaccatgcctagcaaaaaaagaggaggcgtcttgttgacatggattgagagaaggttgagtagctgagaaggagagagaacagcctctgtagaacaaggaggtggggggtgtttctgggtatggtgagcatggagcaaataggagagggagcccaaagcatgctggggccagagcctgcccaaaaggcctgtgcccagaactctgggcatcgtttagtaggaaaggggaagtcagtggtgggctcttgagtttggcagcacccccgtgagagctgggcgtatgcaggcggacgctgtagccatggcagcaaggtcggcggtggtagcaaagggaacttaactcccaacttgggacatcttttggggctcagttcagagaaaaactgagcaagaaataggtcacaggttttaggaacggtattagagtatcttattttctggcatgtccaggaaatgccattttccactggatgcattttttagatagttgcttggcacttatgtctttgtcttcagaagaatggttttccggttttaaacacatatctggctgggtgcggtggctcacgcctgtaatcccagcactttgggaggccgaaacgggtggatcacttgaggtcaggagttccagaccagcctggccaacatggtgaaacccatctctactaaaaatacaaaaattagccgggtgtggtggcacatgcctgtaatcccagctacatgggaggctgaggcaggagaatcgcttgaacccaggaggtggaggttgcagtgagccgagattgcaccattgcactcca

SEQ ID NO: 15813 - DNA, 1689 bp, Homo sapiens
tttttagtagtgatggggtttcaccgtgttggccagggtggtcttgaactcctgacctcaagtgatctgcccgcctcggcttctaaaagtgttgggattacaggcgcgagccaccagccttgacatagttgtaaacaaagttgtggttctgttgtaatctgttcccacaaacacacttagcattctcttagagcttccccctttgttaaatgtctacttaggcttgctttttaaatgactgcataatattatctgattgtaactgaagttctttgattcccttggttgatgctgaccatggttctggtctgtcacctttataaatagtattgtgataaacatccacttttgatactgtttgggcaagcctgtgatgattatttctttgggttacataagtaagttgtatatattgtttttgtagtctgtaggaggaatatgtacttcttggtgaaataaacaaacccctgcattttggggaattacagaaagggaaggtcttgtgggagtttgtgcttctagatttgaatgctgtgttatcacctgtgcaccaggcacgcatacagcaactcatttctctctcatgtgccctccctcccctcctttctcactcctgccccagacccactctctctgcccatgaggctgggggctgtagcctagccgcagctgtgcccatggacttttctccccttgcaattgttcctcaccccagggagaggaggaaggagtggtgggctctggaggaggtgggtggtccccgggtggcctctggtcttgcttcttcccagcaccgagggtgcttcagcctccttgcctggaaaaaggggttgtcgtaacaccaacctctaaggttaagaagggtaattgagatacagtgtcaaagtacttatcacacagcctggccccagatctgtgttgaggaatctgcagctagtggtggagggttaggagtcatttggggaattgcagtccggaaagttaatttctgaagagtatcaaacaccagcttgcatgttaagttgtcttttggagtgatccctccagtgattccctagtggtatggagccagtccagatttggagtggaacttttgttgtgggtgtgggtcactgttccagggaaccccagctacctgaccttgaaccaaaatccttgtcattgtggagcctgtgtccccctctgccttggacttttttacttttatcttcctagttctcataatagctctgtgagatgggatctatttattattctccctattttgcagatgaggaaactgaggctcagatctgtcacctgcttctgtgatatttctagtcacagagctccaagcaccaatcactctgggtctttgaactcagatctgctgttgcctatggcctaggctctttctactctgactcttccatcccctgccccttccccagtgctaaccagacctctctggttcctcataaaaacctcccgtggccttcctgaattttccaaggctaccacacaatcagccccctaataccttgcaagcatgggccttttgcagcagagcagggtcccctccattcctgagcttgtttcactgtccccatgctgatactcgcctgttccagactgtgtaccctcagcctggcctctctcctggtcagggtgcatgcctggcccacgtagcctggtggttctgtgctcgtc

SEQ ID NO: 15814 - DNA, 1044 bp, Homo sapiens
cttctgtcgattttctctgccgtgtgctgtggagccaagcgtaaagggctttgggaataacaatcgctgtggggttctgacgtctttggagctgggacagcccatggtagacttgcggtccacccatatcctgggcagtggctttctgaagttcacgtgagcctgactctgacctctccccagaccccatcatctccaaggaggaccgccacgggcttggggggctggctctgcacacagtgtttccatgtggtcatttgaggccagtaatggacacagattgctcttggctgtgcctcacttccctgtggggtccagagacctgggtttgagtttctgagtctgtttcctggctgtggatcttttccttcctctttaaagggatgacagcgcacaggattgaagacacctaagagatgctgaaggaatattaattgatttttactcatctgttgttatgattaatggtggcatttcagtggggaaaatacagctacagatgaaactgggctgttgagaaagatacattgtttcagtgtggagaatatagtattttttttttttttttgcctcccctctgtatcacttttgggtttctaacaattgtggattccagcttactccttccttttttaaaagatagattttatggtttttttaaaaaatttgaaatgcaggtatttttttccccctaaacattgacaattattttcattctccatcatttactatttgcttaggctatgtagataacaaataagacaaagttatgtgaaagcatgatccccatagtgttttttaataatgatgatacatgaggtgctgggaagggttatataaatgaggtctgctcatagcagttctccaatgtggccattaaaaaaaaatcacatttttcacattttggaagacagcgtggggaaatgctcgtgagttgctttgagtactgtcgtcatactctgagtggtttcatttctatccgttttattttggttcctgagctttttaggtttgctgttagaaatagaagctgtcaccgtgttg

SEQ ID NO: 15815 - DNA, 1032 bp, Homo sapiens
acgggaggcattcaggtcaggagaatataccatgtgctggcccttcaggtctcgatctgaccaccctttccaacaccctgggttcctctgtgtccttcctcttggaccgccctctgagaggatggtgcgaggaagaggcttccgtgttgtgcatggtaggcagggatgggggcgttccaggggcggacagcatgggcaggtggtcagaagtgtgaaagaaccgacctgtggggcacggcaggaagcccggtgtgctaggaacagatggggcgagacttgctgggtgaggaggtgtgcacctgctgcagaggcccaagtggtgggggtgagggaagcccagggggtgagtctgggcaggggctggggggtgatgagccatgtttcagatgcagaaggtgcagagtgtgtgtgcagggacagcagggagaccgcctggtggcctgcaccgcagagctgtgtgtctcagggagtgggaagccctgcctgtgctggcctcagttcttccgctcttctggaattctgcatccttcttttgacatttctctctaatgcccagggtcctggctcttggctttggcttggtggcagctgtgaccccctgcatggggctctgagggattattccagctgtttggggactgtagccatggctcccagctgcagagcctgacaggcctggaggccggcaggaagaagatgggggctgtgcccgcctgccgagagctggctctgagactgactcttggcactggggtcctctgaggccccaggctcattctcacctcctccagagacccagctgacataccattctcatgagctgcagtcctgtgacccagctgatttctgtctcattggtggaaccctttagaggtggggtagggctcctaaaacattagccctactgccttccccacagattggcctctcttccctgcctgtgggcatctggcatctgcttgaatccttcttgtcacggggtgctcatcacctcttgactgccttcctatggaagccagcaacctcttccta

SEQ ID NO: 15816 - DNA, 1050 bp, Homo sapiens
cctcccaggttcaagtgattctcctgcctcagcctcctgagtagttgggattacaggcacctgccaccatgcctggctaatttttgtacttgtagtagagacagggtttcaccatgttggccaggctgttctctaacctctgacccaaagtgatccgcccaccttggccttccaaaatgctgggattacaggcatgaatcactgtgcctggccgatttttcccattttcttgctgttgtaggtacagctgcattgggcatctttgtgaatataaatgtcttccttccctttctgattccgttacgtgtaggtaaaagtttttatcagttattgatgcataacaacccatcctaaaaactactggctttaagcaataagcattttttcatcccacagttctgtgggctttgctgcgtagctctggtcttgctaggaatcccttgcgtgtgtgtggtcagcttgcagtctggtaaggggtctctgccctggggcttgacctttggctaaccgaaggcgctgggcatgacctggcctccttcttggctttcctcaggctgctgggcttgttcctgacactaacagtggatgtttccaaggcctctggaggcccgtttgtgtctctacagtttgttggccaaaacaagacccaaggccagctaacattcaaggggtaagaaaataaactttaccccttggcggaggtgtcaaagtcattgcaaagggcctggatacagggagggtcaagccctgggaacatgtctgcacacagagtgtgtgatccgggtctgcgcgttggccggcagcccatagacctttcccaaattagtacctggcaggtgcccagctggtgctgggctgggtatggggaggggcggagaagtcgggttcataaggaacaactgtcatcattcagaaagcttttcgaagtgtccgctgtgtgcccagctctaccgacccaggtattgtcagtcctggttcttcaggaacttggcttttgcttacagagggaaggctctgtgggtgactgaccaagggactcggtgacgtcag

SEQ ID NO: 15817 - DNA, 1048 bp, Homo sapiens
ccaacatggtgaaaccccatctctactaaaaatagaaaaattagctgcgtgtggtggcgggtgcctataatcccagctacttgggaggctgaggcaggagaatcgcttgaacccaggaggtggaggttgcagtgagccaagatcatgccactgcactctagcctgggcaacacagcaagactccatcttaaaaaataataataaaaaaataaataaaaggtagtttccacactgggttagtggaaggttcttctgcaaggataagaaggaagctaagtgaaccaggccatagctttgtttcagtcagttttatacaggaggattctgcacttacctgtcacatatttgggggtttcatgtaagattttatatgaaaacaggatgtcactactttaagaaaaaaaaatattttgaaaagcagaatgccttaaataagtatgaagctaaatcatagctaggcaagggggaaaaaaatgactcttttctacacagttaacaattttattctgaatgaatccagaaaaaaacttagcttctcaaaaacaatcaattctctctctctctctctcatacacacacacacacacacacgatttaaggaagataccagttttcctgtagaatatttgaaaaaaatccagcatttcatgaataataagatcttattctgtgttaatttttttaagaaaaaaattacagacccctagattaaagccatgattaaagatttccaaattacataatttttcttcccacctcaatagcataagcatacatgtatttcagattgttgttcactaatgcccaatgaagaaatcattctctgccttggatgatggacatatattacatgtcaaagatcaaagggtctacttttatgcagtaatgttcccatattatggaaatttgggagattttcataaaaatcttaaaaccaaataaagcacattatgctttgctgcttcaaacaccaagtgattaacatgttgttaaattactgttacacatatgtaggctaatgagcatactgataacttacagtgaccag

SEQ ID NO: 15818 - DNA, 1071 bp, Homo sapiens
ggtgtctcctcccattccccacagtgcatgccgaaagcacagcccagatcaaaggctgacatgcaggtcatttagtcagtaagtatcccatgagcaggagtgagggggagcagtacaagagtgtgtcattgagctgatcaccactgcagacacctgggcttaggctcttcatcagaattgtcctcctgagaaatagtagagaggagcattcatccaagcagctctcagagtcacagcatctaaggaccgacagtgcagaacactgaggcgcaggttgacttgtcttctcgcccttatatctgacactcagtttttgctttggatccggaattcctggttgccttttaaaaatagatttgtaggtgtgatgtgatggtagtgctgttttagaaaacttaaacctttcaatagtgtgctctgtatgcattggaatcctgggtggagggagacagtaggaagcttttcagtaattggtatatgagatgctaaggatttgaactaaggtggtattctagtgggaatggaagagaggctaattgaagggtgttctgaaggacaaatctgtaggacacattggttagatattgaggtcaaaggagggcagaaaggcagagtagaaattaaagatttatagggtactgtgtagacacatttctccccaatttccagtgtaatcctcagaacttcagattctttcagctgacatgagaaaataagactcacaggatgtaggtttgtttttgtgtttttgagacagtctcgttctgttgcccaggctggagtgcagtggtgcaatcttggctcactgcaatctctacctcccgggttcaagcgattctcctgcctcaacctcctgaggtcccgagtagatttttagtacagatggggtttcaccatgttggtcaggctggtctcaaactcctgacctggtgatccgcccacctcggcctcccaaagtgctgggattacaggcatgagccactgcgcccgcccacaggatgtagtttttgtttgttttgtctttttaagacagggtctcatctgtcattcaagctggagtacaatggcatc

SEQ ID NO: 15819 - DNA, 1066 bp, Homo sapiens
agactgggcatggtggcttgcacctgtaatcctagcactttggggaggccaaggtgggtagatcacctgaagtcatgagttcgagaccagcctggccaacatggtgaaaccctatctctactaaaaatacaaaaaaattagctgggcatggtggcagatgcctgtaatcccagctactcgggaggctgaggcaggagaattgcttgaacccgggaggcagaggttgcagtgagccgagatcacaccattgtactccatcctgggcaacaagagcaaaactccatctcaaaaaaaaaaaaaaaaagatacattttgctcctaggcatatacttaagagaagtggaagtacatgtctacacaacttgtacaaatgtttgtaacagcattattcataataaccaaaaagtggaaacaacccaaatgtccatcaatggatggatggatgaatgaataaatcaaatacaatgtggtatatccatacaatgaaatattatacagcaaataaagaggaataaagtagtactgataaatgctacaatgtggatggaccttgaaaacatcatgctaaagtgaaagaagccagtcacaaaagcccacattattatatgatcccatttatataaaatgtccaaaataatagaggtagaaattagattagtagttgcctaggattggggaattgaggtgagtgactgctaatggaacttcttttagggggtgatgaaaatgttctacatgtcagaaccactgatggctgcacagatgtatctacaagtaatatagtgtcagttaagcacaacgttctcaagaaattcagtaaaaagtcaagcctaacattgtacacctcaatggctaacaaaagcatcctccagttatttggaaaatttatccatctcgcttcctagcaacagcaggtaattgagttagcttaatacttaggacttaataaaatgttaaatgttagtataccaaatgacttgaaacaataataactgtgttataaactcttaatttaatgttaacttcctccttaatagaagaatatttacccacatactctaatttg

SEQ ID NO: 15820 - DNA, 1034 bp, Homo sapiens
tcttggcacctttgttgaaaattattcgaccacaagtttgagggtttatttctgggctgtgtattctattccattggtccataagtttgtttttatgccaataccactctattttaattactgtagttttatagtaacttttgaaatcaagaagtgtgagactccactttgttcttttcaagattgttttggtagtttgggattccttgagatgccatatgaattttaggatgggtttttctatttctgcaaaaaataggctattagtattttgttaggaattgtattgaatctctaggttgctttgggtaatgttgacatctaaatactgtcttccagtccatgaacatggaatatctttccatttatttgtgtctttatttcagcagtgttttttagttttcagtgtaaaagtcttttgtctccttgtctaagtttattcctaagtattttattctttttgatgtgattgtagataggattcttgtcttaatttctcttttggattgttcattgttaatgtttaagaatgcaactcatttttgtgtgttaattttgtatcctacaactttactgatttattagttctaatagtttttttgtgtgtggaatcttttttgtggagttttctacatataggatcgtgtcatttgcaaacagttaatttacttcttgctttcgaatttggatgccttttatttttttccttgcctaatctcagctaggacttccggtactgtgtcgactagaggtggtaaaagcaggcatccttggcttgttcctgatcttagaggaaacgttttgagtctttccctgttgaatatgatactaacatgagttttttatataagaccttgattatgttcaggtagtttccttatattcctggtttgttgagtgttttaacaggtgtattttaagaaaaatcatttgtgggtgctgaaaagaaagaatttctagcctggtgagtgagagaatcctggagtcattgacagaataatatattatcatgaagttgatgttttaggcatcat

SEQ ID NO: 15821 - DNA, 1717 bp, Homo sapiens
gcgacggcagcccggccggctttgggctccgggcgccgaggggcgggacccgtcgctcccaggacgctgagaaaccgctcccgagacgggggcgcgtgtttacccgggtgcggggttgcgaccgccaggggtgggcgtgagagtggccggcggggtctgggaagggagcaggcctgaggactgctactcccaggggaagttagattgtccgggtaagttactattgcgggataaacctggaattgagctttgacaggttgggagggagacaataccgagtgtttgataaagaagaggaggctgtgcttgttggactacttgaatggcaaaaagtgtgcatatttcagtaccttatttgcacagtgtttgctagctttaccccgagggtgagaactttctcaccgtttttcaagaaactctgaggagtgttgtttctcctgtgaactacaattgcacgtcttcacataccagcacagataataagtactctggagtaggcctaatttacagaagcagtcttggttatctacaccagagcactgttaactctgcgaaaacatcttactgtaatgagaaagtagacatttttacagaattacttagctttttcaactaacaacctttttggggggggggagacggagtctcgctctgtcacccaggctggagaacagtggtgcgatctcgactcactgcaacctccgcctctcaggttcaagcgattctcctgtctcagcctcccaagtagctgggattacaggcgcccgctgccacgcccggctagtttttgtatttttaatagagacgtggtttcaccatgttggccagactggtctcgagctcctgacctctggtgatccgcccgcctcgtccttccgaactactgggattgcaggcgtgagccaccgcgcccggtctggtcaactaacaatcttttgtccctaatagcatctgtttcctttagattgctgaaatgaattgctttcttcctgaaatgtggaagaaagacttgaaattgctttgcaagaatcatacgttgttaatagcaactgttattagacttgtcatggaattttggagtcagaaaaacttttagagatctaaaggtgtgaatattgttttagagccgggaaaccagacccagagaggcgagtgacttgttgtggatcctacagctggcgatggattagaccaaaactaagatgtaggcctctacaccccattaccccatttagagagctcattgttactacactgctgagctgcttacttttcattgattgcattcttcaccattcactacctacccctatccatagggttttggtgtaataaagttgaaagcgaaaatgagagcctctgtctcattctgacagctacttcaagtaactgatgaagattttttttttttcctaacctgaacttaataaaaacggagtgatatttcgtttggagttttcttaggctcatgactacattttcacccagttttagcatggctcattcttgcatgaattcagtaaaactcataggtcaatattctgtcccacaaaacctgactactgtattgttttgtgtcccaacaccagcatttaaacaaggtttttctatcagactctgattttaggatttaaagcacctgtgttgatttctaggttacactacctagtttccaggtatcatcttgagtcacagcatttttatagtgtgtctcagg

SEQ ID NO: 15822 - DNA, 1055 bp, Homo sapiens
gaggcggttctgttgccttcccccgacttacagtggaagaaactgagattaaatctaacagagtcaatgacttgcccaaagtcaggatctggattttaactcctggtacttctgattcaaagcccgtgtggataaccactgtgctgaactgggcagctgatgtgatatcccaggaaggaggggctggcagggggatgggacaaccgtgataacccagcagacccagcacagggctggagtcaggaagaaggtggagagggggttgaagggagcagccacaggatgtggccactcagagggcagagggaatgcccaggtgggggcctgagccaggaggaaggcactgccccagcggtattgaggagcgtggggcaaggaggccccactccctgctggatgcctccagcacagggggcccaccaggctggggctgggggcctgaaaggcgctgcacacacaaagcagttgctgagaagaggttgagggcagagaggatgttttcagggccactcgtacagcagtgagggtgggacccggggctctgacaactctccccatgaagctcagcgaagagtccagcctggcccacccttgtggcttgggctgctctggagccctgagaccgtcctggtggcatattgaggtctgacttcctgccaaaccacccaccacaggctgaccaaggcgttatgcatatccacaggcccactgttcctgtctatggtgggtgagaggggggacgtgctcagtgctgccggccaccgaagcccagcttcctggggcaggaaggggcatggttggcatgcaggaggcagtatgggggaggtgggcaagagacagactgccccaaaacaggccaagccagcatcacttcccggggacactcccctcccacccccgccccgggctacaggctgcagggcaagagacccgtttaggctacagtgcccacaagctgcttccctcctgcacagtagagaagggtgtgtcccttagttttggaaaaggcaggccactgaggcacccccaggagctctgtgccccagggaggctaa

SEQ ID NO: 15823 - DNA, 1056 bp, Homo sapiens
gcccacagatggaatcttgaaggtcctgaggcagcaaggtgaggggcttatttaaggggtatggccaggtggctgaaggaggaagctgctggccggaattcccaggcggtttccacagtggaaatctccccactgccaacttcccatggcttgtctgttctttcccacctaccctctgaccagtccataaagagagcagaagcgggaaagggaggaagaagccaggggcagcctgcaaagcgtctgctctgctcagctgggtccatggctgtgcgtgccaacacttctatccttgaagtatccagactccacttctaggatttgctggggatgatgggacagctgcggcttcctggtcccagacagaaatacacagattctggtccagaccctagtcttgtaagcctctgtccaggtggggctgaaagcagaaccctgaagggctcgtccaccaagagtcaggcagttctagccctgagagaggtagaggggccccaacaatttgagctcctactaaaggctaaaggcccctttctggactttggcaaaaaaaggaagtctttttttttttctccttaagttaggggtaggaaaatacatccatcatgaatgtttgaaaccacaccgtagccctcacattcaagttgacctcaataggccatctgtcagagcccagtccaacaagtgactggactggactcttttgtaggcctggtaagtcacttgggttaagacagctaaccttgagcttttcctcccccgcagagaggcactgcccctggtaaagagacaccagaggccccatttttctacaatggaatgtcagcataggcagggacctcctccagttgaagaaacaagtccagagagggcaggtgacccacccagggcctcactgcgaactggggtgcggagtcgggggcccagttagaaagcatttgtccctccattaaaataaatactaaaaatcctaccaagttaccatagtccatagtggataggcctcgttcccaggggctttgcccaaaaggctgcacattttcttgctacagtcta

SEQ ID NO: 15824 - DNA, 1050 bp, Homo sapiens
tgaggcaggagaatcgcttgaacctggaggtggaggttgcagtgagctgagattgtaccactgtactccagcctggcgacagagcaagactgtgtctcaaaaaaaaaaaaaagattttctacccacagaacactcttggcatcaaatgtgtgggtttttcccacactcacaaccagctctgcaactctgtggacaccaactggttatcctacaattctgttcaattcagacactatctacctggagctagtgtcattccttacaggttaagggctcagtcccacaaggttgcccccattaatgatgctaatcacaaataatggtacttctggtcagcttggctacaaattgggtattcccacaacaccttcctcaggttcagcactttgctatgcctgacagaattcagggaaacactttacttgtatttaacaatttattataaaagatgtaactgagaaacagccagatggatgagatgactagggcaaggtatggggcggggttggaagtcaggagaggtagggcatggagttttcatggtccctgggtacaccaccctggaatctatccgaactccatcgtttagagattttgtggaggttccattgcataggcatgattgataattgattaaatcattggttgttagtgactgagctcagtctccagtccctcttccctccctggaggttggtggggagaggcagctgaaagttccatcccccatcctgaagctgtctagggactccagccactagtcatcttattaacatgcaaaaagatgctcttactactacagatatttttaaggtatcacaaggttttatatcagcaacagaggactaagaccaaatatttcaacaaaagatgcccctgtcactgagaaagttacaaggctcttagaagctctgtgtcaagaattagggacagggactataatacatatatatgcatagataccattttatcttttttgttgtcttattagctataattcttaacgtctttttagtgattgctttggggtttatagtatatatcttttat

SEQ ID NO: 15825 - DNA, 1050 bp, Homo sapiens
agtggcccaatctcggctcactgcaacctccgcctcctgggttcaagtgattctcctgcctcagcttcccgaatagctgggattacaggcacttgccaccacatctggctaatttttgtatttttagcagagacggggtttcactatgttggtcaggctggtcgcaaactcctgccctcatgacctgcctgcttcggcctcccaaagtgctgggattacaggtgtgagccactgtccccggcctaatttgcgttttctagaattttatataatgaaatcatataatatgtactggagggggtggtatctgagtctttgactcagcataatttgagattacgccatgttattacaattactagcagttcattcctttttagtgatgaatagtattccaatgtgtgggtagagcagtttgttcatctattgatggacatttgtgctttttcttgtttttggctattacaaatatagttattgtaaatactattgtaccagtctttgtatggatatgtgctttaatttctattggataaatacctaggtgtggaatggctaggtcttgtggtaaatgtaacttttaaagagttttccaaagtgattataccattttacgttgtcactaggtggtatgagttcaagttggtccatattcttgtcaataactaggtatgctcagtctttaattttattttagacttttaaaattttactattatttccttgtcatttgaatttgcatttccctagtgactagcaatgtagagcattttagcatatgcttatttgtctgtttgattattttgcccatttttaaaatagggatgttctgttgtagagttttgggagttcattgtgtattctagatacatgtcctttatcagatgtgagatttgcaaatttttctcccagtttgtggcttatcttttcgttctcttaacagtgtttttcaaagagcagaaagtctttattttgatgaaatccaaattagccttgtcttttatgaatttatgcttttggtgccgttggtgttttatctaagaacctttt

SEQ ID NO: 15826 - DNA, 1048 bp, Homo sapiens
ttccgaccttggggaggctagggcaacatgttgtggtgagtggacagctggtggctggcctttagaaccacactgggccaagcgtccgtgtggatggggtcacatactcaccgagtgacctgggacaggttccttcagctctgagtctatcagattccttcctcacctgcaaaatgggcttgggtagaggattagggattatggaagtaaagaacccagcagagtgtctgacacatttatcattgtaggttttgaaaaacactttcagatcggttggataacatcctgcataagtagactggaattaggaattgaggaatgcaccttgtttttaattgttgttggtttaggagcttatgcatgaccacaggacgcaaactctaacgaaattaaatgtgattgccatggatttaaaacaagagaacatctgataaggcataatagctttgcattctctcggagaggtttaggacaaggagatttagatgaagaaggagaaaatttggagtggattgggattcgatttccaaggtttgggaaatgaccttgatgtttttcagacacaaaatgaaaacaaaacccagccgctggtgcagagtcccttgaaagctctggatccggctgggtctgttagctgttggaacttctcgcttgtcaaggggacataacacatccctagggcttgtccctagagctgtgtgacaacacagaaaacttctgtttgtcccggcttggttttaaatctgggaaaaataaaaagcattgtctttgcagtctgagtgacccatcgaacaaacaggatgaattatggcatgttgcggtattttcaagtgggtctataatttttggattccagcagccttcatttgttctccagtgtccagccctgggaagcttcagtgaggaaagatcttaagaattcctctcccaacccctcccctctccttaagagtttgttccatttgtaccttctgttttcccaattttgaggtccttcaaagtctgtcgaaatcaagtggccaggtttaattgagtgaactgcacttcg

SEQ ID NO: 15827 - DNA, 1025 bp, Homo sapiens
agtgccagacacagtctagcaaagaacagttaggacaattgtaacccctaatatgagtctagcacttttcactgcaaagcccttccgcacgcatctcaggccctcaggaggcagaatgcagcctagtttgcacatggaagatggaggctcagagagactcaaagctttgccgggaagaaatcataagccctggaccccgaacctcggcggacttcccacacacctcttaagatggtggagaggtatgaggtaatggcttccaggtgtctcaggtcatctgggccaagggggaccctggctggaaggagcagaagagtaagaggaaaagtgcagggtgtgcgggaagaaatggggaatctgaggttctgagagcccccatggagggtgcattgtagctgctgttagcagtctgctgggcactggctgggggaaggtcatgaaaacaattgctttacaaagagcatccacagaaagtgtatttgaattacagttctttaatcaagttgttttactgacattggaactttgacctaagggttttaaccctcgtgtaaaggacatcttttttttttttcttttttttttgagacagactctcactccgttgcccaggctagaatgcagtggtgcgatctcagctcactgcaacctccgcctcctggattcaagtgattcttgtgtctcagccacctgagtagctaggactacaggcatacaccaccgtgcccagctaatttttttgtatttttagtagagacggggcttcgccatgctggccaggctggtcttgaactcctgacctcaggtgatccatccacttcggcctcccaaagtgctgggattacaggcgtgagccatcatgcctggcgtaaaggacatcatttcaatgtgtatatgtgagactgaagtgggcagattcttctttcatttctttgtgtgtgtgtgttggtgaggggagggcaatgggagccaggaggtaggggtgacagggagctctttttctgagttgtatgaggttttaagtg

SEQ ID NO: 15828 - DNA, 1047 bp, Homo sapiens
gtgactacactattttactttcccaccagtaatgcaccaagttccagtttcttcacatcctcaccaatacttgttttatgtgtttttgctaagagccatcctaacggatgtaaagtggtatcttattgtggttttgatttacattttcctaatgattagagatgttgagcatcttttaatggcttattgaccatttgtctctttggaaaattatctattcaagtcccttttacccattcttgaattgggtttttttgttgttgagttttagaagttctgtatatattctggatgagagttttatagttttagctcttacactgggtctttggtccattatgagttagctttcgtacagaagcttctctagtcatgatggagttatgtcccagtaaacccatcgtaagttgaaaatatcttaagtcaaaaatgcatttgccccagcgcagtggctcacacctataatctcagcactttgggaggccaaggtgggcagattgctggagctccagagttcggaccagtctgggcagcatgtcaaaagctcatctctataaaaatacaattcgctgggtgtggtggcacatgcctttagtcccagctactcaggaagctgaggtcgaagatcatctgagcctggggaggtcaaggctgggctgagccatgatcatgccactgtactctaacctgggcagcagagtgagaccttgtttcaaaaaaaaattattcaatccacccaacctactgaacatcatagttttgcctagcctaatgtaaatgtgctcagaacacacattagcctacacttgggcaaaattatctaacacaaagcctgttttattatttttatttttttgagatggagtcttgccctgttgtcaggctggagtgcagtggtgcaatcttggctcactgcaacctccgcctcctgggttagagcgattctcctgcctcagcctcccaagtagctgggactacagacgtgtgccaccacgcccagctaagttttgtatttttggtagagatggggtttcaccatgttggcca

SEQ ID NO: 15829 - DNA, 1033 bp, Homo sapiens
cttctttatggccgagtaattaagtagtttttggttaggatgtttaataaccatggaggtgataaatacgcttatgtatctagttacctccttaaaataagttcttagagatgcaattgctgcatcaaagaattgtgaacttttcaaaggcttttgatgcatgattttcttttattaatttgcatacatgctatgtcagatactcggttatagtgaacacatatctagtggcttaatgaagagggaacttggaggaaaaaatctttcaaatataatttccctatttccctacaacagcgatttctgctccccaaagcagcatacacccgtgccagcaccagaccaattagtactattgaatgcttgccaagcagctagggagtagaactgttttaaagtatagttctttgattacgagtgaatttgaatttttttcatacttttattgactatttctaattctttgttaaggttgtttaaagttagaagtaatcttttttctttgctgggtatatagaataataaatggggtggggatattttttctttttttcttgagaagtttgaaaaacttttttaaaaatataacatttgttttactattacaatatagtaggcataccataaatggtatttccccccttactaaagaagtaacaaaagtcatatatccaagaaaagaaactacatctgtggactgcctgtaaaagtggcctttttgcttacaagtcacttttccctctgtaatagcttaggagatctgaggaggatgaagagaaagaagaggatattgaagttccaaaggccatgggggatatttttgagtcgcttgctggtgccatttacatggatagtgggatgtcactggagacagtctggcaggtgtactatcccatgatgcggccactaataggtattgttggctccctttagaaagaaaaaaacccacaaaattaaaaacaacttcagagatattattcatattattctttcattttgattgcagaaaagttttctgcaaatgtaccccgtt

SEQ ID NO: 15830 - DNA, 1044 bp, Homo sapiens
tctgctttgttgagttaaacatttatttgagagggtacgtcttggcttacaaggcatacagacatgagtaagacacaagtcttgtggaggagctcatctccaaagttttggagagtggagcggagaagagtaacaagcttcacagagcttggctgctctccagtgtgaagagggtgacaccagagttctgagtaattaacgctcgatagctcagagaaagggcgggctcttaaactcagcatggactaagacttaagaaaaggaatgaaggtaagatattcaagttatgggggaaaaatggaaaaaagtctcacaaggcaacatgagcctcctggacaaataccttagaaagctgctgatcacttgcagcactcagaaggaaggagcatcactgttgaatcaaggatggcattaatggaggaggcaagttgacagtgcataagcaaagtgaacagatggcagagcatgtcagcgtcagggaagcagccgtggcagcagtcagaagtgtggaaatacctgagaaaaggcttgaaaaggcagctggggtgaagctgtatcgtggaaggccttgaatgctgggctaaggagtttgcacgtgttttgaatgttgtaggcactgttgaaggaatttagagcaaggaactattaatgttaataaagtggtagtttaaaatgattaatctggtagcagaatgtagtgtgagttgaaaagcatatccaaaccaacagcagaagcagagaatgggatagaactagagttctggtagagaggaaggggctgaggtgagtgagaatttcagaagaaataattttagctaacaatttaaaagtgcttactctgcactactctaaaagataaccgtatacgcacacacacgtacacacacccacatatatacacatatatgcatataaacctaatttaatttttataattctgagaggtagaaacttttattttccccattttataggtgagaataggctggagaagttagcttgcccaaggtcacttggcaagtaagtggcagagcttgggtcgaa

SEQ ID NO: 15831 - DNA, 1050 bp, Homo sapiens
tgtactctgtgtacattgtaaggaagttgagaatgatcacaaagacccggcagtgttatacaaagtgtttgaaagggcacaataagataacagtgaaaatgatcatcacatatgttatttgggatgaacgtctgggaaattgcattgcaaatatggacagtaactgttgactgcttaagttattgagtgattggaaaatgatgacatggtagttacattcagaaagactaacagtcgtgtgtgtgtgtgtgtgtgtgtgtgtgtgtgtctgtgtaggcacggtacagtatagactttgtaccatatggtaagggtctccatacgattggaactgggagggattcattggaagaaggtgtctgcagcaggttactttggagtactgaagtatgtttaggagagagagagatattttcaggagagttttttctgtaggtacagaggcagacagcatacagcagagaggatgtgttttcatcataagttctgttttttaaatgttcagatcttgagaaacaagtgttccaagtcggttgatactggtgagactgacattgatcctgtcatggatgatgatgacgttttcccaccatatgtgttgaggcctgacgatggtggtccacgagtcacaatcaacacggccattggacacatcaataggtatggcatcatatcatttgtgtggaaaacctgggaatgttgcacagtttaagtctaaacctgtacattttgtattgttgacattttgcggttaccagtctttacttagacttgccatattttcgataaagaaaagttacttcttttttcatttttttttaaatcaaaaggcaaaaacagtatcgtgcagcaataaaagttcagtattccttggcaaggctaacataatgaaggcattttaaattaggtttaatttaattttataattctcaccaatttttttctaaatcctgaaattttttgttttgtgccataaccattgggtaatgttgaattttcccctagcaataaagtaagattgtgataaactaatttatgtttttgggtaca

SEQ ID NO: 15832 - DNA, 1032 bp, Homo sapiens
tttgtattatagaatacttcttcatatattagaccagctgtccccatgaggtagctgtagagtgatttgtatgctcagaattagaatagctatctggcaaaccaattttgtgtcttaattgccatcaaccaacttattttctgtgattggattgatgttacacaactgcatttcatggaaagacaaagcatgtatgaccttaactcttgtacattccatatgactatgaattaacaaactgaaatcttttcctagaaagtgttttctttttttcatttaaaggcctattttgtttcaattcttaaaaaaaaaaacagcactatattttatagattttagcttaaatatttttgtgccttgtaaggtcttaatacaggaaacagcattgtaaagatgctaaaaactaataccatggtctggcttgtacacaaaaacctatttaaagtttattatttaacttaaaattagcagaataattcctgttgaaggccttttctacattgtagctttttgataatttccaaatttggagagtccaggagccagtctgatagatataactgtctgaacactagcttatgttaccatttaatttatcctgaattggagagtctcattaaatcagtttctttgtccatgtttccatgcatgctgagttttctgtgatactgtcatcttctttagcctggccttaaggatttagaatgcccaagagcatgtgtgtcagaaatgacagttgtcatttacttttactaattttttttgttcattttagaaattttcttagaagtgcttttcttggtggattttttttttcaggtacttaggaaatttcgagcacatgagaccaacctgcttattgcaacaagtattgtagaagagggtgttgatataccaaaatgcaacttggtggttcgttttgatttgcccacagaatatcgatcctatgttcaatctaaaggaagagcaagggcacccatctctaattatataatgttagcggatacagacaaaataaaaagttttgaagaa

SEQ ID NO: 15833 - DNA, 1118 bp, Homo sapiens
gcctgtagctttgtcctgggtactggttaggcatggccaagattcaccaagtagataaatacatttttctctctaagcattattagcataggtatatcccatgtaattattgcttacaagagattttatttattgtgcctgttgtctcttctgttctctgtggttttgatgtgggtttcattaaggaaaaatgaattgactgttgttgcctctatttcttagctaattgaagtctgccagatggataatttataattttagcaaagtaaaatacattctttgcctaattaacagtaagttaaaacacattctaaatctctattatattcaaattgatgcttatttatataaaatttggaagtatgtattatttctaaggtgatttattttgtattttagacttttggacatgttatttgtttgcatgtaacactgctttctgttacatcttaaatttattaaaataattaaacacatcttggaacataataagggagctctgattctgaatatttaagtacgtgaactgtagagcttgaactacaagctgtagtttgtagactcccaaactaacctagacacgcaagtgttgtgccggttgggatcaagagagattctagatggccacttccagctctttattattagtctgtttcatgtattttttttttttttaaaagaatgattcaacttaaaaatgcaattttctatttggaatttatactatgtaatatgacttcagagaaaccatgtggaatcgcttatatcaggtgtggaaccatttatcccgtgtgctgagtttttgaatgtggatatttccaaaatagctgtaatggcagcactaactgttaaccttctgcacccgtgtaatgtgatcccgtcccgtagctctttgccatttcttagctagaaggccagctttcagttacaggcactgtgggttaatacagaggagcaggcaggaagagagacagagctcaggaatctcctctttcatgacagggaagggtggggttgccttgccatttctgtgccctgtactatgctgtgcagaattttggtcagtggcctggggacaagaaagcatcagggattgagaggatacaacatttctttcc

SEQ ID NO: 15834 - DNA, 1028 bp, Homo sapiens
aagactattagcaaaggtgatattgaatccaaattttaggccgtggattcctactctttctcccttcaatgaaagattttttttctaatttagaaccagccagggagctatacttcagatttctgtcagatggtcacttaatgtatggtccttttggtttgtagatagatactcttatttttttctgccaaaaaaggtccttattttgtacttaaatcaatttacttttctatgagatccattaattggccacagttgatccctaacttttctgcaagtagtgatctcttaggaaaaactaagctttgcttcctaaggtaatttgggatttttttttttctttttctttctttgtgtgtgtgtgcgcgcgcgcgcgcgtacacgcacgcgcacacgcgcttaactgcttctgaatgtttaggggttttaaaaacttttttgagtaacgagaaattggactcgagggtcatcatctggcagtttttagtctggtaattttcatagtcattgagcctgatccttctgatgaatacaaaggaaaataactttagggaccaaattacatttaaattagaagttgaagattggaaggggacctcactgactatctaatccaacccacttatttttgtaaaaatgagaaagagcctcaggagagagagtgatttgctgtaagttaaattgctagtcaatggcagagacaattctagaatcctaatatcctgactcctagtttccagttctttctatcatagtaatgcccctgggcatcacagaacactaaaaaccagtgctttacagcaggaagattgccaggagacggacctgggagagcgtgactaaggagggattatttcttagggcagggaaaaagcattttgggagtcaaaaaagtttaatgctggcgcagttgtaagcctagttatggacatactccccgtctccatttaggattatataaggattaaataaattttctggggcttggagagaagaaatgggggtgtattttccgccttcctcctgtt

SEQ ID NO: 15835 - DNA, 1023 bp, Homo sapiens
agtctcaccgtggcatccagaggtgctgactgtagatcgaccaaaattcatccacagtttctagtcagtatagtggaaaacatataatgctggagaatattgtacataaagttcaaggaaaactgtattgctcttccttgatgcctaaagttaaattactgtgctacataaattttatgtaatttggcaggaagtaaatgactcaggtatagttttaactaattacagatctaaaaataagcttcattaacctcatacaattgcatcttttaatttctgtttgattattttattgaaaaaaggagatggttctaggcatatacatacgaaatgagcttgaaaaggctaatggcctctccccccaccttcagggacttaacctaaggctgggttacatttaaggagccatttgagaacaactgaaatcccagttaaaccccacatgaaaatgctacattattattatttggcattaggttttttcttttcttttttttgtagatactatcagactgtcgtgccgtattggtagttctgggaccctggtgtgcagataaagtagctggaatgatggtaagagaactacagaaatacatcaaacatgagcaagaggagctgcacaggaaatttttattgtttacagacactttcctaaggaaaatacatgcactatgtgaagagcacttctcacctgcctcacttgacctgaaatttgtaactcctaaagtaatcaaactgctcgaaatcttacgcaaatataaaccatatgagcgacagcagtttgaaagcgttgagtggtataataatagaaatcaggataattatgtgtcatggagtgattctgaggatgatgatgaggatgaagaaattgaagaaaaagagaagccagagacaaattttccttctccttttaccaacattttgtgcggaattatttttgtggaaagaagatacacagcagttgtcttaaacaggtaaatctgtaagttgactcctttcacatgagaacagggaggcgtcctg

SEQ ID NO: 15836 - DNA, 1079 bp, Homo sapiens
attttatgtttaaacagattttctgtgtttcttaagttaaattattgaagaaagtttgacagataatgtactcatttaatctcttctggcagaaattgttttgtcctatttctttttgctgtttctcttaaatgttctgcttctgtatttcttttgaatggattgcttttggaacataagtattggaacatatgtacattagaacataatctaagttgttacatttatttttttcttgatgttttagcttcaccaagtatgtcaaaaggtgcttaattatggataattaacgtttgtacttatgattttgctaatcagttgtattaataaagttacatgctgcttagaaattagatattcagttaagagtttaaaatactgatttttatatgcttggattatatataaaaataaaaaatataaaatgtgaacctaagctggtagggcactaatatattcatgtcactgctctttttttaggttgtctcagtataactatctgctttaaatacatgttagactgtcttgtttccatctgattttattgaagaaaacaggagggtggcttagaggaaatcagctatgaagaagaaaggtggtgtagggttctctgaagcgagtgacaaaaagtgaggtggcaagtctagtaggtgccatttttttggaggataaccttggaactgtggttttaaagaggctatcaaaaacattgttggttaggtctaatataataataaggatttctgtagactgttaatcattagtagtccagagagccaactaggcaagatttctcatatttacatggagtattatatttgtaattagcaaaccaggttgctcaacaagtgtcagctgtcagaactcattcagatctcaaggttggggaatactcaaacctagaagtaaatgcatcttggacaaaagagagatggaaccaagagtttactaagcaccaggtaagacttgtagagaaatttcactttataaatccctacaagttcttgacttggtttgtaagatgatctgtagccttggttgtctgatttaggtttgaaaactaatttcctatacttaat

SEQ ID NO: 15837 - DNA, 1045 bp, Homo sapiens
ttctcagattgattcttagaaaccagctacctatcatttttttctaaaccctgtgaaagttttagggtggggtagggcatttatgagaaatgttgtgtttgctaagaaaaaaaaaaaatctctgtcctttgaaatgccaggaacagaacctggacactgagtgaatttgcaactcctccttttccaagctctttacctgctggtttgtaggaataggatccacatacttgagtgaggttggtgtcttgaggtgaaaccgggcctgagaaacattggaggtctagggcttattttccagatagaattgagtctttgttggtcttgggccagcttccctgccctgcctgttttctcctttgtgattttatgagaacaaaggaggaaataggcaggccagggaaacgatctctctccctctcttgtgccgaggaagaactgtccagatttttcctcaatttgtttccgaaacaagcggctttgcagtttcaaaaagaatttactgatagcagaaagtgaaaaaaagtattcctaaggacaaataaggagaacattttcaaagtcttagaagcttcttggtagagctcatccctggttttttggagtctaagacccttgacttttcccttacaaacaaagcttttcaccttgcttggggtctggctgcagtacttgttcattatctcaatatttgtggcctgatggctttctgctttgatccctgacttttttcctttccccttcccctttcccttccccttctccattcccttcccctttttctttccctttcccctttcccttttccttccccttcccctttcccttccccttccctatccccattcctgtcccctttttctttccctttcctcttccccttttccttcctcttattcccttcccctttttctttccctttcccctttaccttttccttccccttcccccttcccttttccttcctctttcccttccccttcccctttccctttcctcttcccctttcccttttcctttttcttttgcctttcccttccccttcccc

SEQ ID NO: 15838 - DNA, 1031 bp, Homo sapiens
ggaaggcatagaacttttcctgaatctgttgattcttaattgctttcagctcaaaataatataccaaagtggcatagttgggggtggcatctcctgatccccattcaggagtttgtggtttttcaggttaatctggctataaattctgtataaaatcttctatgcattatatgagaatgcattttctatgccgaatcttacggttaatgaaacattttaggttttctttaagggtttcataaaattttaagagtttaagaattatgctaaaaaaaatggttctaggtagagatattttgtatgatatggattttgtatgttccaagcattttattttctctctactaagtttaagatcttgtgtaatcctcgtaatagtcaggtgtttctgttttacaggcaagtaaacaatgttagcgaggtagtggagtctggatttaaaccttggtattctgacactgaactgcttgctggcattaagataatttttaaaagaaagataggtacaaaggaaaaaaaaaagaggctgcttcctatatccccagttgccttactcagtgcctcctgcataggcgggtatacatgagaagggagtgacagtgtatagatgtcactgaaaactcagaatcagtgttttgaggcaaatacgtccattaaatacatgtttatatgtatatataagtatatgtataaatataaatgtgtatattaagaggcaagagcatcaatttgcttattaagttagctaaaaacatctgagactttttctgctctacaacttagaaaagggaagtaggtaggagttgttttcaaacaacttggattctatgtgtggattcattttcagtgtggctgtttgcccactttcattttcatttttaaaaattcctccatgtagttggccagcatattttagggcttctccagtatttaagttctaagaaatggaattttattatttggtatgaatactgtttgagatttgggctatatttaaaaaataaaaaagctaatgttagggaaatacaatt

SEQ ID NO: 15839 - DNA, 1102 bp, Homo sapiens
tgctctcaacataagcatttttgttcattataaacttaccattttaaatggctgaattgaacttcaccatgtaaaatgaaccagggtttaccaaaccatttcctcaatcattgttagacatgtaaattggtggcggggagtgtttctttgctcttataaatggtaatgatgaagggagcgtttctatatgaagttttttttgtgtgtgtggtaatgactaggttaatgtgcagcgaattttaattaagaatgacagaaatgtaaagttcatacccatagtgttagggtaaactaaaaaaaaaactttttaaaaagacaaatgacaattaaaagtaaaaatataaatagttcttgtgttttgtatttaaatatgcaaagataccagtgtttaaattcttgaaattattgttttttttttctctttagtctcttaatccttggtttgaccttaatcttttcatagtctatattcactaaataatagttgataaatccttgaaatacttgttttatatactgtggatatgttggatattttcttttgatttcttttttatatttttgaaatatccatgattattactatttcttgtttctctgtgaaacattttattgcctaagaaacagttcagtgaaataatgttttcagtgatgtctgtccagccagtaagtagtacacagtattttttgtttgtttttcaagagaactagtgaatacaaaactgtttaaatttactttacgttaggtaccatattttgtgatttaattgcattgattttcatcttaatgtaaatgcataatggctagcttgtttggaatgtaggggaggaaaacttttcctccacccacttaggctctattgctgggatctgtgaattaaactaacaaaagacattaacaggggaagaggtctacagcttgtattgatgttaatatttttgcacgcacaggggcatcaaagaaaaagatgtaaaatcccaaagaaacacttagatttagaggctcatataccatcttaacaaagagtgataaattgtggaaggacaaaggaggggatgtttggatttctagggttgataaactgtgggaaggtgattagac

SEQ ID NO: 15840 - DNA, 1032 bp, Homo sapiens
ttgggcactaatctttggtttctgtggtttgaaattggtgtgtaaatagcataaggggacatgcgctcttctgagcttgagcagctggtcacattcttatctgccacttgtgttcccacttcatctggcccagtagctcacaaagggccactggagtgatcagtgaaggggggtgcctgggcggctggcctgatggggaggctcctcctgcagatgccacgttaataagtgctgcgtcctgctacggcactggggatccaggaggtgagtccgaaaccacattggccatgccctgctggatatagtgcacacagggcatccagggcaagacagccagggaggagaagggcctgggctcggcctctccagcccctccatgagctcacctgcttactcatccaaccccatggaaagcgatgcatctggcactgccaggaagataaaaaaagaaggaaaatcctgccttcggtgtctaatgcgggagacagagtccccagtaactgtactgtgagagaatgtggcctcagccattagagatgggcccagcgaagggattcaggagttcaacagaaggaggctcccacccagatccagaaaggctgcatgggggttttggggagcctagaactggggaggaagttctgggtagagggactaagggtagaggtcccctaagtgcaggagccaggtgggaaagtgaccagctatttcagattgcattggctctgcctctatctcagacccttccccagtctgtcactgtccctcctccccagctcagcttgcagagggatgaccctaaagcacaagtctcaccttatcacttcctgactgctgcatccaggacaaagtctaaatgtcttagcatgaactccaagactcttcccgctctaacctggccacccacccctctttgtctccctcccctctagccaagccagcatcctcccacacccccagacatccaggctctcctctgcctccaggtgtgactgggctggtcccaccatctgggcaagcagttattcaacc

SEQ ID NO: 15841 - DNA, 1068 bp, Homo sapiens
acaattgggatatggttgagtaagcattctgtttaccgtcacacatgatgggtttgtaataacacaaggatgtctattttatcgttcacctgcaagtaacaaaaacttgacttacaatggcttcatcaaagaggatttcttgatcatatacaaataagcccagagagagacagcctggcccagttctggggcccagtagggccattcaggaaccagctacctctgttcactgctcagtcattcttagcagtggcggttgtgtaatccagcttcgcacctttgttttgggaaggcagattaaaggaatgggaacgggggcacacaccagcattgtctgcccccttttaaaaagcattcctggaacccctactccctgagttccactcccagctccttggccaaactttgttacatggctacctctgagtgcaagaaggctgggaaatggttgtttttaaaccaggaagattgctaacttgaaattgggttctgagtgggcagatcatgaagtcaggagatcaagaccaccctggctaacacagtgaaaccccgtctgtactgaaaatacaaaaaaaattagctgggtgtgatggtgcacgcctgtagtcccagctacttgggaggctgaggcaggagaattgcttgaatccggaaggcggaggttgcagtgagctgagatcgcaccactgcactccagcctgggcgacagagggagactccatctcaaaaaaaaaagaaaaagaaaaggaaagaaattgggattctgtttgttagaaagaaggggaaaatggatattggggaggcaaccagcagcatctgtctcggtccaccccattagcttcccaagatatttgtacatacccttttccaatacacagacatgactcaccttcttcccaagggagagggctacaaagtttcattatgttattgcagctagggtgcaaagtccaggatcgggcaggactgtgccagtttcccaccaggtttgaatgtgtctggttccttgtgctaatcaactaaaagacaagttatctgctcaacatgcagtgatgaagaggaagcaag

SEQ ID NO: 15842 - DNA, 1274 bp, Homo sapiens
ttacaggcgtgagccaccgcccccggccgcctctgagtttccagcctcgttggccctccagccttttaacctgttgggcctaggatcaggaaaggtttgttgaatggggaactaagaagtgaattcgttcgttcgacaaacgtttcctgagcagccgctgggtgctaggcgcagtgccagcgcggaatgtccagggagacctggtgcccaaagcttggacccatcgtgagaaatgagaagcagatacaaagcagtgtgggagtgcagaggagacaaagcaagcctcatcaggcccattgcttgctctgctctcccttgtacttaccagtgcttgacaatatacagttatttactagcttggttattgacttcctacccagcactcagttttattcactgctgtatcctcagtgcctaggacgatgcttggaacgtggtaagtgctcctattggcgggaagaataaatccggaagagcaggaccagtggacttgctacataatctgtagtcttggagccgcacagggttggtggtaccctcgagcacaccagacttgcagaaaaagcatactccagaggaagctgaggcatgcctgctcgagagccagctgttccatgtgcaattttcctctgatagtttctggtcactgttgccacggtgataatgactgggctatgtcattatctatccgccaacagtaagagaagctttgcagtcgagatattgtttagcagatggagtgttttctgttgaacactaagtactgccacaagttacttttttttttttaaactttgagtatttttttacaatgttgctggaggtgatctgtttatgctttgagagtgttcgaatttaaaatcagaaaatcatgtcagtgagtgagtctttcaaataatccttcggcatgaaacctgagcctagtaaactatgaaagtaaactcggcacattacccgaaagtctcaatgtcatattttcacccccatcaatattattgatgattgctcattttctaatgtgggacctgaaatttaccaggtgcttaaagaatctttttgtttttcagattcattgattccaggtaaatcagaggaacaagcaacatgaacagaaatatgtagaaaaagctattatgcagaagcataattgttgtttcagaagtccagcatctggtgcacttaacaatagagaatatattaaactctttccaaaataacctgttgttcctacctgtgttgtaagtgttttgtttgtttttaagtaaatattggtg

SEQ ID NO: 15843 - DNA, 1025 bp, Homo sapiens
gccaaaaaacttaaaaagacaacagcgtaaccacctgtttaagcaccgtgggaccatctcttattcgggtagagcctggtcctggcgacacactaacaggaaggcgtgctgtgttaccgggaaggcgcctctggctgtggggtgcgttctgaccaccccgctcagatgccagcattttccatttgcccttaaggaaacttgctatgtgtgttaacccagttatgattagtcaaactggaaaacacttgatcaaacttaaaattgtaaaatctgtctaacttttaaatatactttccacagttgtacttaagttcaattaactacagtatagagaaaaataattattctcttctttgcacccggagttgcaaacaaattaagtttacaaatctcatttaaacatatatctttgtaatgtaatctccgcggttctttctttgttctaccctcctgcacctgttgtcgatgtaatcattttgggaacagaaacgttgtgtctcaaaaagattcgttgtcagttcagccaagatgttctttacctgagattctggaaagatgtttatctatatcggaacacttctacattattaaatgtccttaagctttttcttttttacaagtgtcttttcagactttggtgttgtgatgacacagtagaaagagcgtggctagaatccgtggtttgccacatctgcagcttaccaaacggatgacttgtccaggacatctgatccctgtaagcctcagcatccctcctggtaaatggagggttttttacgacaaagcccaaagggaggttttggatgattaggctgtgtgtgcgtgtgagaatgatcacatgtggcgtcatgctttgtacagagcctcagaccactgggcctcgtccagtgagagtcctctctggcgacatcacacgcggagcagccaggggccaccttagatctcagatctctcagagcaatacttttctgaactgccactgtgcctgggtggttgggttggtgtcatgcttctgactagagtag

SEQ ID NO: 15844 - DNA, 1081 bp, Homo sapiens
gaattctgtcattaaaaataataatcctggtttatctaaaagcatggcatttttttttgtctggttacaaacataatgttacctgctttaaaagtgtgtactgcaggatagcttagagagttttccgaccagagtttgttcactgccctcctctctcctacctccctcctctacgcagggaatcacagacacggctcagaccatttatgaaactgcggctcgagaacacgagagcagaggggtgactggtgccgtgggcgaggttctgcgccagattcctccggcagtggtgaaacctctgattgttgccacagaagcaacgtcaaacgtgctgggtggcatgagaaaccaaattaggccagatgtccggcaagacgagtcacagaaatggcgccacggggatgactgatggcttggaactgacagtgtgaagataaggagagtggaaccaggagctcagagtcctgacagcagcttcagaggaagctcgtttaattttattgtgctcatctcaggaacaaaagcattttttagttaaataatttaacatcaaaacaacatgcaaccaaaaacttctgacatttatagttgatacttgcctatagaaatgtttggtggctggtgtcaaaggtccttaaagcatttgctgccaagttagtggaaggctcacttttgttaagatgactgtaattctccttgttaccgacgagagatcattggaagctgccttctaacactttgtgtagctctgtggagttggattttcttaaggtttaaaaagaatcacagcttcggaacttttaactgaaaatgagagacagaagccacaggggaagcaaagcaaataggattttcaatataaatatcagtgtggaaaaataacctattctgttgaatttagtgttcatgcacttgagaacaacattatttccatttactccgaaaatccttctgtgggggtttgagaaagtgaatgttgcagacatgttctgttgtgttgcactttatcctgtgtttatgtgtatgtgtttttagattaattcaagttgtgtgctatatttcttgtataatttacaaagtt

SEQ ID NO: 15845 - DNA, 1024 bp, Homo sapiens
aactaatctgctgtgaaataacaaaaccttcttgacagaaattgtgttgatatgagctcaggtttggaagtagagtatttatttgtggggtggacgttattaatttgcttaaatagtactggttgaataatgttcattagttgtttaaataaaacttgaataactaaaagctggtaacaaatatttcaagactgagcttaaataatatttataaacaaaaaataggcgctgtcttagagaaaatgtactgtgaagtacagaagcttagcatagctctacattaatgcttatagcctctgacctaggttagacttgccaatcagtactttaagtttatgttttatcattatgaaaagaagatattttgatatccatactttaactaaatttatccatatattgattggcctagtggaaatacaatgaaatatttgtgggaaaattgatctgtggcgatcaccagtgtgaacaagactttgagtaagatacatctttctggcatgactttacgaaacttagcaagcccaattttctttctttttttcttcccccgccacagtgtctcactctgtcacccaggctggagtgtagatcatggctcactgcagccttgacctcctgggctcaaactatcctcccgcctcagactcctgaacagctgggattataggcgcataccaccatgtccagctaattttctatttttatttttttgtagagacgtggtcccattatgttgcccagactggtcttgaactcctgggctcaagtaatcctcccaccttggcctcccaaagtgctgggatgataggcataagccactgtgcccaccctaattttctttaatagacttttaaatttaatattgaacacaatttcttatttagaactataaagcattatgattttaaagtggagagttattaatcttagaaccatcagggaaataaattttatgactaccttgaggaagaatgagaaataattcattaagacataaaagctaggaaaacaaagccacacc

SEQ ID NO: 15846 - DNA, 1030 bp, Homo sapiens
ttttctttgaatatgagccactgattggaattctatgttgtctttttttccccctttccttttttttaatcctgcatgtggcatctgactattttgtcttttttttgcataaagtgtacccagaaggcattgtctaccgtttttagttccagtttctttaaagtgaagtgaaaaaaattttttcagagatatgtaagaggagaatctttgtaggtttttaagatttttttttaccccagtctgcattaattaaaacggtacagtttttatttaaactatacttaaaagtaacaaatacaagcagatttgaagccagacacagttggtctttggcgagtatatgaaatatataactccactgataggaacagttctcagctctactagagagatgtccaccaacagcaggcagttagcatattgggggcttccgttgttgtggcacttgggggtaattgggtagctgactgcttaagtcagggagtatgtattagaatcgtgtattagagtatgtatctgttaatctggatagttggtttaatggattgcttaagagagtttctattctattaaataccttccactaaccactttttggtctctcaggcccctagaattgcataaatactgaagcgctccctcactttctgggatcatataaatctcatatctaacttcctcagggtttgcatcctttgccccttatccggctttgtattttcaaattaatactgtttaaataattttcaaacattctcagagaagatttgctttacagtacgaagaactccccgtgccctaaccatctgagagtaagttgctgacctgagtcccttcaatgtttagtacttgaatgcatatttcccacatacaaggacattctacattaactggtaattcagctctcagaagcaggaagctaaactggatacgtactaccatataatcctcataccccattcaagttttacttaatatgtcaatactatccttttatttttcatttttttttctgagcaggagttataac

SEQ ID NO: 15847 - DNA, 2087 bp, Homo sapiens
ttatgtctttctgttacttacttgtttcagttccacacttgtaagtttacaacatgttcataagtgggttaccttagacataattagactttgtagagaagtttaattctatcattaagatttaaccagtggtgtgtgtattaatttgcacaaaagttaaagttttgctgtttacacttagatcttggtctttttaaaattgtctttgctatcagaattgtactgaaaataaatccaccagccatgcattccattttggagagaattgcagctgaagaagaagaggagaatgatggtcactaccaggaggaagaggaaggaggtgctcattccttgaaagatgtttgtgatctaagaagaccagccccatctcctttttcttctcgtagagtaatgtttgaaaatgaacaggtaaaagtgtgagcaagctacaaaggaataatactattattctctgtcatagagcaatgcttttgattttttatttttaaaaaaatgccttgtgtactgtttttgctaggtcttaaacttcaaaattgaataatacctattttttcttggtgtatattttctctagttaaatgtttcatgcttatttatttctcacataccaagtcctatggataggctaagaagatgctactactattttaaacatggatgcctttttttttgcactgaactattatgttttagatggtgatgccaggagaccctgtagaaatgacagaatttcaggataaagcaatcagcaattctcactatgtgctggaacttacgttaccaaatatttatgtaacactacctaataagagcttttatgagaagctttataataggtgagtttatacacatttagttgaatctttggaatcagattttctaattgcctccctgattttcctcttccccctttcctttccttgcctgaatattatatgccatctctgtgtactttgtgtggtgttgatggtgactattgccgttatgatgtgctattgtcatagcagagtttcctaactagcgtggtgccgggtgtgtgagatatttatttcctcagccctgaggttggctgattgccctctgtcagcttactgcaggttaccgatcaaatacaatttttttctttatgtgcagtgacgtgaagagttaagagatgctaatacagctagccaatgctggagtagaatcagaaccccattcattgtacaagaagcatcttttcttcagcattcaaaaagatatcttgttggaattcaaaattctgtgaacgtgtacaaaatttaaatttattatatttagatacccctcaatatttatgccaggcaggtattttgatactaatggaattctaggtcatagactctgaaggccttgagcagtttatctagcctctgtaagactcagcatcctcttctgtaaaatggagatgatcctggctcccacctataagggttgtttggaggattaaatgatataacacttggagagttctgagaatagtgtatggcatatcgtaagaacttagtggttgtctgttataattcctacccactgaagggatttctccgtagcatacctgaaagattgtcatgtgggtttctagaaaaagaagtccttagtgtttgtcatcactagcttcctacatgtagacaagttattctagtttccattaatcttcagaaacttcagactgttgtttctgctgtaggtttacttggtatcagataccactcggtatttattccttaaatgttagtaataaaccctgggttttctcactgggtgctattgacttttgctcttagaatcagaaaattaagttccaggattcttctagggttcacattacttcagtggtcttgaaaatgagattcagagaacagtccactctggtataggaagaaaatgttatcacttacgtttaactttaaaaataatcttttaaaatttatatttttatatttgttttataatatacattataaatagcacctaatgtatattcaattcacattagagaggtttcaaattggttttaaatgttggggtttgtttatatatgatctacagtttcaaaatgactg

SEQ ID NO: 15848 - DNA, 1109 bp, Homo sapiens
ctagaatttaagactgaatttataggaggatcaaccccagaacaaattaaattggaacttacctttagagaactaattggtaagattgaatgtgcctgtaaaagaaccatcctagataacaaacaactgctactgaaacttaacatcacaaaagtatctgacagccctgcaatatagtacaattaaagaacattatgttaaaatcaacagcaacaatgtctttctagtattgtatgcaaatatgtgatataggtaattttttaaaaactaaggatgatgattcattcactttgttaaaattcctgtttactgcaggagagtgtagtactttagcctacatttttattaccacctctcgtttatttattgtaggactgataatagaacttgttaagtgccactgtatgttaaatattatgctaagcacttgatacacattttcttgtttttttagtcatcataatcaccatatgtttatttttccagttatttttataatttaatagatgagaccatctgtggacctagaaggaagtatctaccaagatcatgttgtagtcaatggcagaatcaagatttgaacccaagtctgacagtggagcttgagctttcaaccattacactaactaatcgctagtgacttttatttgtaaaactcgttttgattttttctgcattactttgtttttgtcagttaatgaagggaatttataaaaactttaaagtgaaccaagtctatgaagacctggaaaaccttttatcctgtggttcctagaccacctgcctctgccacgacaccctctctccgcaaccacactcccacccctcatgagaatagtttgcaaaagttccccttcttttctctctcggttttacgtatcttaagaggtatttaaaattgattgttgtcaattatgacttcatgaaagggccttcaggtgttgtgagatcatcccttatctccagtggtgagaaactcattattctggaggaaagccatttttcatttgtaaaatggattgaaaaaacacgtatagaatttttgttgttgttgtttttgtttttcagacagagtcttgctttgttgcccaggctggagtgcagtggca

SEQ ID NO: 15849 - DNA, 1030 bp, Homo sapiens
caccagaatcatatattataatcatagataaaattacacttaattttggctgctgtgaacagaagtttaggaatgaaagaacaaaaagatccacattgtaagaaatccacaacttttaatttacgattaatctaatcacaacattacagtaatgcaccagcacataggtgctatagtatatttttttgattttgattgtgtagttttgttttctaaatgatttagtctaaggaaaaccaatttataaaaatgtaaatttatgtgaaagttaaattaggtagttatatattttgtcaaattattatgtgctcatgtaatgatttctagattaagaaactactgaactactaaagtttaataaggaaactttcctttattgatctttccatcagttatatgtaaataatgatctctacccagcttactttacatttataggtgtttcacaatgtataaatgctaataacataaataatatggatcaatttaagtatggaatgttggacaaaataagaaatcaaaccctactcaaaaaattttggccataataaacttcatttgcatgagagtaaaacaattccgaaagaaggaactgaaatgtaaatggaattccaaataatgtttttggctctgaataaaagaaataactgtatccagatgaaactagaggttgcaatatatttatactattttaatatctgattttaattcctaaactggcatatcacattaaaaatataccaggtaatactacatttatatatttaaaacaaaagaaaacatgttcatcagtagggtagcttcattttttattaatttatattgagtttttactatgccattaatattttggactcataaattacaccactgtaagtaacataaaatttggggcatcgctgtatctcatataatctgaaggaagaggattgtattaacgtatattaacttacttaaaagacttgaattggtgggattataatacaagtgacatagtttaattctctctagaagaagaagtattcttctc

SEQ ID NO: 15850 - DNA, 1108 bp, Homo sapiens
gatgctcttttattttatctacatatatactaatttccaaagcctgtatcatctactacttctgccacatttcctgttaattttctcagctagaaggaaataattaactaaagaagaattaacctcttcttttagctttcataatgttttctgttgacattcaatagttgtctactaatcgtatcttatttctttaactatatagtaggttctctgagggcagaatttactattattttttctactttcaacagcagggttagtaaactataacctgcaggccaaattggtcctgtcgtctgtttttgttaataaagttttattggaacacagccatgcttatttgtttatttactttaatggctgttttgtgctataatatgagagttgagaagttgtgatacagaccatatggcccacaaaatataaaatatttactgtctgaccctttacagaaaaaagtatgtcaacccctgcttataatatttagaacagttccatgcatctgtaggatatccattaagtatttgttgaatgaatacatgaattgatatttggtaaaatataacatgttgtgagagcacattctctggacttttttctgtgatctttttttccttcttggttattataaggtgattttaaatctcaagagtactttctagaatattgtttacctgggtaacatcatgatgttaaaaatctcttaaaagattaagaatttgtctatttgaaatgtattattttaagaactggcattgttgtaactcttaagaaattatttaggattaatttatattttccacagcaactggttctgagcctatgtattggtcaagttttatgaccagcagtatgcaattggcaaaagaatgtcttagccagaaactaacagatgaacaaggagaaggatcccagccttttgaaggacttgaaaagtttgctgaaaccattgaaacaggtttggtgttactgagaattttcaaaaatttagatttgatttagtagttttgtaccttcatgtaataagctttgtataaggcaaatccattggaatggatttttaaaagaattactgttcccacttcagaactttagaattgaggta

SEQ ID NO: 15851 - DNA, 1050 bp, Homo sapiens
aaaaaaactatgaaaaaatctgaaaaacacaagtagagggaagaaccttgatgaccgtaacttgtggtacctagttgatggtgaaataggaaattctagagaaggagcaggttttctccactgtctggagttgggagtgggaggaggagattgagattggacagagaataagttttactatattgatttttgagggggctttagaatgtgggggctttagatccaggtagagaagctcaggaggcactgggaatatacgtataggaagattgcagttgtaaagatatgggagttatcagagtatcaatagtgaataacagtggcaggagatggaactgcacaaagtgcgtgggtagtaagtagatcagcttgagaaacaaaaaaggccgaagatgaaacttagatgaactccaacattttaaattgtaaaggatcagaaaaaagattgagagagtgaagtgttacagaagtcaagggaagttagaatttcaaaaaaggtgagtggtcctaggaactaggtagagatgagaattcaataaagatgaggactaaatattgtttattgcatttgtcattttaatggtggttacaagcagtttcagaggagctgagggttagaaggtcgcttgtagtttgcagtttgagcagataactaccttgacagagaaaatggggttgatggctagggggaacatggagcaaggttaggggttttagtttacttttgaaaataataatgatcatttattaaataccttccatctctatatactgtactgtgtgggtgcttttacatacattattttactctaaattgggtactaactttctgtttactgtgaggttaaataacttactcaagcttagtattaaacagtgcagcaaggtttgaaacctgtctttctgactttatattttttttttgtacaccacactgccccagattcaagaaacttgagcttctcagacataacagcactgggttcacctgggaatttgctaacattcaggcttctggccccttccatacagattttggctctagaaatt

SEQ ID NO: 15852 - DNA, 1078 bp, Homo sapiens
tttcatacattgatataatatgtattggattatttaatatctgcaaccctgaggtgtttaaatctattatttgttacatttgttgactgccatttacagatacttgccatcttctctttctgtgacttttcattgtgagcttactgctcattttttaatcttattttcagattttttactcctgagggcccaaatgagggatgctttcctccagagatttctgtctagttctgctgtgaatcaggtgcaccgaagacttgaagacatatccatcacctttgagcatctcatatctgcaaggactgccaagctcaactcctccaccttgctctttgtcctaggctcaggagcctaattgcaatggtaattggtgctcatcctcaaggccagcaaacctcttcatttgatacactgccagcttatcccaactgtattagtctgttctcatgctgctaatagagacatacctgagactgggtaatttataaagaaaagaggtttaataaactcacagttccacatggttgggaaggcctcacaatcatggcagaaggtgaaggaagaggaaaggcacatcttacatggcagtggccaagataagtgtcaagcaaaaggggaaaaccccttgttataaaaccatcagatctcatgagaactcactcactaccacaagaacagcagtatgggggtaactgcccccatgattcaattatctcccactggtccctccactacacttggggattatgggaactacaattcaagatgagatttgggtggggacacagccaaactatatcaccaactttagatttagctcacattttgaggaagactggcaggtttgaagaattccacgtaccttgaaagcccattgatgtgtcaaaaagcccatgttattgaggacagtcttgttttgatttatgacagtgcctttgcacacttgatctgctgttctccagcagtggaagttattgtattattctgtattaacctttttacttctttagctctcataaatactgcatgataaaggtgaccgtattttctactttgaagaactattataagcgttagg

SEQ ID NO: 15853 - DNA, 1025 bp, Homo sapiens
aattgcatgattggatacagggaaaatgttataattgctcacaggtagcaatttattaggatagatgttacttatgacatgtgtcaaaaaggtcaaagtttatacttccttggacattaacctaaccttcgaaactctaaaagttacactttttggtcattaattttttttttacaagcagagattttgacaattaacccagttaataaaggtcaaatttcaattttttccaatttctggagcatttaaattattcctttttgaaaatgggaagatagaggatgataaatagttattaaatgagtacaaggatgtagttctgctgtcagggtggtgattataaaacagctgatactggaagaatagaattgctgtgtatctgattggaaggaaagtagattacaagcagaggaaatagaaaaattaagcccaaataatgtgtgcagttagtaggataatgtgggtatatgcgcttgttaaatcatctcaggattctagtcattcaattatgtagacttcaggcttcaactattgaatctgcacattttaaaataagtaatttctgcaaacttgcaacaaagtacaacttgggttaaaaaccgtttgtcgcccaccaggcagcatccctcagatgaatctaaagaggggcaaacaacagtcagcgcagccaaagcccgctggtagggaggtcgggacgcactggaccgcccttcctccaccccacagccagcacagcccccagacggccggggcagctgtgtgggtgaggaagggggttttagaacctgtcatgtgtgggaaatggcagagaaagtccacacagccctcctctgccactccagcagtacaaaccaagcctccctgtccaccctggtcaaaaccaaatgacccacacgccctccctttatccccggggagcgcccctgggaattcccgtatccctgctccgctcgcgccccctggtggcggtgccgcccgccgggtgccgcccagggagctctaagtagaggccttgggttccgttc

SEQ ID NO: 15854 - DNA, 1045 bp, Homo sapiens
tcggttggccctttcttgcagtacttgaactatttccagttgcatagtgtttaattggtgtgttaataaaacttctctccagtagtttgtcttaatccgtttatccccgtggcacagcaaatttaagccatggcgacgcttggtggcttaccagcgttttcaggtaaacataattgtgtcgttgggcgcattcacagtcagttctgggggatatggcctgaaatcctcattaagttaaataactactttcgtatcattcatgtctttcaccttgaaaaggttaatggcctggatcaatttgtttcatttaattcgttgctaccattagtttctgtaatgaagtcatgatcctcagtgatttcaagaatttctagttaagttctttaagattttcttgcatttgaggcataaaatgataaagaagacaggaattaggattcattagttctccagggaatagaggaaccattcttaatgaaaatggattatgcagaccttttttttattgaacttgtcaatatttgattaatgattaaagtgtgaactcaacataaattattgttaacactttttaaaaaccatgtgtatgtttaatttttgaatgtattatgtgcaacctgagattacagctgttaggctctaggaaaagcttgtgaggatggtctccaattctggatgtccgcttgcctccgccccagcctgcggccttttgcaggggctgaaaatcgtgctcacagttgagatgaggagctggaatgacccattccagctcagctctccttgaggacaaccacacgtgctgtagacttaaggaatctcagtttggagcaagtgggtaaccgcagcagggtgactgatcttgctttctgcttttatcagttccagtgtttttgcattgcattttaccgagccgcccatctctgctcagcttttggcttttctccgagtattctgtatgactgaaggtaagtcatttcaggaaaaaagagatgttgacttttttctttttaaatcatgaaagtgtaaagcatagggattcagatta

SEQ ID NO: 15855 - DNA, 1054 bp, Homo sapiens
ttcctgatattagtaggcagaaataagatacatttcagatcattttgaaatatcatactttatactagtatactgtttgattaggttttatgttcatcttttctctgtcagctttccttgttattagcagtattataaatagaataaagaaatgccgtgaatgattatttcacattgaattccctggaatggccagaacacacgtagtgtgcgccagacactgaagacagaatatcctagtgctaatttgggaaggtctagcaacaagtatgttcttgaatcttaaaagtatttaaattgtggcaagaaagaatagttccatttttataattacattttggccttaatttagatatggttaatttaattagtaatgaatactaaaacataatagcatgttttataacttattttcattaatgaatataattttacattttttgttttgtttttcttcagagttattttaaattgacggtaagcttgaaatttaagaaatcttcaaatagcttttaatatctgactgtagtgtttttcttcttctttttttgaatgagatcatttgttcccaaactcaattgattattagagttctttttaataaaattaaagcaataatgcttggctttactctaaacaaacaaaaagaattaacccaggaacctctgtagcaaggtgagcagtgccctacccccagccccacagtccacctgatggtgttgaggccgccaccaggccaccgtggtccctagcgaagcttccatccattggcacctcacacactcatctgcacattggtttttgtttagcttccatgtaaatgggataaaacaattcctttttccctaccaagtgttaaaaaaaaaagaggtttatctcaaaataaagaaattgatgacaaccagtgctgtgttttccctaatacgactacatactttttaacctaccacagtcctggcagaaacattgctaacctgtagaaggtttattcaggatgctggtactttgtcttacagtggttatgttcctgacattctgcactctgcactcttgt

SEQ ID NO: 15856 - DNA, 1041 bp, Homo sapiens
cttccctgggtacagattcagggtctctgtgtctcagctcttcctgggctcccctcatccctgcactgctgagaaaactgagaccatgtgacaagaacttcctttccttttgtctccacctgggtttcttatgtcctcctctcctcccctccctctgaggaagggaccccccttagagctaagggaagccctggggcctggtcaggaactcaggtcaggagctcagcgacattggccctgtgttttcactctttctttctgtcctggctttatccccttggtttacagacagcccccatgcctttgagatgatgtcctgtctgtcttccacctttaatcacaacatttatcaagaacattccacactgagagttcttccagccccagcagcctggctctccccgccctgaagtgtgatgccctctgggagggcctggggtctggcttctttccctgcccagtcccctcatcctccccacgttcctgcttcgttcttcctgctcttctgaatctccaggcttttctgaccctaccattcctgtcccccgaatgtaagagctctccaagtttctgggctccgagttgggagtcagctgacctggatttcaaaacccaattctgaagtcttttctcatctatgactatagtcaaacatcttatagtaaaagatagcttaagtcagtctattggatttcctgcattctattccaggtggacaatttaataattacctgttttctaggtagtgcttaaaagatctgcactgattaaactattctttcattgaaaatttgtttccagaaattgaatgctccaacaaaatggtatcattcttaacaatgtgagatagtatttcctctggaaaaaaaaaaaagagagtgaaatccattttaccactattgatcagtagagcatttaatgaagaaaatataaggcaaagtatgatttttatgaaaaaggaagtaatcagacttgaattttctaacttgtgctacttggatatcccttggccgttctcataagagaaaccaggtacaggtg

SEQ ID NO: 15857 - DNA, 1031 bp, Homo sapiens
ctcaaacaatcctcccacctcagctttccgagttggtgggactacaggtgtgtgccaccacacctagctaatgtttgtattttttggtagtgatggagttttgccctgctgcccaggctgatctcgaattcctcacctcaagtgatctgccctcctgggcctcccaaaatgctaggattacaggtgtgagccactgcacccaacccctccaccacttgttttgattcatcctttggcagattacttttcctaaatgctgaagaccagggggtgctcagtgtctacaaagtccttgttcctggatggatactaacttactgacacctctcaagtgccagcaaactctggtagcagggattgtcttcattttacatgtgaagtaacagaccagatgggtagcactgcttggggccacatagctaatactctaatgctcctgccgtgggcactgtgccaccctctgcagggcctcatgtgttgggactgcactggcattgcaccttttcatccctctgtgtgccaatcgattctgcaaaccccagctgctcagcttcccttaacaagccctcctttccctgcctctgccatttccggtactctctgtctgggatgtctcccttcccacatggaaaatcctgcccatctttagagacttaactcgcatgccacctcctctgtgagtcattgccagatccccctcttcccgacagtgactgcagcttcttttctgaattccagcacgtgtcatgtatcctggtgtgacacgtcacagtttgcctgtctgggctccctgctccaaagtcgttggctccttaaaagcagggaactcatcttgctcattgtccccccacaatgccttgcacgcagcagacacacagtgcaggtttggggagttgacggacgaagctttgctgggaagctttaagatgagattaaagtggctctgaagctgcagaaatgtgcattagtacatcaaggataaaattataccactttatgccttggcctcctttatcgttttctataaaata

SEQ ID NO: 15858 - DNA, 1058 bp, Homo sapiens
tgggtggctgaggtgggcagatcacctgaggtcgggagtttaagaccagcctggccagcatggtgaaaccccgtctctactaaaaaatacacaaattagctgggcgtggtggcgtgcgcctgtagtcccagatacttgggaggctgaggcatgagaatcgcttgaacccgggaggcagagttgcagtgagccaggattgtaccactgcgctctagcctgggtgacagagtgagactctgtctcaaaaaaaaaaaaaaagaaatgaaatactttttctttgtccttggggctctgtctggggtcttctcggtggtgtgtgtccctgccttggagcctgggggagggtgcccctagtgtacactggtgtgtccccctgaggcgggtttgagttcccaggtcagaccccagcatctgcatcctgccctcgggactggcaacgcttctgctctgtcttcctcgctgacccttctcactggaagtcctcctattaaaccatggccttcctcctcttcctcatctctttacctgactgcggtccttggcccttttaggaaaagtgttgcttttgtcaatcagtttgggagctgatgtccagcaaagtgatgcacgttttccctagcctcccaccttacctgtgacgcaggtgtttgcatgggagtagaggcacccataggggcatggaatacagacttaaagggcaaacagttaccatggagtcccaagtgatataacttggggctggcatcctaaccaaggaaggttaggcaatgcccgctgtgggctgagcacggtaagacttttcttactttctattatataaggaggtgtctgaaactataccttcctagaataatctgagacagaattaaacaaattagaagaaagctccaataccaggtctaggctgtcattgatcgtttaatttgtgtactgagaagtcagaatagaggccagaaatacagggctttctcctaagacagtgttccttggcgcctccaaatgccagtggtgggctgagggccctgacagaggctccctaaccctcgctgttcctccag

SEQ ID NO: 15859 - DNA, 1377 bp, Homo sapiens
ccagttcatattccattactgtgacctgctctcagttttttttgttttcggcattgaggctgttaaccttttccagggtcatggggaccctctccctagagaaatgaacttgcagatcatttggcagggtgctccaaattcaagaacctcattcgcaatttttatctgtgatttcccatttaaaatagttttcttgggggcctgtaccaaactctgcatgtgaactgaaacctattttgttttctccccccgcgatctgcctgctggctcggaggtctacaggccatggcttgcagcccctgtctctgggtactttgggagtgacagcaagcacaattcagttctgtgcatccccggtggtgatcctggtttttgggagaggagcatggagaagtgataatagtccattcaaccttacagcttgcttcaggcttttagggtttttaattctaaaagcatcagtactgacttctggtatttatacatctctttgtgtcgatttctctgtattgcattttttatttattgtttttctctctttggtggtggttgcctaaaaactagaaaaataatttcctgtgctctgtcctcccagcagatttccttgatccaggaccttttagtgtgggcacttagttcagatcaccttctgtctttaacttgcttttatagtttgtttaaaacaaaagtcttgggctgggtgcagtggctcacgcctgtaatcccaacactccgggaggccgaggcaggcagatcacgaggtcaagagtttgagaccagcctggccaacatggtgaaacctcgtctctactgagaatacaaaaattagccaggtgtggtggagcgtgactgtaatcccagctacttgggagggtgaggcaggagaattgcttgaacccgggaggcagaggttgcagtgagccgagatcgtgccactgcactctagcctgggcgacagagcaagactccgttttgggaaaaacaaacaaacaaacaaaaaacaaagtctttctgggcccctgctctaactcgtgtgtatggtaggggcttgggctttacgagttttgaggagtccttccagtttttacattgtaaaatgtaaaacacctgtatgaacacctgaatgctacatacagtgtatgtcaaatatcttcttcttgacatcttcttcatgagatgtttgacactcactgtatatatccttcaggtgttcaacagataatagtgtgtaaccagaagcctcacgctgcaggaattttgagagcattcgttgtattaagatacagcacctgggccaggtgcggtggctcatgcctgtaatcccagcactttgggagtctgaagtgggagggtggcttgagttcaggagttagagac
